United States Patent Application Publication US 2025/0074962 A1 - sequence listing, part 16

SEQ ID NO: 27275 - DNA, 7478 bp, synthetic construct
  misc_feature 1..7478: note = Description of Artificial Sequence: Synthetic coding sequence
  source 1..7478: mol_type = other DNA
atgacagccgagccgatgtctgaaagcaaacttaacaccctggtccaaaagctccatgattttctggcccacagctccgaggaatctgaggagacatcctctccccctcgccttgcgatgaatcagaacacagacaagatcagcggcagcggcagtaactccgacatgatggaaaacagtaaagaagagggcacgtcaagttccgaaaagtctaagtcctccggatcttcccgttctaaacggaagccctctatagtgaccaagtacgtcgaaagtgatgacgagaaacctttggatgacgagacggtcaatgaggacgccagcaacgaaaacagcgagaatgacattacaatgcagagcctgcctaaagggactgtgatagtgcaacccgagccggtcctaaacgaagacaaagacgatttcaagggcccagaattccggtctagatcaaagatgaagacagagaatctgaagaaacgcggtgaggatggcctgcacgggatcgttagttgtaccgcctgcggccagcaggttaaccacttccaaaaggattccatataccgacaccctagcctgcaagtgcttatctgtaaaaactgttttaaatattatatgagcgatgatatctctcgcgactctgacggcatggacgagcagtgccgctggtgtgcagagggcggaaatctgatctgctgcgacttctgccacaacgctttctgcaaaaaatgtatccttcgaaatttgggcagaaaggaattgagtactatcatggacgagaataaccagtggtactgctatatatgccatcccgaacctttgctagacctcgtgaccgcatgtaacagcgtgttcgaaaaccttgagcagctgctgcagcagaataaaaagaaaattaaagtggattccgaaaagtccaataaggtgtatgagcacacctctaggtttagcccaaagaagaccagcagcaactgtaatggggaagagaaaaaactggacgacagttgttctggttccgtgacgtactcatactccgcactgattgtgcccaaggagatgattaagaaggctaaaaaactgatcgagaccacggctaatatgaacagcagttacgttaagtttctgaaacaggccacggataattccgaaatcagttccgctactaagcttaggcaactgaaggctttcaagagcgtcttagcagacatcaagaaggcccacttggccctcgaggaggatctgaatagcgagttcagggcgatggatgctgtgaacaaagagaagaacaccaaggagcacaaggtgattgatgccaagtttgaaaccaaggctagaaagggggaaaaaccttgcgcattggagaaaaaggatatcagtaaatccgaagccaaactgtctaggaagcaggttgacagtgagcacatgcaccagaatgtcccaacagaagagcaaaggactaacaagtccaccggtggggaacacaagaaaagcgacaggaaggaggagccccaatacgaaccggctaatacaagcgaggacctcgacatggatattgtgagcgtgccctcgagcgtgccagaggacatttttgagaatctggaaaccgctatggaggtgcagagcagtgtggaccatcagggggacggctcatctggcaccgagcaggaggtggaatcctcatcggtgaaactcaacatatccagcaaagataacaggggcggaattaaatcaaagaccacggctaaggttaccaaggaactctatgtgaaacttactcccgtcagtttgtctaattctccaatcaagggtgcagattgtcaggaagtcccccaggataaggacggatataagagttgcggtctgaaccccaagctggaaaaatgcggactgggtcaggagaattcagacaatgagcacctggtggagaatgaagtctcacttctcttggaggagagcgatctccgcagatccccaagagtgaaaaccacaccactgcgaaggccgacagagaccaacccggttaccagtaatagtgacgaagagtgtaatgagactgtgaaagaaaagcagaagctctcagtgcctgttcgaaaaaaagacaaacgcaactctagtgattccgctatagacaacccaaagccgaacaagttaccaaagtccaaacagagtgagactgtggaccagaatagcgactctgacgaaatgcttgctatactcaaggaagttagtcgaatgtctcatagcagctcttcagacaccgacattaatgaaattcataccaatcacaagaccctgtatgatttgaaaacacaggctggtaaagacgataagggcaagagaaagcgaaagagctccactagtggaagcgacttcgacaccaagaagggtaagtctgccaagagcagtataatatcaaaaaagaaacgtcaaacgcagtccgaatcatccaattatgactctgagctggagaaggagatcaagtcaatgagtaagatcggagccgctaggaccacgaagaagagaataccaaataccaaagattttgatagcagcgaagacgagaagcactcgaagaaggggatggataatcagggacacaaaaatctcaagacatcccaggagggttcgtccgatgacgcggagcgtaagcaggaacgcgagacattttcatctgcggaggggacggttgacaaagacacaactataatggagctccgggatcgcttgcccaaaaaacagcaggccagtgcatcaactgacggagtagataagctgtcaggaaaggagcaaagcttcactagtcttgaagtcagaaaagtggctgaaacaaaggagaaatccaagcacctaaagaccaaaacgtgcaaaaaagtgcaggacggactgagcgacattgcagaaaagttcctcaagaaagaccagtctgatgagactagtgaggatgacaaaaagcagtccaagaaggggactgaagagaaaaagaagcctagtgatttcaaaaagaaggtaatcaaaatggagcagcaatacgaatctagctcagatgggaccgaaaaactacccgagagagaggagatctgtcactttccaaagggaatcaaacagatcaagaacggcaccaccgacggggagaagaagtccaaaaagattagggataaaacatctaagaagaaggatgagctgagcgactatgcagaaaagtccacgggtaaaggggattcttgcgatagtagtgaagataaaaagtctaaaaatggcgcttacgggagggaaaaaaagaggtgcaagctgctgggaaaatcatctagaaagcgccaagactgctcctcttctgacaccgagaaatattctatgaaagaagacggctgtaattccagcgacaaaagacttaaaagaattgaactccgggaaagacgcaacctttcatctaaacggaacactaaagaaatacaatcaggctcctcaagttcggacgccgaggaaagttctgaggacaacaagaaaaagaagcagcggacaagttctaaaaaaaaagccgttatcgtgaaggaaaagaaaagaaacagtttgcggacgtcaaccaaacggaaacaggctgatatcacctcctcatccagctccgatattgaagacgatgaccagaattcgatcggcgaagggagttctgatgagcagaaaatcaagccggtcacagaaaacctggtcctgagttctcataccggtttttgtcagtcgtctggtgacgaggccttgtctaagagtgttccggtcaccgtcgatgatgacgacgatgacaacgatcccgaaaaccggatcgccaaaaagatgctgcttgaagagatcaaagctaatctctcaagtgatgaagatggctcttcagatgatgagccagaggagggaaaaaagcggactggcaagcagaacgaagagaatccgggagacgaggaggcaaaaaatcaggtgaactctgagtcagactctgacagcgaggaaagcaagaaacccagatatcggcatcgcctcctccgccataagctgaccgttagtgacggagagtcaggtgaggagaagaagaccaagcccaaggagcacaaggaggtgaagggtcgcaacaggaggaaagttagtagtgaagactccgaggattcagactttcaggaatccggcgtgagtgaggaagtcagtgaatcggaggatgaacagcgtcctcggactcgttccgctaaaaaggctgagttagaggagaaccagaggtcctataagcaaaaaaagaagagacgacgcattaaggtccaggaggattcttcgagtgaaaataaaagcaattcagaggaggaagaagaagagaaggaagaagaggaagaggaggaggaagaggaggaggaggaggaggaggacgagaatgatgactcaaagagccctgggaaaggacgcaaaaagatcagaaagattttgaaagacgataagctacgcacagaaacacagaatgccctcaaggaagaagaggaacggagaaagaggatagcggagagggaaagggagcgtgagaaactccgagaggtgatagaaatcgaagacgcatcccccacaaagtgtcctattacaaccaaactagtgctcgatgaagatgaagagacaaaagagcctctagtccaggtgcaccggaacatggtcattaagttaaagcctcatcaagtggatggggtccagttcatgtgggactgttgttgcgaatcagtaaagaaaacgaaaaagagcccagggtctggctgcattctcgcccactgtatggggcttggaaagacacttcaggtggttagctttttacacaccgtgctgctgtgcgacaagctggactttagcacagcactggtggtctgtcctctcaatacagctttgaactggatgaatgagttcgagaaatggcaagaggggttgaaggacgacgagaaactagaagtgagtgagctggccaccgtaaaacggccacaggagcgtagctacatgctgcaacgctggcaggaagacggcggtgtcatgatcattggatatgaaatgtatcgcaaccttgctcaggggagaaatgtaaaatcgaggaagctaaaggaaatttttaacaaagctttggtagaccctggaccagactttgttgtgtgcgacgagggccacatcctcaaaaacgaagcctcagctgtgtctaaagctatgaattcaatccgctccaggaggagaataatcctcactgggacacctttgcagaacaatctgatcgaatatcattgcatggttaacttcatcaaagagaatctgttgggatccataaaggagtttagaaatagatttataaatccaatccagaatggccagtgcgctgactccacaatggtcgatgttagggtcatgaagaagagggcacatattctttatgaaatgctagccggatgtgtccagcgcaaagactataccgctttgaccaagtttctgcctcctaagcacgagtacgtgctggctgttcggatgacgagcatccagtgtaagctctaccaatattacctggaccatttgaccggcgtgggaaacaattccgaggggggaagagggaaggccggtgctaagttatttcaggacttccagatgcttagtcgaatctggacgcatccatggtgcctgcagctggattacatctctaaggagaacaagggatacttcgacgaggattccatggacgagttcatagcctcagacagcgatgaaacctcaatgtccctctcatcagatgactataccaaaaagaagaagaagggtaagaagggcaagaaagattccagcagtagcggcagcggatctgataacgacgtagaggttatcaaggtctggaatagtaggagccggggaggcggagaaggcaatgtggatgagaccgggaacaatccatctgtttctcttaaattggaagaatcaaaggccaccagcagctcaaacccatcttcacctgcaccagattggtataaagattttgtgactgacgccgatgccgaggtgctggagcatagtggcaagatggtcttacttttcgaaattctgaggatggccgaggaaatcggggacaaggtactggtgttctcccaaagtctgattagtctggacctgatcgaggactttctggagttggcttcgagggagaaaaccgaggacaaagataaacccctgatctataaaggggaagggaagtggctgagaaatatcgactactatcgtctggatggctctacaacggcacagtcacgcaagaagtgggctgaagagttcaatgatgaaactaatgtacggggacggctgtttattataagcactaaagccggttctctgggtatcaacctggtggctgcgaaccgagtgattatcttcgatgctagttggaatccctcgtacgacatccagagcatcttccgcgtataccggttcgggcagacaaaaccagtctatgtgtatcgcttcctggctcagggcacaatggaggacaagatatacgacagacaagtgaccaagcagagcctgtctttcagagtggtggaccagcagcaggtggaacggcactttacgatgaacgagcttactgaactctatacctttgagccagacttgctggacgatccgaatagtgaaaaaaaaaagaagcgcgatactcctatgcttccaaaagacactatcctcgcggaactgctccagatccacaaggaacacattgtcgggtaccacgaacacgatagtttactagaccataaagaggaggaagagctgactgaggaggaacggaaagctgcttgggcagaatatgaggccgaaaaaaaggggttaacgatgagattcaatattccaacaggaactaacttgccgcctgtctctttcaattctcaaacaccttatatccctttcaatctgggcgctctgtccgcaatgtccaatcagcaactggaagatctgattaaccagggtcgcgagaaggtggttgaggcaacaaatagtgtcactgccgtccgtattcagcctttggaggatatcatttctgccgtctggaaagaaaacatgaacttgagcgaggcccaggttcaagcccttgccctttcccgccaggcctcccaggaactggacgtgaagcgtcgggaggcgatctataatgacgtgctgactaaacaacagatgctgatttcttgcgttcagaggattctgatgaaccggcgattacagcaacagtacaatcaacaacaacagcagcagatgacttatcagcaggccacattgggtcatctgatgatgcccaagcctcctaatctcattatgaaccccagcaattatcagcagatagacatgcggggtatgtaccagccagtggccggtggcatgcagcccccacccctgcagcgggctccacctcccatgaggtccaagaacccaggtccgagccagggaaaaagcatgta

SEQ ID NO: 27276 - DNA, 7364 bp, synthetic construct
  misc_feature 1..7364: note = Description of Artificial Sequence: Synthetic coding sequence
  source 1..7364: mol_type = other DNA
atgaccgcagagcccatgagcgagtctaagttgaacactcttgtgcaaaagctccacgattttcttgcacactccagtgaggagagcgaagagacatccagtcctccacggctggccatgaaccagaacacggacaagatcagtggcagtgggagtaattccgacatgatggagaatagtaaagaggagggcacatcctccagtgagaaatccaagagctctgggtccagtcgctctaaacgaaagccatctatcgttaccaagtacgtggaaagcgatgacgagaagcctctggatgacgaaacagtgaatgaagacgccagtaacgaaaacagtgagaacgatatcacaatgcagagcctgcctaaagaggacgggctgcatggtattgtaagttgcaccgcatgcgggcaacaggtgaaccactttcagaaggacagcatttaccgtcacccgagccttcaggtgcttatttgcaaaaattgcttcaagtactacatgagcgacgatatttcacgggattccgacgggatggatgaacagtgtcgatggtgcgctgagggcggaaacctcatttgctgtgacttttgccacaatgccttctgcaagaagtgtatcttacgtaacctcggcagaaaagaactttccactattatggatgaaaacaatcagtggtactgctacatttgtcatccagagcctttgctcgacttggtcaccgcttgtaatagtgtgtttgagaacctcgagcagctcctgcagcagaacaagaagaagatcaaggtggactctgagaaatctaataaggtgtacgaacatacgtctcggttctctcccaaaaagacttcctcgaattgtaatggggaagaaaaaaaattggacgatagttgttccggctctgttacttacagctacagtgctctgatagtccctaaggagatgatcaagaaggctaaaaagctgattgaaacaaccgccaacatgaactcatcctacgtcaaattcctcaaacaggccaccgataactcagagatcagttctgctaccaagcttcgacaactcaaggccttcaagtcggtcctggccgatatcaaaaaggcccatctcgcactcgaggaggacctgaactccgagtttcgagctatggatgccgtcaataaagagaagaacaccaaagagcacaaggtgattgacgctaaattcgagacaaaagccaggaaaggggaaaaaccatgtgcccttgagaagaaggatattagcaaatctgaggcgaagctcagtagaaaacaggtggattcagagcatatgcatcagaatgttcctactgaagaacagaggactaataagagcacaggtggcgagcacaaaaagtcagaccgcaaagaggagcctcagtacgagccagctaacacatccgaagacctagacatggacatagtgtctgttcctagttcagttccagaagatatttttgagaatctggaaaccgccatggaagtgcagtcctcagtcgatcaccaaggtgatggttcctctggcacagagcaggaggtcgaaagcagcagcgtgaaactgaacatatccagcaaggataacaggggtggcatcaaatccaaaaccaccgccaaggtcaccaaggagctgtatgtgaagcttacacctgttagtcttagcaattcaccaattaagggtgcagattgccaagaggtacctcaggacaaggatgggtataagagctgtggtctcaacccgaaactggagaaatgtggcctgggccaggagaactccgataacgagcatctcgtcgaaaacgaagtctccttgctgctggaggaatcagacctccggagatcgcccagagtgaagacaacaccactgagacggcctaccgaaacaaaccctgtaacctctaactccgatgaagaatgtaatgaaacggttaaagagaagcagaagctgagtgtgcctgtgcgcaaaaaagataaaaggaacagctccgatagtgcaatcgacaatccgaagcccaataagttgcctaagagcaagcagagcgagaccgtggatcaaaattcagatagtgatgagatgctggccattttgaaggaagtgagcagaatgtctcactctagctcaagtgataccgacattaacgagatacatactaatcacaaaactttatacgatttgaagacccaagcgggaaaagacgataagggtaagcggaaaagaaaaagtagtacatctggctccgactttgatacaaagaagggtaaatctgccaagagcagcatcatatcaaagaaaaagagacagacacagtctgagtcctctaattatgattcagagctggaaaaggagattaagtcaatgtccaagattggagccgctagaactacaaaaaagcggatccctaatactaaggactttgatagttccgaggatgaaaagcattccaagaagggcatggacaatcagggccacaagaatctgaagacctctcaggaaggaagtagcgatgatgcagagcgaaagcaggagagggagacattttcatcagccgaaggcaccgtagacaaagacacgacaatcatggaactgcgcgatagattgccaaaaaagcagcaggcctctgcctctaccgatggggtggacaaactgagcggaaaagagcaatccttcacttccttagaggtgaggaaggtcgctgagactaaggagaagagcaaacacctcaagacaaagacatgtaaaaaagtacaggacggtctgtcagacatcgctgagaaatttttaaaaaaggatcagtctgatgaaacttcagaggacgataagaaacaatccaaaaaggggacagaagagaagaaaaagccatccgattttaaaaaaaaggtcatcaagatggagcaacaatacgagtcttcaagcgatggtactgaaaagctcccggagagagaggagatttgccactttccaaagggaatcaagcagatcaagaacggcactacagatggtgaaaaaaagagcaaaaagatccgcgacaaaacctctaagaagaaggacgaactgtccgattatgccgaaaagagcacaggaaaaggcgactcttgcgactcatccgaggacaagaaaagtaagaacggggcttacggccgagaaaagaagcgatgcaaattgttggggaagtcttctaggaaacgacaagactgctcgtcctctgatacggagaaatattccatgaaagaggatggctgcaattctagcgataaacggcttaagagaatagaattacgggaaaggcgcaacctgagttccaagagaaataccaaggagatccaatcagggtcaagctccagtgacgcagaggagtcttctgaggacaacaaaaagaagaaacagaggacctcttcaaagaaaaaagcagtcatcgtgaaagagaagaagcgaaattcccttagaactagcacaaagcgaaaacaggcagatatcacctcaagttcctcctcagatatcgaagatgacgaccaaaactctattggcgagggctcctctgacgaacagaaaatcaagcccgttaccgagaaccttgtcctgtcctcccataccggcttctgtcagagcagcggcgatgaggctctatccaagagcgtgccggtgacagttgatgacgatgacgatgataacgatcctgagaatcggattgctaagaagatgctgctggaggagataaaggcaaacctgtccagtgacgaggacggctcttcagatgatgagcccgaggaggggaagaagaggacaggaaaacagaacgaagagaaccccggagatgaagaggccaaaaaccaggtaaactctgagagcgacagcgactccgaagaaagtaagaagcccaggtaccggcacagactgctccgccataaacttactgtatccgacggcgaatctggtgaggagaaaaaaacaaaaccaaaggaacacaaagaggtgaaaggtcgtaacaggcgaaaggtgtcgtctgaggactccgaggactctgacttccaggaatctggagtgtctgaagaagtatctgaatcggaggatgagcaacgcccacgaacccgctcagccaagaaggcggaactggaagagaatcaacggtcctacaagcagaaaaaaaaaaggcggagaataaaggtgcaggaggactcgtcgtcagaaaataagagcaattctgaggaagaagaagaggagaaagaggaggaagaggaggaagaggaagaagaggaggaagaggaagaagacgagaacgatgatagcaaatcccctggcaaaggccgaaagaaaatccgcaagatcctgaaagatgataagctcaggaccgagacccagaatgccctcaaggaagaggaagagaggaggaagaggatagcagagagagaacgcgagcgcgagaaactacgagaggtaatcgagattgaggacgccagcccaactaagtgtcccatcaccacaaagctggtgctggatgaggacgaggagacaaaggagcccctggtgcaggttcatcgaaacatggtgattaaactcaagccacaccaggttgacggggtgcaattcatgtgggactgttgttgcgaatccgtcaagaaaaccaaaaagtcaccaggctcaggatgtattcttgcccactgtatgggcctggggaaaaccctccaggtcgtgtcattcttacacaccgtcttgttgtgcgataaactcgatttctctacagcgcttgtcgtttgccccttaaacaccgctcttaactggatgaacgagttcgagaaatggcaggaagggctgaaggacgacgagaaacttgaagtcagtgagctggcgaccgtaaagcgacctcaggagcgctcctatatgctgcagcgatggcaggaggatggcggagtgatgattataggatatgagatgtaccggaatctggcccagggcagaaacgtgaagagcagaaagctgaaagagatctttaataaggctctagtggaccctggacctgatttcgttgtatgcgacgagggtcacatcctgaagaacgaggcgagtgccgtctccaaggctatgaacagcatccgaagcagacgcaggattattctgacagggacccccctgcagaataaccttatcgaataccattgcatggttaacttcattaaagagaatcttctggggtctattaaagagttcaggaacaggtttataaatccaatacagaacggccaatgcgcggactcaaccatggtcgacgttagagtgatgaaaaagagagctcacatactctatgagatgctcgccggatgcgtgcagcgcaaggactataccgcactcacgaaattccttccccctaagcatgagtacgtgcttgcagtcagaatgaccagtattcaatgtaaactgtaccagtactaccttgaccacctcaccggagtgggaaacaattcagagggcggacggggtaaggccggtgctaaactgtttcaggatttccagatgctgtcccgcatctggacacatccatggtgcctgcagctggattatataagtaaggagaacaagggttatttcgatgaagactctatggacgaattcatcgccagcgactccgatgaaacctcaatgtcactttcatcagatgattataccaaaaagaaaaaaaaaggtaagaagggtaaaaaggattcaagttcctctggatctggcagcgataacgacgttgaggtcattaaagtctggaatagccgatcgcgtggaggcggagagggcaatgtcgacgagaccggtaataatccatcagtatcactgaagcttgaagagtcaaaagctacttcctcttcgaacccctcctccccggcacctgactggtataaagacttcgtgaccgacgccgacgctgaggtgctcgagcatagcggtaagatggtcctgctatttgagattctgcgtatggccgaagagattggagacaaggtgctggtgttcagccagtctctcatctcgctcgacttaattgaggatttcttggagctggccagcagggaaaaaacagaggataaggataaaccgctaatttacaaaggcgaaggtaagtggctcagaaatatagattactacaggcttgatggctctactactgctcagtcacgtaagaagtgggcagaggagtttaacgatgagacgaatgtcaggggcagactctttatcatcagtactaaagctggcagtctgggcataaacttggtcgcagccaatagggttattatttttgacgccagctggaaccctagttatgatattcagagtatctttcgggtgtacagattcggccagacaaaacccgtatacgtataccgattcctggctcaggggacaatggaagacaaaatttacgaccgccaggtaacaaaacagtctctaagttttcgtgtggtcgatcagcaacaagtcgagagacatttcactatgaacgaattaacagagctgtacacattcgagccagacctgctcgacgacccaaattctgaaaagaaaaaaaaaagagatacacctatgcttccgaaggataccatcctggccgagctgctgcaaatccacaaggaacatattgtgggatatcatgagcacgactctcttttagatcacaaagaagaggaggagcttacagaagaggagcgtaaagccgcatgggcagaatatgaggctgagaagaaggggctaaccatgaggttcaacatccctactggcaccaacctgccaccagttagtttcaacagtcaaactccatacattccctttaatctgggcgctctgtctgccatgtccaatcaacaactagaggacctgatcaaccagggcagagagaaggtcgtcgaggccacaaactccgtgaccgcagtcaggatccagccccttgaagacattatctccgccgtgtggaaagaaaacatgaacctgtcagaggctcaagtgcaggctctggctttatcccggcaggcctcccaggaactcgacgtgaagcggagggaggctatctacaatgacgtgctaacaaaacagcagatgctcatctcatgtgtgcagaggatcctcatgaacagacgcttgcagcaacaatacaatcagcagcagcagcaacaaatgacctaccagcaggcaactcttggccacttaatgatgcccaaaccccctaacctgatcatgaatccctcaaattatcagcagatcgacatgagagggatgtaccagcccgtggctggagggatgcaacctccacccctacaaagggccccacctcccatgcgctccaagaaccccggaccatcacaggggaaatctatgta

SEQ ID NO: 27277 - DNA, 369 bp, synthetic construct
  misc_feature 1..369: note = Description of Artificial Sequence: Synthetic coding sequence
  source 1..369: mol_type = other DNA
attaactataatagggacaaaatctccggcagcgggtccaactccgacatgatggaaaactcaaaggaggaggggacaagctcctccgaaaaaagcaaatcctccggaagctctaggtcaaagcgtaagccatctattgttactaaatatgtggagagcgacgatgagaagccgctcgacgatgaaacagtgaacgaagatgcatctaacgagaacagtgaaaatgacataacaatgcaaagcctgcccaaaggcactgtgatcgttcagcccgagcctgtgctgaatgaggacaaggatgactttaagggccctgagttccggtctcggagcaaaatgaaaacagagaatctcaaaaaaagaggctag

SEQ ID NO: 27278 - DNA, 4038 bp, synthetic construct
  misc_feature 1..4038: note = Description of Artificial Sequence: Synthetic coding sequence
  source 1..4038: mol_type = other DNA
atgtccgagtcgaagttaaatactctcgtccaaaagctacatgacttcctggcacattcctcagaggaatccgaggagacgtcatctccaccccgtctggcaatgaatcagaatacagacaagattagtggttctggttctaactccgatatgatggaaaattctaaggaagaagggaccagcagttcagaaaagtcaaaaagttctgggtcttcccgtagtaagcggaagccctccatcgtgacgaagtacgtagaaagtgatgacgagaagccgctggatgacgaaactgttaacgaggatgccagtaacgagaacagcgagaacgacattacgatgcagagtctgccaaaagacggactgcacgggatagtctcatgtacagcctgtggtcagcaggtcaatcacttccagaaagacagcatctatcggcacccctccctacaggtgctaatctgcaagaattgttttaagtattacatgagtgacgacatttcaagagatagtgatggaatggatgagcaatgccgttggtgcgctgaggggggaaatttgatatgttgtgatttttgccataacgctttctgcaagaagtgtattctcaggaatctggggagaaaggaactatcaaccattatggatgaaaacaatcaatggtactgttatatttgccacccggagcccctcttggatctcgtaacggcctgtaattccgtgtttgagaacctcgagcagctcttacagcaaaataagaaaaagatcaaagtagacagcgagaaaagcaacaaagtatatgaacataccagccgtttctccccgaagaagacatcatccaactgcaacggtgaggagaaaaaattagacgattcctgcagtggctccgtgacttattcttacagcgcacttatcgtgcccaaagaaatgataaaaaaggcgaagaaattaattgaaactacagcgaatatgaacagctcatacgtgaaatttttgaagcaggccaccgataactcagagatctcttcggctactaaactgagacagttgaaggcgtttaaatccgtgctggccgatattaagaaggctcacttggccctggaagaggacctgaactcagaattccgagctatggatgccgtgaataaagaaaagaacacgaaagaacacaaggtgatcgatgccaagtttgagaccaaggcaaggaagggcgagaagccgtgcgcccttgaaaaaaaagacatcagcaaatcggaggcaaaactcagcaggaagcaggtggattctgagcatatgcaccagaatgtaccaaccgaagagcagcggactaataagtcaacgggtggcgaacacaagaagtcggataggaaagaggaaccgcagtatgagccggcaaataccagcgaggatctggacatggacatcgtgtcggttcccagctctgtgcccgaggacatattcgagaacctggaaaccgccatggaggtccagtcttccgtggaccaccagggtgatggcagctctgggactgaacaggaggttgagagctcttcggtgaaactgaatatttccagcaaagacaaccggggaggtgcggattgccaggaagtgccccaagacaaagacgggtataagagttgtggactgaacccgaagctcgagaagtgtggcctcgggcaggagaatagcgacaatgaacacttggtggagaacgaagtaagtcttttgcttgaggaaagtgatctccgtcgttcaccacgcgtgaaaacaacccccctgcggaggcccaccgagacgaaccccgttaccagcaactccgatgaggagtgtaatgaaaccgtgaaagagaagcaaaagctttccgtgcctgtgagaaagaaggataagcgcaacagcagtgactcagctattgacaacccgaaaccgaacaaactccccaaatcaaagcagtcagaaacagtggaccagaactctgactccgatgaaatgctcgctattcttaaggaggtgagtagaatgtcccacagcagctcttcggataccgatatcaacgaaatacatacaaatcacaaaactctgtatgacttaaaaactcaggcaggcaaagatgacaagggaaagcgtaaacgtaagtctagtactagcggcagcgacttcgataccaaaaaaggtaagtcagcaaagtcctctatcatttctaaaaagaagcgccagacccagtctgagtcaagcaattatgattccgagttagagaaagagattaaatctatgtctaagataggcgcagcacgcacaacgaaaaagagaatccccaacacaaaggacttcgatagcagtgaggatgagaaacacagtaagaaaggaatggacaaccaggggcacaagaatctaaaaacttcgcaggaaggatcctctgatgatgcggagaggaaacaagagagagagacattttcaagcgctgaggggacagtggataaagacactacaatcatggaactgcgcgacaggctccctaagaaacagcaggcgtctgcgagcaccgacggcgttgacaagcttagcggaaaggaacagtctttcaccagcttagaagttcgcaaggttgccgagaccaaagaaaaatcaaaacatctgaagacaaaaacgtgtaaaaaggtgcaggatggactctcagacattgcggagaaatttctgaagaaggaccaatcagatgagacatccgaagacgacaagaaacaatctaagaaaggcactgaagaaaagaaaaagcccagtgatttcaagaaaaaggtaattaagatggaacaacagtatgaaagttcttccgacggaaccgagaagctgccagagagggaagagatctgtcattttccaaaaggtattaaacagataaaaaacggcaccacagacggagagaagaagtcaaagaagatcagagataagacctccaagaagaaggacgagttgtcggactatgccgagaagtccactgggaaaggagactcttgtgacagctctgaggataagaagagtaaaaacggtgcctatgggcgtgagaagaaacggtgtaagttactaggcaaatcttctcggaaaaggcaggactgctcaagtagcgacactgagaaatattccatgaaggaagacgggtgtaattcatctgacaagcgactcaagcgcattgagctgcgagagaggaggaatttgtctagcaagaggaacacaaaggaaatacaatccggatccagctcatccgacgccgaggagtccagcgaggataataagaagaagaagcaacgcacatcgagtaaaaagaaagccgtgattgtgaaagagaaaaaacgtaattctctgaggactagcactaaacgcaagcaagcagacatcacaagcagttctagctcagatattgaggatgacgaccagaatagcataggtgagggctcaagcgatgagcagaagataaagccagttacagagaatcttgtgctgagttcccacacaggtttctgccaaagtagcggcgacgaggcactcagcaagtctgtgccagttactgtcgatgacgatgacgatgataacgaccccgaaaacagaattgcaaagaagatgcttctggaggaaataaaggcaaacctttcatccgacgaagacggctcatctgatgacgagcccgaagaagggaagaagcgtactggcaagcagaatgaggagaatccaggagacgaagaggcgaagaatcaggtgaatagtgagtctgactctgacagcgaggaaagtaaaaaaccgagatatcgccaccgactgctgcggcataaacttaccgttagtgacggggagtcgggcgaggagaaaaagacgaaacccaaagagcataaagaggttaaggggagaaacagacggaaagtcagttcagaagattcggaagactcagacttccaggagtctggagtgtctgaggaagtgagtgagagcgaggacgagcagcgcccaagaactaggtccgctaaaaaagcagaacttgaggaaaatcagaggtcgtag

SEQ ID NO: 27279 - DNA, 483 bp, synthetic construct
  misc_feature 1..483: note = Description of Artificial Sequence: Synthetic coding sequence
  source 1..483: mol_type = other DNA
tgacccgactttgtagtgtgcgatgaagggcacattttaaaaaatgaggccagtgcagttagcaaggcaatgaactccatccggtcccgcaggcgcattattctgaccggcacacccctgcaaaacaacctgatcgagtaccattgcatggtcaattttatcaaagaaaacttgctgggttccataaaagagtttcgcaaccgatttattaatcctattcagaatggacagtgcgccgacagcactatggtcgatgtgcgtgtaatgaagaaacgggctcacatcctatacgaaatgttggctggttgcgttcagcggaaggactacactgcactgacaaagttcctgccaccgaaacatgagtacgtcttggcagtacggatgacctctatacaatgtaaactttatcagtattatcttgaccatctcactgtgctccacctcaataagatggggatgctgaaatcaattaagtacttttag

SEQ ID NO: 27280 - DNA, 2514 bp, synthetic construct
  misc_feature 1..2514: note = Description of Artificial Sequence: Synthetic coding sequence
  source 1..2514: mol_type = other DNA
atgaatcacttggagggctccgcagaggtggaagtgacagacgaggcagcaggcggtgaggtgaacgaatccgttgaggccgatctggagcaccctgaagtcgaagaggaacagcagcagcctcctcagcagcagcattatgtgggacgtcaccaacgagggcgtgctctcgaggacctcagagcgcagcttgggcaggaagaggaagaaagaggagaatgtctggctcgttcggctagcactgaaagtggctttcacaatcacaccgacaccgccgagggggacgtgattgccgctgccagagatggttacgacgctgagcgggcacaggaccctgaggacgagagcgcttatgcggtgcagtataggccagaagccgaggaatatactgagcaggccgaggccgagcacgccgaggccactcacagaagggcgctaccaaaccacctgcacttccacagtctggagcacgaagaggcaatgaatgccgcttattctggttacgtgtacactcaccggttgtttcatcggggagaggacgagccctactctgaaccttatgctgactatggaggcctccaggagcacgtctacgaggaaatcggcgacgcccctgagctggacgcacgggacggactgagactgtacgaacaggaacgggacgaagccgctgcctatcgccaggaggctctgggcgctcgcctccatcattacgatgaaagatctgacggagaatctgactcacccgagaaggaagctgagtttgccccataccctaggatggactcttacgagcaggaggaagacatagaccagattgttgccgaagtcaagcagagtatgagttcccagagcctcgacaaggcagcggaggacatgccagaagctgaacaagatttggagcggcctccaacccccgcagggggacggccagacagtcccggactgcaggccccagccggacagcaacgcgctgtgggtccagcgggtggcggtgaggccggtcagagatacagtaaagagaagagagatgctatcagtcttgccataaaagatatcaaggaagcaatcgaggaggttaagactagaacaattaggtctccatatacccccgacgagccaaaggagcccatttgggttatgaggcaagacatttcgcctacacgtgactgcgacgaccagcggccaatggatggcgacagcccttcgccaggaagttcttcaccgctgggagctgaaagctcctccacttccctacatccaagtgaccccgtggaagcttccacgaataaagagtctcgcaaaagccttgcctctttccccacctatgtggaggtgcccggtccatgtgatccagaggatctgatcgacgggattatctttgcagccaactatctgggcagcacccaacttttatccgataagacaccttccaaaaacgttaggatgatgcaggctcaagaagctgtcagtcggataaagatggcacaaaaactggccaagtcccggaaaaaggcacctgagggcgagagccaaccaatgaccgaagtggatctgttcatctccacccagagaatcaaggtgctgaatgcagacactcaggagacgatgatggaccatcccctgaggactatctcctacattgccgatatcggcaatattgtggtgttgatggcacgaagacgaatgccgagatccaattcccaggaaaatgtggaggccagtcacccaagccaggatggcaagcgccagtataaaatgatctgtcacgtgttcgagtcagaggatgctcagcttattgctcagagtataggccaggccttttctgttgcctaccaggagtttttgagggcaaatggcataaacccggaagacctttcccagaaggaatattcagatctcctgaatactcaagacatgtacaacgatgacttgattcacttctctaagtccgagaattgcaaagacgtgttcatcgaaaaacagaaaggagagattcttggggtggtcatcgtggaaagtgggtggggcagtattctgcctaccgtgattatcgctaacatgatgcacggaggacctgcagagaagtctggaaagctgaatatcggtgatcaaatcatgtccatcaatggtacttccctcgtcggccttcccctttctacctgccaaagcatcatcaaagggctgaaaaatcagtcccgggtcaaactgaatattgtgaggtgtccccctgtcactactgtgttgatcagaaggccagatctcaggtatcagctgggattctctgtgcagaacggtattatctgctccttgatgcggggaggcatcgctgagcgcggtggcgtccgagtgggccatagaatcatcgaaattaatggtcagtccgtagtcgctactcctcatgaaaaaatcgttcatatcctgagcaacgccgtgggagagattcacatgaaaaccatgccggctgccatgtacaggctccttaccgctcaagaacagcctgtgtacatctag

SEQ ID NO: 27281 - DNA, 2469 bp, synthetic construct
  misc_feature 1..2469: note = Description of Artificial Sequence: Synthetic coding sequence
  source 1..2469: mol_type = other DNA
atggcagccgctgtggttgttgccgaaggcgacagcgactcacgaccaggacaagagttgctggtggcgtggaacaccgtttccactggactggttcccccagcagctctggggctggtgagcagccggacttctggcgctgtgccccctaaggaggaggaactgagagcggcagtggaagtgctccgcggtcacggcttgcatagtgtcctcgaggaatggtttgtcgaagtcttacagaatgacctgcaagcaaatattagccccgaattttggaatgcaatatcacagtgtgaaaactcagccgatgaaccacagtgtctattgctgcttctggacgccttcggacttctggaatctcgcctggacccctatctccgcagtctcgagctccttgaaaagtggacccggcttggcttgctcatgggaaccggagcccagggcctgcgcgaggaagtgcacacgatgctccgcggagtgttatttttctccactcctcgtacgtttcaggagatgattcaaaggctatacggttgcttcctgcgagtgtacatgcagtctaaacgcaagggtgagggagggactgaccctgagctcgagggagaactggatagccggtatgcaaggcgtcgctattatcggctgcttcaatcccccttatgtgcaggatgtagcagcgacaagcaacagtgctggtgccgacaggcgctggagcagttccaccagctgagtcaagtgctgcaccgcttatccttactcgaacgggtgtctgccgaagccgtgaccacaactctgcatcaggtgactagagagaggatggaagacaggtgccgaggcgagtacgagcgcagcttcctaagggagtttcacaagtggatagagcgcgttgtcggctggctcggcaaggtcttcctgcaagacgggccagctaggccagcaagccccgaagccggtaacacgcttcgccgatggagatgtcacgttcaacgattcttttatcgcatttacgccagcctgagaattgaggagttgttcagcatcgttagagacttccctgactcccgaccagcgatcgaagatctgaaatactgtctcgaacgtacggatcagcgccagcaattacttgtaagcctcaaggccgcattagaaacgaggctgctgcaccctggcgtgaacacatgcgacataataacattatatatttcagctatcaaggctttgagggtcttggacccctccatggtaatcctggaagtggcgtgtgagcccattagacggtacttgcggactcgagaggacaccgttcggcaaatcgtcgctggacttaccggcgatagtgatggcacgggggatctggcagtggaactctccaagacagacccagcaagcttggagacaggccaggacagcgaagacgactccggcgagcccgaggattgggtgccggaccctgttgatgccgaccctgggaagtcaagttccaaacgcagatcctccgatatcatttccctgctagtcagcatctacggttcgaaggacttattcatcaatgaatatcgtagtctcttggccgacaggttgctgcatcagtttagtttttcccccgaacgtgaaattcggaacgtcgagcttctgaagctcaggttcggagaagctccaatgcacttctgtgaagtgatgcttaaagacatggccgacagcaggcgcatcaacgccaacattcgagaagaggacgagaagcgccctgccgaggagcagcctccctttggtgtgtacgcggtgattctgtctagcgagttttggcccccttttaaggatgagaagttagaggttcctgaggatattagagccgcactcgaagcatactgcaaaaaatacgagcagttaaaagctatgcgaacattatcttggaaacacacactcggcctggtcaccatggacgtcgagttagcagaccgtactctctcggttgctgtcaccccagtccaggcggtgatactgctatattttcaggatcaggcgagctggaccctggaggagctgtccaaagctgtgaaaatgcccgttgctctcctgagacgtagaatgagcgtttggttgcaacagggagtcctgagggaggagccgccagggaccttcagcgttatcgaggaggaacggccacaggacagagacaatatggttcttatcgattccgacgatgagagtgacagtggcatggcctcacaggctgaccaaaaggaagaggagctcctgctcttttggacgtatattcaagctatgttgacaaatctggaaagcctgtcgcttgacagaatctacaatatgttgcgcatgttcgtggtgacaggtccagccctcgccgagattgatctccaggagcttcagggctatctgcagaaaaaggtccgcgaccagcagctggtctactctgctggggtttataggttgccgaagaattgttcatag

SEQ ID NO: 27282 - DNA, 4863 bp, synthetic construct
  misc_feature 1..4863: note = Description of Artificial Sequence: Synthetic coding sequence
  source 1..4863: mol_type = other DNA
atgggtgctattggtctgctgtggctgctgcctttattattgtccacggcagccgtcggatctggaatgggcacaggacagcgtgccggtagtcccgcagctggcccacctctgcagccacgtgaacctctgagctacagtaggttgcagcgaaaaagtctggccgtcgactttgtcgtaccgagcctgttccgggtttacgccagagacctgttgctgcccccatcttcctctgagctgaaggctggacggcctgaggctcgagggtctcttgccctagactgcgccccactgctgaggttgctggggcctgctcccggtgtgtcctggactgccggatcccctgcgcctgctgaggcacgcacattgagcagagtgctcaaggggggttctgtgagaaagcttaggcgggcaaaacagctggtactggagctgggtgaggaagccattcttgaggggtgtgtcggcccacccggtgaagctgcagtgggactgcttcagtttaacctgtctgagctttttagttggtggatccgtcagggcgaggggcgtcttagaatcagactgatgcccgaaaaaaaagccagcgaagtggggagggagggcagactctcagccgcaattagggcgtcacagccacgactgctgttccagatttttggcaccggacattctagtttggagagcccaactaatatgccgagcccctctccagactatttcacttggaatctgacttggataatgaaggacagcttcccattcttgtctcaccgcagcaggtatggtctcgaatgtagctttgatttcccatgtgaactcgagtattctcctcctcttcacgatctgaggaaccaatcctggagttggaggcgcatcccttcagaagaggcatcccagatggatctgctcgacggcccaggagcagaaagaagcaaggagatgccgagaggatccttcctgctgctaaacacttctgctgatagtaagcatactattctttctccttggatgcgctcttcaagcgagcattgcacactggccgtgtctgtacatcggcatctccagccaagcggccgatacatagcacagcttctaccacataatgaagcagcccgtgaaatcttgctaatgcccacacctgggaaacacggttggactgtgctgcaggggagaataggcagaccagacaatccttttcgcgtggcccttgagtatatcagcagcggcaaccggagcctttcggcggttgatttcttcgccctgaaaaactgttctgagggaacaagtcccggatccaagatggctctacagtcctcattcacatgttggaacggaaccgtgctccagctcggccaagcgtgtgacttccatcaggactgcgcccagggggaggacgaatctcagatgtgtcgaaaacttccagtgggcttttattgcaactttgaggacggtttctgcggctggacccaggggacacttagcccacataccccccagtggcaggttcgtaccttgaaggacgccaggttccaggatcaccaggaccatgccctcctgctatcgaccaccgatgtaccggctagcgagtctgctacggtgacaagtgcaacttttcccgcaccaatcaagagcagcccctgtgaacttcgcatgtcctggctgatccggggtgtgttaagggggaacgtgtctttggttctagtggaaaacaagaccggcaaagagcaaggaagaatggtctggcacgtcgctgcctatgagggcctttctctatggcaatggatggtgttgcccctgcttgatgtgtctgaccgcttctggctccagatggtcgcctggtgggggcagggatccagggccatagtggcattcgacaatataagcatctctttggattgctaccttacgattagtggagaggacaaaattcttcaaaacacagctcccaagagtaggaacttgtttgaaagaaaccctaacaaggagcttaagcccggtgagaactctcccagacagacaccgatattcgaccccaccgtccattggcttttcactacctgtggcgcatctggtccacatggcccaactcaggcacagtgtaacaatgcttatcagaatagtaacctgtctgtagaagtggggtcagaaggtcccctgaagggcatccagatctggaaggtgcccgcaaccgacacgtactcaatcagcggctatggagctgctgggggaaaaggaggaaaaaacaccatgatgcggtcccatggagtgagcgtgctaggtatcttcaatctggaaaaggatgatatgctctacatcttggtgggccagcagggtgaagatgcgtgtccatcaacgaaccagttgatccagaaagtgtgtatcggagaaaacaacgtcatcgaagaggagatccgggtgaaccgctctgttcacgaatgggctggcggaggtggagggggagggggtgccacctatgtatttaaaatgaaagacggagttccggtcccccttattatagcggcagggggtggcggtcgcgcttacggcgctaaaaccgatactttccaccctgagaggcttgagaacaacagctccgttctggggttgaatggtaattccggcgcagccggaggtgggggaggctggaatgacaacacctcactgctctgggctggtaagtcactgcaagagggcgctactggcggtcattcatgtccccaggctatgaaaaagtgggggtgggaaactagagggggttttggcggaggagggggaggctgcagtagcgggggtggcggagggggttatatcggtgggaacgcagcttccaacaatgatcctgagatggacggggaagacggggtgtcgttcatttccccattgggaattctgtatacccctgcgctcaaagtcatggaggggcacggcgaggtcaacatcaagcactatcttaattgtagccattgcgaggtcgacgagtgtcatatggaccctgaatctcataaggtaatttgtttctgtgatcatggcacagtgttagccgaagacggtgtgtcttgcatcgtgtccccaacaccagagcctcacttacctcttagtttaattctctctgtggtgacatcagctctggtggctgccctggtgcttgcattttcagggattatgatcgtctaccgcagaaaacaccaggagctgcaggctatgcagatggagcttcagtcccccgaatataaattgtctaaactgagaaccagcactataatgactgattacaatcctaactattgtttcgcaggtaagaccagtagcatttctgatcttaaagaggtgccaagaaaaaacattacactgatccgcggattgggccatggtgccttcggtgaggtgtatgagggccaagtgtctggtatgcccaacgatcccagcccactgcaggtagctgtaaagacattacctgaggtgtgcagcgaacaggacgaactggacttccttatggaggctctaatcatttctaaattcaaccatcagaatatcgtgcgttgtataggtgtgagtctgcagagccttcctcggttcattctccttgagctcatggcaggcggtgaccttaagtccttccttcgggaaactcgacctaggcccagccaaccttcatccctcgctatgctcgatctgctccacgtggccagggacatcgcctgcggctgtcagtaccttgaggaaaatcacttcatccatagggatatcgcagccagaaattgcttactgacgtgccccggtcctggaagagttgccaaaatcggcgattttggtatggcgagagatatttacagagcatcctattataggaaggggggatgcgcaatgttacccgtcaagtggatgcccccagaggcattcatggagggtatatttacgagcaagacggacacttggagtttcggcgttcttctctgggagatcttctcattggggtatatgccgtatccttccaaatccaatcaggaggttcttgagttcgtaacctccgggggtcgtatggaccccccaaagaattgccctggccctgtgtatagaatcatgacccagtgttggcaacatcagcccgaagaccgtccaaatttcgccatcatcttggagcgtatagagtactgcacccaggatcctgacgtgattaatacggccttacccattgagtatggtcctttggtcgaagaggaggagaaggtgccagtgcgacccaaggatcctgaaggcgtccccccattactggtgtctcagcaggcaaagcgagaggaagagaggtccccagccgctccaccccctttgccaacaacttcttctggaaaagccgctaaaaagccaacagcagccgaaattagcgtgagggtaccgagggggccagcagtcgaaggcggtcatgtaaatatggccttttctcagagcaatccccctagcgaactgcacaaggtgcacggctccagaaataagcccacaagcctttggaacccgacttatgggtcatggttcaccgagaaaccaactaaaaaaaataacccaattgccaagaaggaaccccacgataggggaaaccttgggcttgagggatcctgtacagtccctccaaacgttgcgactggcagactgcccggtgcaagccttctactggagccctcttcattaaccgcgaatatgaaggaggtgcccctgttccgtctcagacacttcccttgcggaaatgtgaattacggctatcagcaacagggccttccactggaagctgcaaccgcccctggagccggtcattacgaggacacaatcctgaaatccaagaatagcatgaaccaacccggtccatag

SEQ ID NO: 27283 - DNA, 1353 bp, synthetic construct
  misc_feature 1..1353: note = Description of Artificial Sequence: Synthetic coding sequence
  source 1..1353: mol_type = other DNA
atgggtgccatcggtttgctctggctgcttcccctgttactgtccacagccgctgtggggtcagggatgggcaccgggcagcgtgctggcagccccgcagccggaccccctttacagcccagggagcctttatcttactcccggctccaacggaagtcattggcggtcgatttcgtcgtcccaagcctattccgggtctacgccagagatttactgcttccaccttctagcagtgagctcaaggcaggcaggcccgaagccagggggagtctggcactcgattgcgcacctctccttcgcctgctgggccctgccccaggagtgagttggactgctggcagcccagctcccgcagaagctaggactttgtcccgcgtgctcaaaggcggaagtgtgaggaaactcagacgcgctaaacaactagttctggagttgggcgaagaggccatcctggagggctgtgtcggaccacctggggaagcagctgtggggttgcttcagtttaatctgtctgaattgttttcctggtggatcagacagggtgagggcagattgcgcattcgcctcatgcccgaaaagaaggccagtgaagtgggccgagaaggcaggctttccgccgcaatcagggcatcacagcctaggcttctgttccaaatctttggaaccggacatagcagtctagaatcaccaaccaatatgccttcaccttctcctgattactttacctggaatctgacctggatcatgaaggacagcttcccgtttttaagtcacaggagcaggtatggtaaggaacggtcccctgcagcccctcctcctttgcctactacttcctcagggaaggcggctaagaaaccaacagccgctgagatttcggttagggtgcctcgaggtccagccgttgaaggtggtcatgtgaacatggcgttctcccagtcaaaccccccttccgaactgcacaaggtccacgggtccaggaacaagccaacatccttatggaatcctacctatggaagttggttcacagaaaaacccaccaaaaaaaataatcctatcgccaaaaaggagccgcatgaccggggaaatttaggtctggagggtagttgtactgtgccacccaacgttgccacaggcagattgcccggtgctagcctactgcttgaaccttcctcactcacggccaatatgaaggaagtccccctcttcagattgaggcactttccttgtggcaacgttaactatgggtaccagcaacaaggcctgcccctggaggccgctaccgccccaggcgcaggccattatgaggatacgattctgaagtctaaaaactcaatgaaccagcctgggccttag

SEQ ID NO: 27284 - DNA, 1935 bp, synthetic construct
  misc_feature 1..1935: note = Description of Artificial Sequence: Synthetic coding sequence
  source 1..1935: mol_type = other DNA
atggaggtccagcttggactagggcgtgtgtatcccaggcctccatcgaaaacgtatcggggagccttccagaacttgttccagtcagtgcgagaggtcatacagaatcccggacctcgccatccggaggctgctagcgcagctcctcctggcgcttcactattgcttctgcagcagcaacagcagcagcagcaacagcagcagcagcagcagcagcaacagcagcagcagcagcagcaagaaaccagccctcgacaacagcaacagcaacagggagaggacggatccccacaggcccacaggcggggacccaccggctacttagtcctcgatgaagagcagcagccatcccaaccacagtcggccctggagtgtcaccctgagcgaggctgcgtgccagagccgggagctgcagtggcggcatctaaaggcttgccacagcaactacccgcacctccagatgaggacgactccgccgctccgtccacgctgtctcttttaggaccaacattcccgggactgtccagttgcagcgcagatctgaaagacattctgagcgaagcgagtacaatgcaattgctccagcagcagcagcaagaggcagtatctgaaggtagctcctccggcagagcccgtgaagcctcgggggcacccacttcaagcaaggacaactacttgggcggaacttccaccatctctgacaacgctaaggagctgtgtaaggcagtgtcagtctccatggggctgggcgtcgaagcgctggaacacctaagcccgggagaacaattgaggggtgactgtatgtatgctcccttgttgggcgtacccccagcggtccgacctactccttgtgcacccctggccgagtgtaaaggttctctgttggacgattccgcaggcaagtctacagaagataccgccgaatacagcccctttaaaggtggttatacaaaaggcctcgaaggagaaagcctgggctgtagtgggtcagcagctgctggctcaagcggcacattggaactcccctcaaccctgagtctgtacaaaagtggtgcactcgatgaggcggcagcatatcaaagccgcgactattataattttcccttggctctcgccggtccgccaccccctccacccccaccccaccctcatgctaggatcaagctcgagaatcccctcgactacggaagtgcatgggcagccgctgcagcccaatgcaggtacggcgacttggcctcgctgcacggagccggtgccgctgggccaggctctggctccccgtcggcggctgcgtcttcttcctggcacacgttgttcaccgctgaagaaggacaactgtacggtccttgtggtggaggcggtggcggtggcggtggtggtggagggggagggggtggtgggggaggcggaggcggaggggaagcaggtgcagtggcaccatacggatatactcgacctcctcagggtctggccggtcaggagtccgactttaccgcccctgatgtctggtatccaggaggcatggtgagcagggtcccctacccttcacccacatgtgtcaaatctgaaatggggccatggatggattcttattccggaccatacggggatatgcgactggagacggccagagatcacgtgctaccgatcgactactactttccaccccaaaagacctgtttaatctgtggcgatgaggctagcggttgtcactacggggcattgacttgcggttcttgtaaagtgtttttcaaacgggcagctgagggcaaacagaagtatctgtgcgcgtcccgaaacgactgtactatagataaattcagacgaaagaactgtccatcctgtcggctgaggaaatgctacgaagccggaatgacgctgggggagaagtttcgcgtcggtaactgtaagcacctgaaaatgaccagaccatag

SEQ ID NO: 27285 - DNA, 1803 bp, synthetic construct
  misc_feature 1..1803: note = Description of Artificial Sequence: Synthetic coding sequence
  source 1..1803: mol_type = other DNA
atggaggtgcaattgggccttggacgcgtgtacccaagaccgcctagcaagacctaccgaggggcatttcaaaatctctttcaatccgttcgggaggttattcaaaatccgggacccaggcatccagaggctgcctcggcggcaccaccaggagccagcctgctcttactacagcaacaacagcagcagcagcagcagcagcaacagcagcagcagcagcagcagcagcaacagcagcaagaaaccagcccccgacagcagcagcaacagcagggcgaggatgggtcgccccaggcacatcgccgtggtcctaccggctatttggtgttggatgaagaacagcaaccatctcagccccaatcagcgctggaatgccatcctgagcgaggctgcgtgccagaacctggcgctgccgttgcggcatcaaaaggtctgcctcagcaactgccagcaccaccagacgaggacgatagtgctgcgccatccacgctgagcctactcgggccaaccttcccgggactatcgtcctgctccgccgatctgaaagacatcctaagcgaagcctccactatgcaactgctgcagcaacaacagcaagaggccgtttctgaaggcagcagttcaggacgagccagagaggccagtggcgcaccgacatcgtccaaggataactacttggggggtacttcaacaatctctgacaacgctaaagaactgtgcaaagctgtctctgtctctatgggactcggcgtcgaagcactggagcacctgagtcctggcgaacagctgcgtggcgattgcatgtacgcccctttgctcggtgttcctcctgccgttcgtccaactccctgtgcacccctcgctgagtgcaagggatctctgctggatgactcggctggcaagagcaccgaggatactgccgaatactcgcccttcaagggcggttacactaagggtttggaaggcgagtctctcggatgctccggttctgctgcagcaggaagttcaggaactctggagttgccttcaactctcagcctgtataagagtggagcattggacgaggccgctgcctaccagagccgcgattactacaacttcccactggccttggcaggacctcctcccccaccgccacccccacacccacacgccagaattaagctggagaaccctctggattatgggtccgcctgggcagccgctgcagcacagtgcaggtacggcgatctggccagtctgcacggggctggcgcagcaggcccaggatccggtagcccgagcgctgccgcttcgagcagctggcacactctgtttaccgcagaagaaggccagctctatggaccctgcggcggaggagggggaggcggtgggggaggcggtggtggtgggggaggcggagggggaggtggcggaggtgaagcaggcgcagtggcaccatatggctacaccagacctccccaaggcttagctggccaggaaagcgacttcacagcacctgatgtgtggtatccgggtggcatggttagcagggttccctacccttcaccaacctgtgtgaagtcagaaatgggtccatggatggattcctactcaggtccctatggagatatgagactggaaaccgctcgcgatcacgtgctaccaatagactattattttcccccacagaagacttgtcttatttgcggagacgaagcttccggttgtcattacggagcattgacctgcggcagctgtaaggtgttttttaagagggcagccgaaggcttcttccgcatgaataaactgaaggagtcctag

SEQ ID NO: 27286 - DNA, 444 bp, synthetic construct
  misc_feature 1..444: note = Description of Artificial Sequence: Synthetic coding sequence
  source 1..444: mol_type = other DNA
atggtgatgggactgggagtgctgctgctcgtcttcgtcctcggactaggcctcacacctcctaccctcgcccaagacaatagtaggtacactcatttcctcacacagcattacgacgccaagccacagggccgtgatgatcgctactgtgagtccataatgaggcggagagggctgactagtccttgtaaagatatcaatacctttattcatgggaacaaacgatccataaaagctatttgcgaaaataagaatggcaatcctcatagggagaacctgcgcattagcaagagttctttccaagtcacaacttgtaaactccacgggggatccccttggccgccatgccaatatcgtgcaaccgctggctttaggaatgttgttgtggcttgtgaaaatggactcccagtccacctcgaccaaagcatcttccggagaccatag

SEQ ID NO: 27287 - DNA, 444 bp, synthetic construct
  misc_feature 1..444: note = Description of Artificial Sequence: Synthetic coding sequence
  source 1..444: mol_type = other DNA
atggtaatgggattgggcgtgctgttgctcgtgtttgtccttgggctggggctgactccacctactttggctcaggacaatagtaggtatactcacttcttgacccagcactacgacgctaagccgcagggaagagatgaccggtattgtgaatcgatcatgcgcaggaggggacttacaagcccttgtaaggacattaacacttttatccatggaaacaagagaagcatcaaggccatctgcgagaacaagaacgggaacccacatcgagagaatttgagaatctccaaaagttcattccaagttaccacatgcaaattgcacggcggatctccctggcccccatgtcagtacagggctacagccggattcaggaacgtggtagttgcctgtgagaacggacttcctgtgcatctggatcaatccatatttaggcgaccctag

SEQ ID NO: 27288 - DNA, 1494 bp, synthetic construct
  misc_feature 1..1494: note = Description of Artificial Sequence: Synthetic coding sequence
  source 1..1494: mol_type = other DNA
atgacagtgttcttatcctttgcatttctggctgctatcttgacacatataggctgctcgaatcagaggcggtcgccagaaaacagcgggaggcgctacaatagaatccaacacggccagtgtgcctacacgtttatcctgccagagcatgacggcaactgtcgggagtccacgacagatcagtacaacacaaatgcgcttcagagggatgccccacacgttgagcccgattttagttcgcaaaagttgcagcacctggaacacgtgatggaaaattatacacagtggctccaaaagctcgaaaactacatcgttgaaaacatgaagtccgagatggctcagattcagcagaatgctgtgcagaaccacactgctaccatgcttgaaattggcacatcacttctgtcacagaccgctgagcagaccagaaaactcacagatgtggagacccaggtgctgaaccagacctcgcgattagaaattcagctcctggagaactcattgtccacttataagttggagaaacagcttctgcagcaaaccaacgagattctgaagattcatgagaagaattccttactggagcacaagatccttgaaatggagggaaaacataaggaggaactcgatacacttaaggaagaaaaggaaaacctgcagggactggtgaccaggcagacttatatcatccaagaactagaaaaacagttaaatcgggcaactaccaacaacagtgtgctgcagaaacagcagcttgagttgatggacaccgtgcataatttagtgaatttgtgcacaaaggaagtcctcctcaagggaggcaaacgagaagaagagaagccctttagggactgcgccgacgtctaccaggcgggattcaacaagtctggcatctacactatttatatcaataacatgcccgaacctaaaaaggtcttctgcaatatggatgtgaacggcggagggtggacagtgattcagcatagagaggacggctccctggatttccaacgtggctggaaggaatacaagatgggctttggcaaccccagcggcgagtactggctggggaacgagttcattttcgcaattacctcccagaggcagtatatgctgcggatcgagctgatggactgggaaggtaatagagcctacagccaatacgataggttccatatcgggaatgaaaagcaaaattacagattatacctcaaggggcacaccggcaccgctggcaagcaaagctctctgattctccacggagctgacttttccacgaaagacgccgataatgacaactgtatgtgtaaatgcgccttgatgttaacagggggatggtggttcgacgcgtgcggccctagcaacctgaatggaatgttttatacagctggccagaaccacggcaaattgaatggcatcaaatggcattacttcaagggtccaagttatagtctgcgatccactactatgatgattcgccctctggatttttag

SEQ ID NO: 27289 - DNA, 459 bp, synthetic construct
  misc_feature 1..459: note = Description of Artificial Sequence: Synthetic coding sequence
  source 1..459: mol_type = other DNA
accgtgtccaacctgctggagcataagatactcgagatggagggtaagcacaaagaggagctggataccctcaaagaggaaaaggagaacctgcaagggctggtgacacggcagacatatatcatacaagagctagaaaagcagctgaatcgggcaactactaataattctgtcttgcagaagcagcaactggagttgatggacacagtgcacaaccttgtcaacttgtgtacaaaagagggtgtactgctgaagggtggaaaacgagaggaggaaaaacctttccgagattgcgctgatgtttatcaagctggatttaacaagagcggaatatataccatctatattaacaacatgcctgaaccaaagaaagtcttttgcaatatggatgttaacggaggcggttggaccgtcattcagcacagggaggacggctctctcgacttccagaggggctag

SEQ ID NO: 27290 - DNA, 1497 bp, synthetic construct
  misc_feature 1..1497: note = Description of Artificial Sequence: Synthetic coding sequence
  source 1..1497: mol_type = other DNA
atgacggttttcctttcgttcgccttcctagctgctatacttactcatatcggctgctcaaaccaaaggcgtagtccagagaattccggacggaggtacaatcgcatccagcatggacagtgcgcctatacttttatccttcctgaacatgatggaaactgcagggagagtaccacagaccagtataatacaaatgcccttcagagggatgcaccacatgtcgagcctgacttcagttctcagaagctgcagcatttggagcacgtaatggagaactacacccagtggctgcagaaattggagaattacatcgtggaaaacatgaaaagcgagatggcacaaattcagcaaaatgccgtgcagaatcatacggccacaatgctggaaataggcacctccctgctcagtcaaaccgccgagcagacccgcaagctgaccgacgtagaaacgcaggtgctgaaccaaacgtcccgtctagagatacagctgcttgagaacagcctatccacttataagttggagaagcagctgttacagcagacaaatgaaattctgaagattcacgagaagaatagcctgctcgaacacaaaatcctggaaatggaaggtaaacataaggaagaacttgacacgttgaaggaggaaaaagagaacctgcaaggcctcgtaaccagacagacttatatcattcaggagttagaaaaacaacttaaccgcgctacaaccaacaatagcgtgttgcaaaagcagcagctggaactcatggacaccgtccataatctggttaacctttgcacgaaggagggtgtgctgcttaagggtggtaaaagagaagaggaaaagccttttagggactgcgcggacgtatatcaggcaggcttcaacaagtctggcatttacacaatttatatcaacaatatgccagagccaaagaaggttttctgcaacatggatgtgaacggcggaggttggacagtcatccagcatcgggaggatggatctctcgactttcagcgcggttggaaggagtacaaaatgggcttcgggaatccgagtggtgaatattggctggggaatgagttcatctttgccattacttctcagagacagtatatgttgaggattgagctaatggactgggagggcaacagggcttactctcagtacgaccgattccacatcggcaacgaaaaacaaaactaccgactctatctgaagggccacaccggcactgcaggtaagcaaagtagtctcattctccacggcgcagacttcagtaccaaggacgcagataacgataactgtatgtgcaagtgtgccttaatgctgacgggaggctggtggttcgacgcctgtggccctagtaacctcaatggcatgttctacaccgccggtcagaaccacggcaaactgaacggtatcaagtggcactatttcaaagggccatcctatagcctgaggagcacaacgatgatgattcgccctctcgacttctag

SEQ ID NO: 27291 - DNA, 894 bp, synthetic construct
  misc_feature 1..894: note = Description of Artificial Sequence: Synthetic coding sequence
  source 1..894: mol_type = other DNA
atggaaggcaagcacaaggaagaactggacactctcaaagaagagaaagaaaatctacaggggttggtgacaagacagacgtatatcatccaggagctcgaaaaacagttgaacagagccaccaccaacaattctgtactccaaaagcaacagctggagctgatggatacagttcacaacctggttaatctgtgtaccaaggaggtgttactgaaagggggaaaacgtgaggaggaaaaaccctttagagattgcgctgatgtatatcaggccggattcaataagagtggcatatacaccatctacatcaataatatgccagaacctaaaaaagtgttctgtaacatggacgtgaatggaggcggttggaccgtcatccagcacagggaagatgggtcactcgacttccagcgcggatggaaagaatacaaaatgggattcggcaatcccagtggcgaatattggctgggtaacgagtttattttcgccataaccagccaaagacaatacatgttgcggattgagctcatggattgggaaggcaatagagcctacagccagtacgaccggttccacattggcaatgaaaagcagaattacaggttgtacttaaaaggacatacgggcacagccggaaaacagtcctccctaatacttcacggtgctgacttctcaactaaggatgctgacaacgataattgcatgtgtaagtgcgcactaatgttgacggggggatggtggttcgacgcatgtggtccctctaaccttaatgggatgttttatactgctgggcagaaccacggcaagctgaatggaatcaagtggcattattttaagggaccttcttacagtttgaggagcaccacaatgatgattcgcccactcgatttttag

SEQ ID NO: 27292 - DNA, 897 bp, synthetic construct
  misc_feature 1..897: note = Description of Artificial Sequence: Synthetic coding sequence
  source 1..897: mol_type = other DNA
atggaaggcaaacataaagaagagctggataccctgaaagaggagaaagagaatttacagggattggttacccgtcagacctacatcattcaggagcttgagaagcagctgaatcgggctactactaacaattctgtgcttcaaaagcagcagcttgagttgatggataccgtacacaacctggtcaacctgtgtactaaggaaggggttctactgaaaggcggtaaacgggaggaagaaaaaccattccgagattgtgctgatgtatatcaggccggatttaataaaagcggtatttatacaatttacatcaataacatgcccgagcccaagaaagtgttctgcaatatggatgtgaatggaggaggctggaccgttatccagcacagagaggacggcagcttagactttcagagagggtggaaggagtacaagatgggattcggtaatccctcgggtgagtactggctaggaaatgaattcatattcgccattacctcacagagacaatacatgcttcgcatagagttaatggactgggagggcaatagagcctacagccagtacgaccgctttcacattggaaacgagaaacagaactatcggctgtacctgaagggacacacgggaacagcaggcaagcagagttcgctcatcctgcatggagcagacttctctactaaggacgcggacaacgataattgcatgtgtaagtgcgctcttatgctcacaggcggatggtggttcgacgcctgtggtccttctaatctgaacggcatgttctacaccgctggccagaaccacggtaagctgaacggcattaagtggcattatttcaagggaccctcatactcactccgaagcacgacaatgatgatcagacccttggacttttag

SEQ ID NO: 27293 - DNA, 1491 bp, synthetic construct
  misc_feature 1..1491: note = Description of Artificial Sequence: Synthetic coding sequence
  source 1..1491: mol_type = other DNA
atgtggcagattgtctttttcaccctcagctgcgacctggtgctggcggcagcttacaacaacttccgcaaatcaatggacagtatcgggaagaaacagtaccaagttcaacacgggagttgtagttatacgttcctcctgcctgagatggataactgccgttcatcttcttccccatacgtatccaatgctgtccagagagacgcaccccttgagtacgacgactctgtgcagagactacaagtcctggaaaacattatggaaaataatacgcagtggctgatgaagctggaaaactatattcaggataacatgaaaaaggaaatggttgagatacagcagaacgctgtgcagaatcagactgctgttatgattgagattggcacaaatctgctgaaccagaccgcggagcagaccagaaagctcacagacgtggaagcccaagtgctgaatcaaaccacccgcctggagctgcagttactggaacattccctctcgactaataagctcgaaaagcagatcctggaccagactagtgaaattaataagctgcaggacaaaaattcttttctagaaaagaaagtcctggcaatggaggataagcacatcatccaactgcagtccataaaggaggagaaagaccagctccaggtgctagtgtcaaaacagaactccattatagaggaactcgaaaaaaagatcgtcaccgccacggtgaacaatagtgtgctgcagaagcagcagcacgatcttatggagaccgttaataatctgctgactatgatgtccacttccaatagcgcaaaagaccccacagtggccaaagaagagcagatttcattcagggattgtgctgaggtattcaagagtggccataccactaacggcatttacacattgacattccccaatagcacagaggagatcaaggcctattgtgatatggaagcgggaggcggaggctggactatcatacagcgtcgagaggatggctcagtcgatttccagcggacatggaaggaatataaggtgggctttggaaacccctctggtgagtactggctgggcaatgagtttgtgtcacagttgaccaaccagcagaggtatgtgctaaaaattcacctcaaggactgggagggcaatgaggcttatagtctctacgaacacttctacctgtccagcgaggaactgaattatcgcatccacctaaaggggctgacaggaacagcgggtaaaatttcatcgatttcccagccgggtaatgacttttccactaaggatggggacaatgacaagtgcatctgtaagtgctcacaaatgttgaccggagggtggtggtttgacgcatgtggtcctagtaacctgaatggaatgtactatccacagcggcagaacaccaataaattcaatggtataaagtggtactattggaaaggctccgggtattccctgaaagcgacaacaatgatgattcgccctgcagatttctag

SEQ ID NO: 27294 - DNA, 1488 bp, synthetic construct
  misc_feature 1..1488: note = Description of Artificial Sequence: Synthetic coding sequence
  source 1..1488: mol_type = other DNA
atgtggcagattgtgttttttacccttagctgcgatctggtcctggcagcagcttataacaattttcgcaagtcaatggatagcatcggcaaaaagcagtaccaggttcagcatggttcatgctcgtatacgttccttttaccggagatggacaattgtcggtcaagcagttccccttacgtttccaacgctgttcagagagacgcgccactcgagtatgacgattctgtgcagcgcttgcaagtcctggaaaatatcatggagaacaatactcagtggcttatgaaactggaaaattatatacaggacaacatgaagaaagagatggtcgaaatccaacagaacgccgttcagaatcagaccgcggtgatgatcgagatcggcaccaatttgctcaatcagaccgctgagcaaactagaaagctcaccgacgtggaagcccaagtgctgaaccagaccacacgtctggagctgcagcttctggaacacagcttgagtacgaacaaacttgaaaagcagattctcgaccagaccagcgaaataaataaactgcaggacaagaattcattcctggaaaaaaaggtgctcgccatggaagataagcatatcatccaattgcagagcatcaaggaagagaaggaccagctccaagtactcgtgtcaaaacagaatagtatcattgaagagcttgagaagaagattgtgactgcaacagtcaacaacagcgtcctccagaaacagcagcatgacctaatggaaacagtgaataacctcctgactatgatgtctaccagcaattccaaggacccgacagtggccaaagaggagcagatttcttttagggattgcgcagaagtgtttaaatcgggccatacaaccaacggcatttatactctgacattcccaaattcgacggaggaaattaaggcttattgcgatatggaagcgggtggaggcggatggacgatcattcaaagacgggaagatggatcagtggacttccagagaacctggaaagagtacaaagttggtttcgggaatccgagcggcgagtattggctgggaaacgagttcgtttcccagttgaccaatcaacaacgatacgttttgaaaattcacctcaaagactgggagggaaacgaagcttactctctctacgagcacttttatctctcttccgaagaattaaactacagaatccacttaaagggtctgaccgggaccgcagggaaaatcagcagcatcagccaacccggtaatgacttctctaccaaagatggcgataatgataagtgcatctgcaagtgttcccagatgctaactggaggatggtggtttgatgcttgcgggcctagtaacctcaacggaatgtactacccacagagacaaaacaccaataaattcaatggcattaagtggtactactggaaggggagcggttacagccttaaagctacgaccatgatgatacgacccgctgacttctag

SEQ ID NO: 27295 - DNA, 1335 bp, synthetic construct
  misc_feature 1..1335: note = Description of Artificial Sequence: Synthetic coding sequence
  source 1..1335: mol_type = other DNA
atgtggcagatcgtgtttttcacgctgtcttgcgacctggtgctggccgcagcctataataacttccggaagtcaatggatagcattggcaaaaaacaatatcaggttcagcacggaagttgctcctacaccttcttgctcccagaaatggataactgcagaagctctagctctccgtatgtctccaacgccgttcagcgagacgcacccctcgagtatgacgatagcgtccagaggctgcaagtgctggaaaatataatggaaaacaacacacagtggcttatgaaagtgcttaatcaaacgacgcgactcgaattgcagttactggagcatagtctctcgaccaacaaactggagaaacagatccttgatcagacgagcgaaattaataagctccaggacaaaaactctttccttgagaagaaggtgttagctatggaggataagcacatcatccagcttcagagcattaaggaggaaaaggaccagttgcaggtgcttgtgtcaaagcaaaattctatcattgaagaactcgagaagaagattgtgaccgccacagtgaacaactcagtcctgcagaaacagcagcatgacttaatggagactgtgaacaacttactaactatgatgagcacgagcaacagcgctaaggacccgacagtagccaaagaggaacagatctctttcagggactgtgctgaggtcttcaaaagtggccataccaccaacggaatatacacgctgacatttcctaacagcaccgaggagatcaaggcatattgcgacatggaggccggtggcggagggtggacaatcattcagagacgcgaggatggatcagtcgattttcagcggacctggaaggagtacaaagtcgggttcggcaacccgagtggtgagtattggttaggtaacgaattcgtgtcccagctgaccaaccagcagcgttacgttctgaagattcatttaaaagactgggaaggcaacgaggcctattctctttacgaacacttttaccttagcagtgaggagctcaactatcgcattcatctgaagggactaacaggcactgctggtaagattagttccatttcccagcccggtaacgacttttctaccaaagacggcgacaacgataagtgtatttgtaagtgttcccagatgttgacgggcggatggtggttcgacgcttgtggacctagcaatctgaatgggatgtactatcctcaacgccagaataccaacaaatttaacgggattaagtggtactattggaagggatctgggtacagtttgaaagcaaccaccatgatgatacgtccagccgacttctag

SEQ ID NO: 27296 - DNA, 1221 bp, synthetic construct
  misc_feature 1..1221: note = Description of Artificial Sequence: Synthetic coding sequence
  source 1..1221: mol_type = other DNA
atgagcggtgcgcctactgccggagcggcactaatgctatgtgctgccacagccgtcctgctcagtgctcagggtggtcccgtgcagtccaaaagtccgaggtttgcatcctgggacgagatgaacgtgttggcccatggactgctgcaactgggtcaggggctcagagagcacgcggagcgtacccggtctcagttgtcagcccttgaacgcaggctctccgcgtgtgggtctgcatgtcaggggaccgaaggatccacagatttgccgctggcaccggagtcccgagtggatcctgaggtcctccactctcttcagactcagctcaaggcacagaattcccggatccagcagctcttccacaaggtcgcccaacagcagcgtcatctcgaaaaacagcacctcagaatccaacaccttcagtcgcagtttggcctgctggatcataaacatctggatcatgaggtcgctaagccggcacgcaggaaaaggttgccagaaatggctcagccggtggatccagcccataacgtcagccgactgcatcggctgccacgggattgtcaggagctgtttcaggtgggtgaacgccagtccggcctgttcgaaatccagccacagggatcaccacccttccttgtgaactgcaagatgactagcgatggcggatggacggtcattcagagaaggcatgatggcagcgtcgatttcaaccgaccctgggaggcatataaagctggatttggcgatccgcatggggaattctggttggggttagagaaagtccatagtatcactggggacaggaactcaaggctggcggtccaactcagagattgggacggaaatgccgagctgctgcagtttagtgtccatctgggtggcgaggatactgcctattctctgcagctcacggcaccagtggcaggacagctcggagccacaaccgtgccacctagtggattgagcgtccctttctctacatgggatcaggatcatgatctcaggcgagacaagaattgcgccaagtctctgagcggcggatggtggttcggcacgtgttctcatagcaacctgaacgggcagtatttcagaagtatccctcaacagcgtcagaaactgaagaagggaatcttctggaagacctggcgcggaagatactatccactgcaggcaactacaatgcttatccagcctatggctgcggaggcagcaagctag

SEQ ID NO: 27297 - DNA, 1107 bp, synthetic construct
  misc_feature 1..1107: note = Description of Artificial Sequence: Synthetic coding sequence
  source 1..1107: mol_type = other DNA
atgtctggcgctcctaccgccggagcggctttaatgctgtgcgcagccacagcagtcctgctgtccgcccaggggggtcccgtccagagcaagtctccgagattcgcctcatgggacgagatgaacgttctcgcccatggtctcctgcaattgggacaggggcttcgggagcatgcagaacggacccgatctcagctgtccgccctggaacggagactgagcgcctgtgggtcagcctgtcaagggactgagggatcgactgatctgcctctggccccagagagccgagtggaccccgaggtgctgcacagtcttcagacccagctcaaggcccagaattcacgcattcagcagctctttcataaggtggcccagcagcaaaggcatctcgagaaacagcacttgcgcatacaacaccttcagtctcagttcggccttctcgatcacaagcaccttgatcacgaggtggctaagcctgcgcgtcgcaaacgactgcctgaaatggcccagccggtggacccagctcacaatgtgtctcgacttcaccatggcggttggacggtgatccagaggagacacgacggctcagtagacttcaaccgtccctgggaagcatacaaggccggtttcggcgatccacacggggaattttggctgggcctggagaaagtacactccatcaccggagaccgcaactcacggttggctgttcaacttagagactgggacgggaatgcagagctcttgcaattctctgtccacctgggaggcgaggacacagcctactccttacagctcactgcgccagtggcaggtcaactgggggcaactaccgttccaccaagcggtctgagcgtgccgtttagtacatgggaccaggatcacgacctgagacgagataagaattgcgccaagagcctgtccggcggttggtggttcggcacctgtagtcacagcaatctgaacggtcaatattttagatcaataccccagcagaggcaaaaactcaagaagggaatattttggaaaacttggcgcggtagatactacccacttcaagccaccacaatgcttatccagcccatggcggctgaggcagcttcttag

SEQ ID NO: 27298 - DNA, 720 bp, synthetic construct
  misc_feature 1..720: note = Description of Artificial Sequence: Synthetic coding sequence
  source 1..720: mol_type = other DNA
atggctcagccagtggacccagcccacaacgtctctaggctgcacaggttaccacgtgactgtcaggagctctttcaggtgggtgagcgccagtccggtcttttcgaaattcaaccacaggggagccctcccttcctcgttaattgtaaaatgacatcagatggcggatggaccgtgatccagcgaaggcacgacggatcagtcgattttaatcgtccctgggaagcctacaaggccggtttcggcgatccgcatggtgagttttggctggggctggagaaggtccacagcattacaggagatagaaactcccgtctcgctgtgcagttacgggactgggatggcaacgcggagttattgcagttttctgtgcacctcggtggcgaggataccgcatattccttgcagctgaccgcaccagtcgctggccagctaggagcaacgacggtccctccttcgggcctcagtgtgcctttctcgacctgggatcaggaccacgatctccggcgtgataaaaattgcgccaaatccctttctggagggtggtggtttgggacatgctcacattcaaacttgaacggccagtatttccggagtattccccagcagagacagaagctaaagaagggtattttttggaaaacttggcgaggccgatactaccctctccaggctaccacaatgctaattcaacccatggcagccgaagccgcaagctag

SEQ ID NO: 27299 - DNA, 837 bp, synthetic construct
  misc_feature 1..837: note = Description of Artificial Sequence: Synthetic coding sequence
  source 1..837: mol_type = other DNA
atggagcccagagctgccgacggttgtttcctcggggatgtggggttctgggttgagaggactccagtgcacgaagccgcacagagaggcgaatctctccagctgcagcagctgatagagagtggggcttgcgtgaatcaggtcaccgttgattccatcacccctctgcatgctgcctccctgcagggccaggcacgctgcgtgcagctcctgctggctgcgggagcccaggtcgacgccaggaatatcgacggtagtactccactgtgcgacgcctgtgcgtctgggagtattgagtgtgtgaagctcctcctgtcgtatggtgctaaagtcaatcccccattgtacaccgcctcacccctccacgaggcgtgcatgagtggatcttccgaatgcgtgcggctattgatcgatgttggagctaatctcgaagctcacgactgccacttcgggactcccctccatgtcgcttgcgccagagagcacctggattgtgttaaggtgcttctgaacgctggcgcaaacgtgaacgcagcaaagcttcacgagaccgctctgcaccatgcggctaaggtgaagaacgtcgatctgatcgagatgctgatcgaattcgggggtaacatctacgcgcgagacaatcggggaaagaagccctctgattacacttggagtagcagtgcgcctgctaaatgttttgaatactacgagaaaacaccgctgacactctcgcagctttgcagggtaaatctgcgtaaggctaccggtgtgaggggtctggaaaagattgcgaagctgaacatcccaccaaggctgatagattatctgtcgtacaactag

SEQ ID NO: 27300 - DNA, 396 bp, synthetic construct
  misc_feature 1..396: note = Description of Artificial Sequence: Synthetic coding sequence
  source 1..396: mol_type = other DNA
atggaaaaaatacccgtgtccgcgtttctcctgttagtggccctctcctacacgttggccagggatacgacggttaagcccggagcaaagaaggacactaaggacagtcggccaaagttgcctcagactctaagcaggggttggggcgatcagctgatctggactcaaacatacgaagaagccctctataaaagcaaaacctcgaataaacccttaatgataatccatcacctggacgagtgcccccactcccaggccctgaaaaaagtgttcgccgaaaacaaggagatacagaagctggctgagcaattcgtactattaaatctggtctacgaaactaccgataagcacttgtcgcctgatggccagtacgtcccgagaattatgttcgtctag

SEQ ID NO: 27301 - DNA, 528 bp, synthetic construct
  misc_feature 1..528: note = Description of Artificial Sequence: Synthetic coding sequence
  source 1..528: mol_type = other DNA
atggagaagattccagtcagtgccttcctgctcctggtggcactgtcgtacactctcgcacgcgacaccacagtgaaacctggcgcaaaaaaagacacgaaggactctcgacccaaactgccccagactctgtcccggggatggggggatcagctgatctggacacagacatacgaggaggcgctttacaagagcaaaacttccaacaagcctctcatgattatccaccacctggatgagtgcccacacagccaggcactcaagaaggtgttcgctgagaacaaggagattcagaaactcgccgagcaatttgtgctgctaaatctcgtgtacgaaactaccgataagcacctttcacccgatggacagtacgttcctcgtattatgttcgtcgaccctagcttaaccgtgcgcgctgacatcacagggagatactccaaccggctgtacgcatacgaacctgccgacactgctctgctgctggacaatatgaagaaggctctcaaactcctcaagactgaactgtag

SEQ ID NO: 27302 - DNA, 588 bp, synthetic construct
  misc_feature 1..588: note = Description of Artificial Sequence: Synthetic coding sequence
  source 1..588: mol_type = other DNA
atgagtaattacacagatgccgagtcaagcttttcaaaacaagagattatcagagtggcaatggagaagattccagtctcagcttttctgctcctggtagcgctgtcctacaccttggccagagataccaccgtcaagcccggagccaaaaaggacaccaaggattctaggcctaagttgcctcagacactgtcccggggatggggcgaccagctgatatggacacagacatatgaagaggccttgtataagtcaaagacttcgaacaaacccctgatgatcattcatcatttggacgaatgcccacactcccaggccctgaaaaaggttttcgctgaaaataaggaaatccaaaagctggccgaacagtttgtcctgctgaacctggtctacgaaacaaccgacaaacacctctctcccgacggacagtatgtgccacgaattatgttcgttgacccctcgctgaccgtgcgtgcagatatcaccggacgatatagtaatcgcctttatgcgtacgagcccgcagatacagctctgcttctcgataacatgaaaaaagcgctgaagctccttaaaactgagctgtag

SEQ ID NO: 27303 - DNA, 1251 bp, synthetic construct
  misc_feature 1..1251: note = Description of Artificial Sequence: Synthetic coding sequence
  source 1..1251: mol_type = other DNA
atgtggcccacacgtaggctggtaaccattaagcgctcaggcgttgacggacctcacttccccctttccctatccacttgcctctttggcaggtatgagaacgaatccctccagaacggtcgcaagtccacagagttccctcgaaagatcagggaacaagagccggctcggagagtctcaagaagtagcttctcgtctgaccccgacgagtccgaggggattcctctcaaaagaagacgggtgagctttgggggtcacctgcgccctgaacttttcgatgagaatctgcctcctaataccccactaaaaaggggcgaagcccctactaaaagaaaaagtttggtgatgcatacaccccctgtgctgaagaaaatcataaaggaacagccccagccgagtggtaaacaggagagcgggagcgagattcacgttgaggtcaaggcgcagagtcttgtgatttcgcctccggctccgtccccccgtaaaactcccgtggcctcagatcaaaggagacggtcctgtaaaaccgcacccgcttcgtcatcgaaatctcagaccgaggtacctaagcggggaggcagaaagtccgggaatcttccctccaaacgggtttcaatctctcgcagccagcacgatatcctgcagatgatctgcagtaagcggcgaagtggcgcttctgaggccaatctaatcgtggcaaagtcctgggccgatgtcgtgaagctaggcgctaaacagacacaaacaaaggtgattaagcatggtccacagaggtctatgaataaacggcagagaagacccgcaacgccaaagaagcctgtgggcgaagttcactcccagttcagcactggccacgcaaacagtccttgcaccatcattatcggtaaagcgcacaccgagaaggtgcatgtaccagcacgaccttacagggtgctgaataacttcatctccaaccagaaaatggacttcaaagaggacttgagtggtattgccgaaatgttcaaaactcccgtcaaagagcagccccagctcaccagtacgtgtcatatagccatcagcaattccgaaaatctactcgggaagcagtttcaaggaactgattccggcgaagagcccttgctgccgacctcggagagcttcggcggaaacgtgttctttagcgcacagaatgcagctaagcagcccagtgataagtgttccgcctcccctcccctgcgccgtcaatgtatccgtgagaacgggaacgtctag

SEQ ID NO: 27304 - DNA, 8690 bp, synthetic construct
  misc_feature 1..8690: note = Description of Artificial Sequence: Synthetic coding sequence
  source 1..8690: mol_type = other DNA
atgtggccgacaaggcgcttagtgacaatcaagcggtccggcgtggacggtccacacttccctctatctctgtccacatgtctcttcgggaggggtattgaatgcgatatacggatccaactccctgtcgtgtccaaacagcactgcaaaattgagatccacgaacaggaagctatcctgcacaacttctcgtcaactaaccccacccaggtgaatggaagcgtgatcgatgagccagtgagacttaagcatggagacgtgatcactatcatcgataggtcattccgctacgaaaacgaatccttgcaaaatggaaggaagtccaccgagtttccacggaagatacgggagcaagagcccgctaggcgggtctcaagaagcagcttttccagtgacccagatgaaagtgaaggaatccccctgaaaaggagacgagtttcattcggtgggcatctccggcctgaattatttgacgagaacctgcctcctaacacaccgcttaagcggggagaggcacctactaaacgcaaatcactggtgatgcatactccgcctgtgctcaagaagatcattaaagagcagccccagccaagcgggaaacaggagtcagggtctgagatacacgttgaagttaaggctcaatctttggtcattagcccacctgcgccaagtccgagaaagacccccgtggcttccgaccagcgtagacgttcctgcaagaccgcccctgcttcatcctctaagagccagacagaagtgccaaaaagagggggtaggaagtcaggaaatttaccaagtaaacgggtgtctatctctcgctcccagcacgatatactccagatgatatgtagcaaacggaggtccggagcttccgaggctaatttgatagtggctaaaagttgggccgacgtggttaaactcggagccaagcagactcagaccaaagtaattaagcacggaccccagaggtctatgaacaaaagacaaagacggcctgcgacacccaaaaagcctgttggtgaggtccacagtcagttctccacagggcatgcaaatagtccctgcaccatcataattgggaaggcacacacggaaaaggtgcacgtgcctgctcggccatatcgggtactcaataactttattagtaatcagaagatggattttaaagaagacctctctggaatcgctgagatgttcaaaactcccgtgaaagagcagccgcagcttacgagtacttgccatatcgcaatctccaattcagaaaacctactgggcaagcagtttcaaggaaccgacagcggcgaggagcccctgttgcctacctccgagtcgtttggcggaaacgttttctttagcgcccagaatgccgctaagcagccctccgacaagtgctcggcctcaccgcctttgagacgccagtgcataagggaaaatggtaacgtggctaaaacacccaggaacacctacaaaatgacgtcattggaaactaaaacttcagataccgagacggagccgagcaaaactgtttcgactgcaaaccggagcggcagatccaccgaattcaggaatatccagaagctgcccgtcgagagcaagtcagaggagacaaatacggagatagtcgaatgcattctaaagcgtgggcagaaggccactctcctgcaacagcgacgcgagggggagatgaaggaaatcgagcgaccattcgaaacatataaagaaaacattgagctgaaagagaacgatgagaagatgaaggctatgaagcgatcgcggacttggggccagaagtgcgctcccatgtccgatcttacggacttgaaatcactgccagacacagagctgatgaaggatacagccagggggcagaaccttctgcagacccaagatcatgcgaaagctcccaaatccgagaagggtaagatcactaaaatgccctgccaatcgctgcagcctgaaccgatcaatacacctacacacacaaagcagcagctgaaggccagcctagggaaagtaggagtaaaagaagaacttctggccgtaggcaagttcacgcgtacatccggcgagactacacatacacatcgagagcccgcaggcgacgggaagtctattagaacattcaaggaaagccccaaacaaatcctggacccagcagctcgagtgacaggtatgaaaaagtggcctcgcactcccaaagaggaggcccagtccctggaggatttggctggcttcaaggaactctttcagacgcccggaccctccgaggagagcatgaccgacgagaagaccaccaagatcgcgtgcaagagtccacctcccgaatctgttgacactcccacctcaaccaagcaatggccaaaaaggtctctcaggaaggctgacgtggaagaggaattccttgcactgaggaaattaactcctagcgctggcaaagcaatgcttactcccaagcctgcaggcggagacgaaaaggacatcaaagcgttcatgggcacacctgtccagaaactcgatctcgccggaacactccctggctcaaagagacagctccaaaccccaaaggagaaagctcaagccctggaggatctggcgggattcaaagaactgtttcaaaccccagggcataccgaggaactggtagcagctggcaaaacgactaaaatcccatgcgactccccgcagtcagatccagtggataccccaacttctactaagcaaaggcccaagcgaagtatcagaaaagcagacgttgaaggagagctgctcgcatgtcgaaatctgatgccctcagcgggaaaggctatgcacacacccaaaccctccgtgggcgaagagaaagatataatcatctttgtgggaactcccgtgcagaaactggacctaaccgaaaatctaactggcagcaaacgcaggccacagacacctaaagaagaggcccaagctctggaggatctgacgggcttcaaggaactgtttcagaccccaggtcacactgaagaggccgtagccgcaggcaaaaccacaaagatgccatgtgagagttctccccctgagtctgctgatactcccacaagcacacgccgacaaccgaagaccccgctggaaaaacgagacgttcagaaggaattaagcgcacttaagaaactcacgcaaacgtccggcgaaactacccatacagacaaggtgccaggtggagaggataaatcaataaacgctttcagggaaactgctaaacagaagcttgatcctgcggcttccgttaccggatccaagcgccatccaaagactaaggagaaggcccagccactagaggatttagcgggacttaaagagttatttcaaactccagtttgcacagataagcccacaacacatgaaaagacaaccaagatagcatgcaggagtcagcccgaccctgtggatacccccacctccagcaaaccacagtccaaaagatctttgcgcaaggtggacgtggaagaggagttttttgcccttaggaagcgcaccccatctgcgggaaaagcgatgcacactccaaagccagctgtcagtggtgagaaaaacatttatgcctttatgggcacacccgtccagaaactggaccttacagagaacttgacaggctcgaagaggcgcttgcagaccccgaaagagaaggcccaggctctggaagacctcgccggatttaaagagcttttccagaccagagggcataccgaagagagcatgaccaatgacaagacggccaaagttgcgtgcaaatctagccagccagatccagacaaaaatcccgctagctcgaaacggaggttaaagactagcctcgggaaagtcggggtcaaggaggagctgctggccgtgggtaaactaacgcaaacctccggagagacaacacacactcacactgaacctaccggagacggcaagtctatgaaagcattcatggaatctcctaagcagatcctggatagcgccgcttccctgactgggagcaagcggcaactgcggaccccaaagggcaagagcgaggtgcccgaggacctagccggattcatcgagctgtttcagacgccatcccacacaaaggagtctatgaccaacgagaagacaaccaaggtgtcctaccgggcaagtcagcctgacttggttgacacccccaccagttcgaagccccaacccaagcggtccttgcgtaaagccgatactgaggaggagttcctggcattcagaaagcagaccccgtctgccggaaaggccatgcatacccccaagccagccgtcggcgaagagaaggacataaatacgttccttggcacaccagtgcaaaaactggaccagccaggcaacttgcccggatccaataggaggttgcaaacaagaaaagagaaggcacaggctttagaggaactcactggctttagagaactcttccagactccatgcaccgataatcctaccacggacgagaagacaacaaagaagattttgtgcaaaagcccccagtccgaccctgccgacacacctactaacaccaagcagcgtcccaaaagatcactaaaaaaggcagatgtcgaagaagagttcctggcctttcgcaaattaaccccttctgccggtaaagctatgcatacacctaaagctgccgtgggtgaggagaaagacatcaatacgtttgtcggtactcccgtggagaaactagatctgctaggaaatctccctggatccaagcggcgtcctcagactcccaaggagaaggccaaggccctggaggatctggccggattcaaagaactgttccagactcccggacacactgaagaaagtatgactgacgataaaataacagaggtctcatgcaagtctcctcaacccgacccagtgaaaacaccaacctccagtaagcagcgtctcaaaatcagtctcgggaaagtcggcgttaaagaggaagtgcttcctgtcggcaaactgacccaaacttccgggaaaacaacccagacccacagagagactgcgggagacggtaaaagcataaaggccttcaaagaaagtgctaagcagatgttggacccagccaactacggtacaggtatggaacgctggcccaggaccccgaaagaggaagcccagtctcttgaggacttggccggttttaaagagctgttccagaccccagaccatactgaggagtcaacaacagatgacaagaccacgaagatagcctgcaaaagcccccctcccgagagcatggacacgccaacatcaactaggagacgccctaagacccccttggggaagcgtgatattgtggaggagctaagcgcactgaaacaactcacacagaccacacatacagacaaggtgccaggcgacgaagacaaaggcatcaacgtatttagagagacagctaagcagaagttagacccagcagctagcgtgacagggtcaaagaggcagccacgaacacctaagggaaaagcacagccactcgaggaccttgcaggacttaaagaactgttccagactcctatttgtaccgataaacccacgacacatgaaaagacgaccaagatcgcttgtcgctccccccagcccgatcctgttggaactcccacaatcttcaaaccacaatcgaaaagatctctgagaaaagccgacgtcgaagaagaaagtctggccctgcgcaagaggactccgtccgtggggaaggcgatggacacccccaaacctgcgggaggtgacgagaaggacatgaaagcatttatgggtacacccgtccaaaaactggacttgcctgggaatctgcctggctctaaaaggtggccccagactccaaaggagaaggcccaggcactggaggatctcgccggatttaaggagctatttcagacaccaggaactgataaacccaccactgatgagaagactactaagatcgcttgtaagtccccacaacccgaccctgtagatacccccgctagcaccaaacagcgccctaaaagaaatctcaggaaagcagatgtagaagaagagttcctagctctgaggaagagaacaccctccgcaggtaaagccatggatacacccaaacctgccgtgagcgatgagaagaacattaacactttcgtggagacacccgtgcagaaactcgatctacttggcaatctgcccggatctaaacgccaaccccagacacccaaggagaaggccgaagcattagaggatctggtcgggttcaaggaactgttccagactcccggtcacacagaagagtcgatgaccgacgataagattaccgaggtctcttgtaaaagccctcaacctgaatcatttaagacgagtagatcttcaaagcagcgcctcaaaatcccactggtgaaggtggacatgaaagaggagccactcgccgtgagcaagcttacacgaacttctggcgagacgacccagactcataccgaacccaccggggacagtaagagcatcaaggctttcaaggagtcgcccaagcaaatcctcgatcccgcagcctcagtgaccggcagccgcagacagctgcgcaccaggaaggagaaagcaagggccctcgaggatcttgtggatttcaaggagctgttcagcgctccagggcatactgaggaaagcatgactatcgacaaaaacactaaaattccctgtaaaagccctcctcctgagctcacagataccgcgacgagtaccaagaggtgcccgaaaactcgccctagaaaggaggtgaaagaagaactctctgccgtggagaggctcacacagacctcggggcaatccacacatacccataaagagccggctagcggtgacgaggggattaaggtgctcaaacagagagcgaaaaagaagcctaaccctgttgaggaagaaccttctaggcggaggccgagggcacccaaggaaaaagcccagccactcgaggacctggccggattcacagaactaagcgaaacatccggacatacacaggaaagtctgactgcgggtaaggccacaaaaatcccctgtgagagtcctcctctggaggtggttgacaccactgcatccaccaagaggcatctgagaaccagagtgcagaaggtccaggttaaagaagagccatcagctgtgaaattcacccagaccagcggcgagaccacagacgccgacaaggagccagcgggtgaggacaagggtatcaaggcgctgaaagagagtgcaaagcagacacccgctcctgctgctagcgtcactggatcacgaagaaggccgagagcccctcgagagtcagctcaggccatcgaagatttggcagggttcaaagaccctgctgccggtcacacagaagaaagtatgactgacgacaaaactactaaaatcccttgcaaatcttccccagagctggaagacacagctaccagcagtaaacggcgacccagaacaagagcgcagaaggtggaagttaaggaagagctgctggcagttggcaagcttacccagacaagcggagaaaccacccatactgacaaagaaccagtgggggaagggaagggcacaaaggcttttaaacaacctgcaaaacgaaagctggacgcagaagatgtcatcggaagcaggcggcagcccagggctcccaaagagaaggctcagccactggaagatttggcctcctttcaggaactgtcccaaacgcccggacatactgaagaattagccaatggtgcagctgacagctttacgtcagcaccaaagcagacccccgattctgggaaacccttgaaaatatcacggagggtgctacgtgcgcctaaggtggagcctgtcggcgacgtcgtgtccacccgagacccagtcaaaagccagtccaaatcaaacacttccttgccaccgcttccattcaaacggggtgggggaaaggacggaagtgtgaccggaacaaagaggctgaggtgtatgccagcccctgaggagatcgttgaggaactgccggcatccaagaagcagagggtggcccctagagccagaggcaagtcaagcgaaccagtggtgatcatgaaacggagtctgcggacctcggctaagcggattgaaccagcggaagagctgaatagtaacgacatgaagaccaacaaggaagagcataagctgcaggactctgttccagagaacaagggtatatcactgagatcccgacggcaaaataaaacagaggcagagcagcagataacagaggtcttcgtactggcagagaggatcgagatcaatcggaacgagaaaaaaccgatgaagacgagcccagagatggacatccagaatccggacgacggcgctcggaagccaatccctcgggacaaggtgactgagaacaaacgctgtttgcgtagtgcaagacagaacgaaagttctcaaccaaaggttgcagaggagagcgggggacaaaaaagcgctaaagtgttgatgcaaaatcagaagggtaaaggggaggccggtaactcagactccatgtgtctaaggtccaggaagaccaaatcccagccagccgcatcaactcttgagagcaaatcagtacagcgtgtgaccagaagcgtgaagagatgcgctgaaaatccaaagaaggcagaggacaatgtgtgtgttaagaagatcagaactcgcagccaccgcgattccgaagacatcta

SEQ ID NO: 27305 - DNA, 9770 bp, synthetic construct
  misc_feature 1..9770: note = Description of Artificial Sequence: Synthetic coding sequence
  source 1..9770: mol_type = other DNA
atgtggcctactcggcgactggtgacaattaagagatcaggcgtggacggccctcacttcccactgtcactgtctacctgtctttttggcaggggcattgagtgcgatatcaggattcagcttccagtcgtaagcaaacaacactgcaagatcgaaatccacgaacaggaagccatcctgcacaatttttcatcaaccaacccgacgcaggttaacggctcagttatcgatgagcccgtgaggctaaaacacggggatgtcatcaccataatcgatagaagctttagatacgagaacgagagcctgcagaatggtagaaagagcaccgaatttccccgtaaaatcagggagcaggagcctgcccgacgcgtgtctcggtcttctttcagttctgaccccgatgaaaaagctcaggacagcaaagcctatagcaaaattaccgagggtaaagtatcgggcaatccacaggttcacatcaaaaatgtgaaagaggactcaactgccgacgattctaaagactcagtagcccagggtaccacaaacgtccactcttcagagcatgccggtcgcaatgggagaaatgctgctgatcccatctcaggggacttcaaggaaatatccagcgtgaagctagtctccaggtacggcgaacttaagtcagtgccaacaacccaatgcttggacaatagcaagaagaatgagtctcccttttggaagctgtatgaatctgtcaaaaaggagttggatgtgaagtcccagaaggagaacgtgctgcagtactgccgtaagagtgggctccagaccgattatgccaccgagaaagagtccgcggacggtcttcagggtgaaacacagctcctggtgtccaggaagagcagacccaagtctggaggctctggccacgctgtggcagagcccgctagtcctgaacaagaattagaccagaataagggaaagggtcgtgatgtagaatccgtccaaaccccctcaaaggctgtaggagctagtttcccactctacgagcccgctaagatgaagacaccggttcagtattcccagcagcagaactccccacagaaacataagaacaaagatctctacactaccggaagaagagagagcgtgaacctggggaagtcagaaggattcaaagctggggataagaccctgacccctcgaaagctctcaacccgcaaccgaactcccgcaaaggtggaggacgctgccgactcagccaccaaacctgagaaccttagctcaaagacccggggatcaattccaacggacgtcgaggttctgcctacagaaaccgaaattcacaatgagccgttcctgacactgtggttgacacaggtggagcggaagatacagaaggattcgttatccaaaccagagaagctcgggaccaccgctggccagatgtgttctggtctgccaggcctttcctctgtagacattaacaatttcggtgattctatcaacgagagtgaggggattccgctaaagcgtagacgcgtatcctttgggggacacttacgtccagagctgttcgatgagaacttgcccccaaacacccctctgaaaagaggcgaggctcctaccaagcggaaatcccttgtcatgcacactcccccagttctgaaaaaaatcatcaaagagcagccacagccttccggcaaacaggagtcaggcagcgaaatccacgtggaggtcaaagcccaatcacttgtgatcagccccccagctccatcacctcgaaagacccctgtcgcttccgaccagcggcgtcgatcctgcaaaactgctcctgcatcctcctcgaagtctcaaacagaagtgcccaaaagaggcggaaggaagtctgggaatctgccatccaaacgtgtcagcatatcaaggagccagcacgatatcctgcaaatgatttgttctaaaaggcgttctggcgctagcgaggcaaatctgatcgtagctaagtcttgggccgatgtggtcaaattgggcgcaaagcagactcagactaaagtcattaaacatggtccccagcggtccatgaataaacgccagaggaggccagccacccctaagaagccagtcggagaagtgcacagtcagtttagcacaggccacgccaattccccttgtacgattatcatcggtaaagcccatactgagaaagtccacgtgccagcgaggccgtacagagtcttgaataacttcatctcgaatcaaaaaatggatttcaaggaagacctgtcaggcatcgctgagatgttcaagacacccgtcaaggagcaacctcaactcacctcgacgtgccacatagcaatttccaactccgagaacctcctgggcaaacaatttcagggcactgatagtggcgaggagccactacttccgacctctgaaagctttggcggaaacgtgttcttctctgcccaaaatgccgcaaagcagcccagcgacaaatgctccgcatcacctccactgcggagacaatgcatcagagagaatgggaatgtcgccaagaccccacgtaacacctacaagatgacaagcctagagaccaagacatccgataccgagaccgagccctctaagactgtcagtacggctaaccggtcaggcagatcaacagaattccgaaacattcaaaaactgcccgtcgaatcaaagagtgaggaaaccaatactgagatagtcgaatgcatcttgaagcgaggacagaaagcaacattactgcagcagcggagagaaggggagatgaaagaaatcgaacgcccattcgagacatacaaagagaatatcgagctgaaggaaaatgacgaaaagatgaaagcgatgaaacggtcacgcacgtggggtcagaagtgcgccccaatgtcggaccttaccgatcttaagtctcttcccgatacagagctgatgaaggacactgctagggggcagaacctgctgcagactcaagaccatgccaaagctccaaaatccgagaagggtaaaatcaccaaaatgccctgccagtccctacaaccagagcccattaatactccaacccatactaaacagcaactgaaggcctctcttgggaaagtcggggtaaaagaggagctcctggcagtcggtaaatttacgagaaccagcggtgagaccacacatacgcatcgtgaacccgctggcgacgggaaatccatccggacctttaaggagtcgccaaagcagatattggatcccgcagctagagtgacgggaatgaaaaaatggcccaggacacccaaggaggaagctcaaagcctcgaggacttagcaggttttaaagagttgtttcagactccaggtccaagtgaagaatcaatgaccgacgaaaagaccaccaagatcgcctgcaagagtcccccacccgaatccgtggatactcccaccagcaccaagcagtggcccaagcggagcctacgaaaggccgacgtggaggaagaattcctggccctgcgcaaactcacaccgtctgctgggaaagccatgctgacccctaagccggctgggggagatgaaaaggacattaaggcatttatgggcactccagtacagaaactggatctcgccggaacactaccaggctcgaagcgccagctccagaccccaaaagagaaggcccaggccctggaggatttggccggatttaaagaattgtttcagactcctggtcacactgaagaactagtggccgcaggcaagacgaccaagatcccctgcgatagtccccagtcagaccccgtcgacacgccgacaagcaccaagcagcggccaaagaggagtattaggaaggccgatgttgagggagaactgcttgcctgtcgcaatcttatgccaagtgccggaaaggccatgcacactccaaaacctagcgtgggcgaagagaaggatatcattatattcgtggggaccccagtccaaaaactcgacctaacggagaatctgaccgggtcgaaacgtcgcccacaaactcccaaagaggaggctcaggcgctggaagatctgaccggctttaaggagctgttccaaactcccggacacacagaggaggcggtggccgctgggaagactacaaagatgccctgtgaatcctcgcctccagaatccgctgacactcccacgtccactaggcggcaaccgaaaactccgctggaaaaacgagatgtgcagaaggaactgtctgccctgaagaaactgacccagacaagcggagaaaccacacatactgataaggtgccaggtggagaggataagagtatcaatgcattccgagagacagcaaagcagaaactggaccccgctgcatccgtgactggatcgaagagacatcccaaaacaaaagagaaggcacagcctctggaggatctcgcaggccttaaagagcttttccagacccctgtgtgtacggataagcccaccacacacgagaagaccaccaaaatcgcctgcaggtcccagcctgatccggtagacacccctacaagctccaagccacagagcaagcgctcacttcggaaggtcgatgtcgaagaggaattcttcgccctgaggaagcgcactccatctgcaggtaaagccatgcacactccaaagccagcagtctcaggcgaaaagaacatctacgctttcatgggcacccccgtgcagaagctcgatctcacagaaaacctgaccggctcaaagcggcgacttcagaccccaaaagagaaggctcaagcactcgaggaccttgctggctttaaggaactgttccagacaaggggacataccgaggaatcaatgacaaatgataaaacagcaaaggtggcatgcaaatcgagccaaccggatccggataaaaatccggcttcctcaaaacgtcgcctgaagacctctctggggaaggtgggcgtcaaagaggagctgcttgccgtcggtaagttaacccagacgagtggagagactacacatacccacacggaacccactggagatgggaaatccatgaaggctttcatggaatcaccaaagcagatactggactccgcagccagcttgacagggagcaagaggcaactgcggaccccaaagggcaaatccgaagtgcctgaggatctcgctgggttcattgaactcttccagactccatctcatacaaaggagagcatgactaatgaaaagactaccaaggtctcctatagggcctcccagcccgatctggtcgatactcctacatccagcaagccccaacctaagcgctcactgcggaaggccgacaccgaagaggagttcctggccttcagaaagcagaccccttccgcgggtaaagccatgcacacacccaaacccgctgtgggagaggagaaggacataaacaccttcctgggcacaccagtccagaagttggatcagcccggaaacctgccaggatctaacagacggttgcagacccgaaaagagaaagctcaggcactggaggagcttaccgggttcagggagttatttcagaccccatgcaccgataatcctactacagatgagaaaactaccaagaagatcctttgtaagtcaccccaatcagatccagctgacacgcccacaaataccaagcagagacctaagagaagcctcaaaaaggccgacgtcgaagaggaattcctcgcatttcgtaagctcacccctagcgcagggaaagcaatgcatacacctaaggcagcagtaggggaagagaaagatataaacaccttcgttgggactcccgtggagaaactagacctcctaggcaatttacctggcagcaaacgcagacctcagacccccaaagagaaggccaaagctttggaggatctcgcaggctttaaggaactgttccagacgccagggcacaccgaagaatctatgaccgacgataagattaccgaggtctcttgcaaatctccacagccagaccccgtgaagacaccaacttcctcaaagcagcgcttgaagatctccctgggaaaagtgggagtaaaagaagaagtcctgcctgtaggaaagctcactcagacatcaggcaagactacccaaacccaccgggaaaccgccggagatggcaagagtatcaaggcctttaaggaatcagccaaacagatgttagatccggctaactacggcactggtatggaaagatggcccagaactcccaaggaagaggcacagtctctcgaagacctagcaggctttaaagagctctttcaaactccagatcacactgaggaaagtacaactgacgacaaaacaaccaaaattgcttgcaaatcaccaccacccgaaagcatggatacaccaacgtcaacgcgaagaagaccaaagacacctcttggtaaaagggatatagtggaggagttaagtgcgctgaaacagctgacccagaccactcacaccgacaaggtccccggtgatgaggataaaggaatcaatgtcttcagagagaccgctaaacagaaattagatccggcagcttctgtgactggttcaaagagacagccacggacccctaagggtaaggctcagccattagaggatctggctggcctcaaagagttgtttcagacacccatttgcactgacaagccaacgacccacgaaaaaactaccaaaattgcatgtagaagtccacaaccggacccagttggcacaccaaccatcttcaagccccagagcaagagatcgctgaggaaagctgatgtggaggaggagtcgctggcactgcgaaagagaaccccgtcagttgggaaggccatggatactcctaagcctgcgggaggagacgagaaggacatgaaggcatttatgggaacacctgtacagaaattggatctcccgggaaatttacctggcagcaaaaggtggcctcagacacccaaagagaaggcccaagctctggaagacctcgcaggcttcaaagagctgttccagacgccaggtaccgataagccgacaacagatgaaaaaacaacgaagatcgcttgtaaaagtccgcagccggaccctgtggacacgccggcatctacgaaacagcggcctaagcggaaccttaggaaagccgatgttgaggaagagttcctcgcactgcgaaagcgaactccaagtgcaggaaaagccatggacaccccaaaacctgcagttagtgacgaaaagaacatcaacactttcgtggagacgcccgtgcagaagctcgatcttttgggcaacctcccgggatcaaaacggcagcctcaaacgcccaaggagaaagccgaggcactggaggatttggtcggattcaaagagctctttcagacgccaggacacactgaggagtcaatgacagatgacaaaattacagaagtcagctgtaagagccctcagccagagagctttaaaactagcagatcatccaaacagagattgaaaatccccctggttaaggttgatatgaaggaggaacctctggccgtttcaaagcttacgcggacctccggtgaaacgacccaaacccacacggagccaaccggcgattcgaaatccatcaaagcgtttaaagagtcaccaaaacaaattttggatcctgctgcgtcggttacaggcagcaggcgacagctgcggacacgaaaggagaaggccagagctctcgaggacctggtggactttaaggagctctttagcgcaccgggtcacaccgaggagtccatgaccatcgataaaaacaccaagataccctgtaaatccccaccccctgagctcaccgacacagcaacatctacaaagcgctgccccaagacaagaccacgtaaggaggtaaaagaggagctttcggcagtggagcgcttaacacagacgtcggggcagtcaacacatacacacaaggaacccgcaagcggcgatgaagggatcaaggtgctcaagcagcgagctaagaagaaacctaatcctgttgaggaagagccgtcccgacgaaggcccagggcaccaaaagaaaaggcacagccgcttgaggatctggccggattcaccgagcttagcgaaacttcgggtcacacccaggagtccctcactgccggaaaggctacaaaaattccctgcgagtcccctcccctggaggtggtagacactaccgccagcactaaacggcacctgcgcacccgcgttcaaaaggtgcaggtgaaggaggaaccctccgcagtcaagtttactcagacttcgggcgagaccacagatgctgataaggaaccagccggagaagataaagggattaaggcacttaaagagagtgctaagcagacacccgcaccagccgcttccgtgaccgggtcaagacggagaccaagggcacccagggaatcggctcaggccattgaggacctcgccggtttcaaagatcccgcagctggtcacaccgaggaaagcatgaccgacgacaagacgacgaagattccctgcaaatccagccctgagctggaggataccgcgacgagctctaagcggcgaccaagaactagggcccagaaggtggaagtgaaggaagagctcttggccgtgggcaaactgacgcagacaagtggggagacgacccataccgacaaggaaccagttggcgaggggaaaggaacaaaggcctttaaacagccagcgaaacgaaagctggatgccgaagatgtcatagggtcacgcagacaacccagggctcccaaagagaaggcccagccgctggaagacctggcctccttccaggaactgagccagactccaggacacactgaagagctagctaatggcgcagctgacagttttacatccgctcctaagcagactcccgattcaggcaagccgcttaaaatcagtagaagagtgctgcgggcacctaaggtagagcctgtgggagatgttgtttcgactcgtgatcctgtgaaatctcagtctaagagcaacacgtcattaccgcctcttccgttcaaaagagggggtgggaaggatggttctgtgacgggaaccaaaaggctgagatgtatgcctgctccagaagagatcgtggaggagctccccgcttccaaaaagcaaagagtggcccctcgggctcggggaaagtcctcagagccggtggtaattatgaaaagaagcctgagaacatccgccaaaagaattgaaccagccgaagagctaaattccaacgacatgaaaacaaataaggaggagcacaaactgcaggactctgtgcccgaaaataaaggcatttcactgcggagcaggcggcaaaataaaaccgaggccgagcagcagatcacagaagtcttcgtcttggcagagaggatcgagatcaacaggaatgagaaaaagcccatgaaaacttctcccgagatggatatccaaaaccctgacgacggagctcggaagcccattcctagagataaggtcaccgagaataaacggtgtttaaggtcggcccgtcagaatgaaagctcccagcctaaagttgcggaagagagtgggggtcaaaagagtgccaaggtactcatgcaaaatcagaagggtaaaggggaagctgggaattccgactcgatgtgtttacggtcccggaagactaaatcccaacccgctgcatccacattggaatccaagtcggtacagcgcgtcaccagatccgtgaaacgatgcgccgagaacccaaagaaggcagaggacaacgtgtgcgtgaagaagatccgcactaggagtcaccgagatagtgaagacattta

SEQ ID NO: 27306 - DNA, 9767 bp, synthetic construct
  misc_feature 1..9767: note = Description of Artificial Sequence: Synthetic coding sequence
  source 1..9767: mol_type = other DNA
atgtggccaacacggaggctcgtcacaattaagagaagcggcgtagatggtcctcactttccgcttagcctctctacttgcttgttcggcaggggcatcgagtgcgatattagaatccagctgccagttgtctctaagcagcactgtaagatcgaaatacacgagcaggaagcgatccttcacaacttttcttccactaaccccacccaagtgaacgggtctgttattgacgagcctgtccgcctcaagcacggtgacgtcatcaccataatcgaccggagcttcaggtacgaaaacgaatctctacagaatgggcgaaagagcacagagttcccgagaaaaatccgagagcaggaacccgctcggcgagtgtcccgatccagcttttcatctgaccccgacgaaaaagcgcaggactctaaagcttacagtaaaataaccgaaggcaaggtgtccgggaaccctcaggttcacattaagaacgtcaaagaagattccacagctgacgactcaaaagattccgtcgcacagggcaccactaatgtccattcctctgaacacgctggcaggaacggaagaaacgcggctgatccaatcagcggggatttcaaggaaatcagctcagtgaagctcgtgagccggtacggcgagttgaagagtgtaccgaccacccagtgccttgacaattcaaagaaaaacgagtctcctttctggaaactttacgaaagtgttaaaaaggagctagacgtcaagagccaaaaggaaaatgtcctccagtactgccgaaaatccggcttgcagacggactacgccaccgaaaaggaaagtgcggacggcttgcaaggagagacccagttgttagtgtcccgaaaaagcaggcccaaaagcggcggatccggccatgcagtggctgaacccgcttctcccgagcaagagctggatcagaataaggggaaaggtcgggacgtcgagtcggtgcaaacaccctctaaggcggtgggcgcaagtttcccactgtacgaacctgccaagatgaaaacgcccgtgcaatatagccagcagcagaatagccctcaaaagcacaagaataaagacttatacacaacgggccgaagagagtctgttaaccttggcaaatccgagggattcaaggctggggataagacgctaactcccaggaaactcagcaccagaaatcggactccagcaaaggtcgaagacgctgcggacagcgctacaaagcccgaaaacctcagtagtaaaactcgcggtagcatacctacagacgtcgaggtcttaccgaccgaaaccgagattcataatgaacccttcctaaccctgtggctgacacaggtagagagaaaaatacagaaggatagcctgagtaagcccgaaaagcttggaaccaccgccggacagatgtgtagcggcctcccgggtctcagcagtgttgacataaacaacttcggagacagcatcaatgagtcggaaggaatacctctgaaaagaaggcgcgtgtcattcgggggacaccttcggcctgagttgttcgatgaaaaccttcctccgaatacacctctgaagcgcggtgaggcgccaacaaagcgcaagtctttggtaatgcacactccccctgtgttgaagaaaattatcaaagaacagccccagccctccggtaaacaggagtcgggatccgagatccacgtcgaggtgaaggctcagtcacttgtcatctcaccaccagcccctagcccgagaaagaccccggttgcttctgaccagcgcagacgaagctgcaaaaccgctcctgccagtagctcaaagtcacagaccgaggtgcctaaacggggtggtgagcgcgtggctacatgcctccaacgcgtgtcaatcagtcgcagccagcatgatattttacagatgatatgttcaaaaagacggagtggggcttctgaagccaacctcatcgtagctaagtcctgggccgacgtggtcaaactcggcgctaagcagacgcagacaaaggtgataaaacatggccctcagcggtcaatgaacaaacgccagagacgcccagccacccctaagaagcctgtgggggaagttcactcccagttcagcaccggacatgccaactctccttgtacgatcatcattggcaaggcgcataccgagaaggttcatgttccagctagaccctaccgagtgctcaataatttcataagcaatcaaaaaatggatttcaaggaggacctgtcagggatcgcagaaatgtttaaaactccagtgaaagagcagcctcaactgacgagcacgtgtcacattgccatcagtaacagcgagaatctcctgggcaaacaatttcaaggtacagattcaggagaggaacctctactgcccacaagcgaatcttttggaggaaatgtgttcttctcagcacagaatgcagcaaagcagcccagtgataagtgttcagcctcaccacctttgagacggcagtgtatcagggaaaatgggaatgtggccaaaaccccgagaaacacgtataaaatgacttcattggagacgaaaactagcgacactgagaccgaaccgagtaagacagttagtactgctaaccgttccggcagatcaacagagtttaggaacattcaaaaactccccgtggagtcaaaatccgaagagacaaacactgaaattgtcgagtgtattttgaagcgcggacaaaaagccaccctcctgcagcaacgtagagaaggagagatgaaggagattgagcgacccttcgagacctacaaggaaaatattgagttgaaagagaacgatgaaaaaatgaaagcaatgaagagaagtcgaacctggggacagaaatgcgccccaatgagcgacctgacagacctgaaatctctgccggacaccgagttgatgaaagacaccgccaggggacagaacctgctccagacccaggaccatgccaaggcacccaaaagtgagaaagggaagattaccaaaatgccatgccaatccctacagccagagcctatcaacacaccgacacatacaaagcaacagctgaaagcctcccttgggaaggtgggtgtgaaagaggagctgctggccgttgggaaattcacgagaaccagcggtgagactacacatactcaccgcgaacccgctggagatggcaaatccatccgaaccttcaaagaatcacccaagcagatccttgatccagcagcaagagtgacaggcatgaaaaaatggcctagaacccccaaggaggaagctcagagcctcgaagatctggcagggtttaaggaactattccagacccccggacctagcgaggagtccatgacagatgaaaagacaacaaaaatcgcttgtaaatctccccctccagagagcgtggatacacctacttccacgaagcagtggcctaaaaggagcctcaggaaggcagatgtggaagaggagttcctggcactccgaaaactgacaccctccgccggaaaagcgatgctgacccctaagcctgctgggggtgacgagaaggacattaaagcctttatggggacccctgtgcagaagctggacctcgccggtacccttcccggaagtaaaaggcagctgcaaacccccaaggagaaggcccaggctttggaggaccttgcgggatttaaagagcttttccagacacccggacacactgaagagctggtcgcggcaggcaagaccacgaaaattccgtgcgacagccctcagtctgaccccgttgatacacccactagtaccaaacaacggccaaaaaggtctatccgcaaagctgatgtggaaggagaactgttggcctgcaggaacctaatgccaagtgctggaaaagcgatgcatacgccgaagcccagtgtgggcgaagaaaaagacataatcatttttgttggtacccccgtccagaagctcgatctgactgagaacttaacagggagcaaacgaagaccgcagactcccaaagaggaagcccaggctctagaggacctaacgggatttaaagagctgttccaaacaccaggtcataccgaggaggctgtcgcagccggtaaaaccaccaaaatgccgtgcgagtcttcccctcccgaaagcgccgataccccgacatccactagaagacagcctaagaccccacttgaaaagagagacgtccagaaagagctgagtgcacttaaaaaactgacgcaaacttcgggggaaactactcataccgataaagtaccaggtggggaggataagtcgattaatgcatttcgggagaccgcaaagcaaaagctggacccagctgcctccgtcaccggaagtaagcggcaccctaagactaaggagaaagcccagccactggaagatctcgccggactgaaggaactctttcagactccagtgtgtaccgataaacccacaacccacgagaagaccacaaagatagcctgccgtagtcagcccgatcctgtggacactcctactagctcaaagccccaatccaagaggtcattgcggaaagtggacgttgaggaggagttttttgctctgcgcaagagaaccccctcagctgggaaggccatgcacactccaaaaccagctgtctccggagaaaaaaatatctatgcttttatgggtacccccgtccaaaaactcgacctaaccgagaatctcacaggtagtaagagacgactccaaaccccaaaagaaaaagctcaggccctggaggatttggcaggttttaaggaactgtttcagacccggggacacacagaagagtcaatgacaaacgacaagactgccaaagtcgcttgtaagtcctctcagcccgatcctgacaagaacccagctagcagcaaacgcaggctcaagactagtttgggcaaggtgggcgtgaaagaagagctcctggccgtaggaaaactgactcagacatctggagagacgacccacactcatacggagcctactggggatggtaagtccatgaaggcatttatggagtctccaaagcaaatactggattccgctgcttccctgacgggctctaaaagacagctgcgcacccccaagggcaagtcagaggtacccgaggatctggctggcttcatcgagttgtttcaaacccccagccacacaaaggagagcatgactaatgagaagaccactaaggtgtcttatcgagcgagccagcccgacctcgttgacaccccaacttcctcaaagccacagcccaaacggtcactcagaaaggctgataccgaagaggagtttctagctttccgaaaacagactcctagcgccggtaaggccatgcatactccgaagcccgcagtcggcgaggaaaaagacatcaacacttttttaggcactccagtacagaaacttgaccagcctggcaacctgccaggtagcaaccgcagacttcaaacaagaaaggagaaagctcaggccctggaagaactgacagggtttagagaactgttccagactccctgcaccgacaacccaacaaccgatgagaagactacgaagaagattctttgcaagtcccctcaaagcgacccggctgatacccccaccaacacgaaacaacgaccaaaacgttcgctgaagaaagctgatgtggaagaagaattcttagcatttagaaagctgactccttctgccggtaaggcaatgcacacacccaaggctgcagtcggtgaggaaaaggatataaatacgtttgttggcacccctgtggagaagttggacctgttaggtaatctgcctggcagcaaacggagaccacagacccccaaggagaaagctaaggcactggaggatctcgcagggtttaaagaactctttcagacccccggacacacggaggaatcaatgacagatgacaaaatcacggaggtgagttgcaaatcgcctcagcctgacccagtgaagacacccacatcaagcaagcagcgccttaaaataagccttggtaaagtgggagtgaaagaagaagtgctccccgtaggcaagctgacccaaacaagcggcaagacgactcagactcacagggagactgctggagatgggaagtcgattaaggccttcaaggaaagtgctaagcaaatgttagatcctgctaattacgggacaggcatggaaaggtggccaagaacccccaaggaggaggcacaaagcctcgaggacctcgccggtttcaaagaactattccagacccccgatcacaccgaagagtccactacagacgacaagacaacaaagatagcttgcaaaagcccaccacctgaaagtatggacacccccactagtaccaggaggcgacccaaaacacctctcgggaagcgagacattgtggaggagctatccgcattgaagcagctgacacagaccacgcacaccgacaaagttcccggtgacgaggacaagggaattaacgtgttccgcgaaacagctaaacaaaaactggaccccgcagcctctgtgaccgggtctaagagacagccacggacccccaagggaaaagctcaaccactggaggatctggctgggctcaaggaattgttccagacccccatctgtacagataaacccactacccacgagaaaaccacaaaaatcgcgtgccgcagtccccagccagacccagtcgggaccccaaccatctttaagcctcaaagcaaacgtagtttgaggaaggccgacgtggaggaagagagcctggctctacggaaacggacgccttcggtggggaaggctatggatactcccaagcctgcaggtggggatgagaaggatatgaaagcctttatgggcacccccgtccagaagctggacttaccaggcaatctgccgggttctaagaggtggccccagacacccaaggagaaggctcaggccttggaggatctggccggatttaaggagttgtttcagactcctggtacagataaaccaaccacggacgagaagactactaagatcgcctgcaaaagtcctcagcctgacccggttgacacacctgcgtctactaagcagcggcctaaacgcaacctgcgcaaagccgacgttgaagaagagtttctggccctacgaaagaggacacctagcgctggaaaggctatggatacccctaagccggcagtgagcgacgaaaagaacatcaacaccttcgtcgaaactccagtgcagaagctggacctcctgggcaatctaccaggttccaaacgccagcctcagacacctaaagaaaaggccgaggcgttggaggacctggtcggctttaaagagttgtttcagactccgggacataccgaagagagtatgaccgacgacaaaataactgaggtctcttgcaagtccccccagcctgaatccttcaaaacctcacgcagttctaagcagcgccttaagatcccactggtgaaggtagacatgaaagaagagccacttgccgtgtctaaacttaccaggacaagcggcgaaacgacacagacacatacggagcctacaggggactccaaaagcatcaaggcctttaaggaatcgcctaagcaaatcctcgacccagccgctagtgtcacaggatcccgcagacaactgcgaacacggaaggagaaggcacgggctctggaagacttagttgacttcaaagagctctttagtgcgccaggccataccgaagagtcgatgaccatcgataaaaatactaagatcccttgtaaatcccctccaccagagctgacggacactgccacttccactaagagatgcccgaaaacgcggcctcggaaggaagtgaaggaagagctgagtgcggtcgaaaggctgacgcagacaagtggccagagcacacatacacacaaagaaccagccagcggcgacgaaggcatcaaagtcttgaaacaaagagctaagaagaagccgaaccccgttgaggaggagccaagcagaagaaggccacgggcacccaaagagaaagcacagcccttagaggatttggcgggattcactgagctgtccgaaacctccgggcacacccaggagtccctgacagcagggaaagcaacaaaaatcccttgtgaatcccctcccctggaggttgttgacactactgcgtcgaccaaacgccatctaaggacccgagtgcagaaggtccaagttaaggaggagccaagtgcagttaagttcacgcaaaccagcggagaaacgactgatgctgacaaagagccagcaggtgaggacaagggcatcaaggccctgaaggaatctgcaaagcaaacgccagcccctgcggcttccgttaccggatctcggaggcgcccaagagctcctcgcgaaagtgcgcaggcaattgaagatttagctggattcaaggacccagccgctgggcatacagaagagtctatgactgatgataagacaaccaaaatcccctgcaagagcagtccagaactggaggacactgccactagttccaagcggcgacctaggaccagggcacaaaaggtggaagtgaaggaggagttgctcgcagtaggaaagctgacgcagacatcgggagaaacgactcacacagataaggaacccgtgggagagggaaaggggaccaaggcttttaaacagccggctaagaggaagctcgacgcagaggatgtcattggctcacgccgtcagccccgtgctccaaaagaaaaggcccagccccttgaagacctcgcctcatttcaagagctgtctcagacgcctgggcatacagaagagttggctaatggcgcagccgattcattcacctcggcacccaagcagacccccgactccggcaagcccctgaaaatttcaagacgagtgttaagagctcccaaggtggagcccgtgggagacgtggtgtcaaccagagaccctgtaaagagtcaatcaaagagcaacactagtctcccacctctgcctttcaaacggggaggtggaaaagacggctcggtcactgggaccaaacggctgcggtgtatgcccgcaccagaggaaatcgtcgaggagcttcccgctagcaaaaaacaacgcgtagcccctagagctagaggcaaatcctctgaacctgtggtcatcatgaaacggagcctccgaacttccgccaaacgaatcgaaccggcagaggagctgaacagcaatgacatgaagactaacaaggaggagcacaagctccaagactctgtgcctgagaataaaggaatctcactcagatcgagacgccagaataagacggaggccgagcagcaaattactgaggtgttcgtcttggccgagcgtatagagattaatagaaatgagaaaaagcccatgaaaaccagtccggaaatggatatacagaacccagacgacggagcccgtaaacctatccctcgcgataaggtcaccgaaaataagagatgcctgcgcagcgccagacagaacgaaagcagtcagcccaaggtggcagaagagtccggtggccaaaaatccgctaaggtattgatgcagaatcagaaagggaaaggagaggctggcaactcagacagtatgtgtctgcgaagcaggaaaacgaaatcgcagccagcagcttccactttagaatctaagagcgtgcagcgggtaactagatctgtgaagaggtgtgccgaaaaccccaagaaggcagaggacaacgtctgtgtgaagaagatccgcaccagatcccatcgggacagtgaggatatcta

SEQ ID NO: 27307 - DNA, 141 bp, synthetic construct
  misc_feature 1..141: note = Description of Artificial Sequence: Synthetic coding sequence
  source 1..141: mol_type = other DNA
atgtggccaacgcggcgtctcgtgactattaaaagatctggtgttgacgggccacatttccctttatccctcagtacatgcctcttcggacggcgaaaatgtgtcctccagtgcaccgaatgttctaagacggcaatctag

SEQ ID NO: 27308 - DNA, 1557 bp, synthetic construct
  misc_feature 1..1557: note = Description of Artificial Sequence: Synthetic coding sequence
  source 1..1557: mol_type = other DNA
atgctgcgtgtggtctcctggaatatcaatgggatcaggcgcccactgcagggcgtcgccaatcaagagccttcaaactgcgcagcggtcgcagtcggcagaattttagacgagctagacgcagacatagtctgtttgcaagagaccaaggtgacacgcgacgctctgactgagccattggctatagttgagggctacaatagttacttctccttctccaggaaccggtccggctacagcggggtggcgaccttctgtaaggacaacgctacacctgtcgctgctgaagagggcctctccgggctgtttgctacccagaatggagacgtggggtgctacggaaacatggacgagttcacgcaggaagagctgcgcgcacttgattccgagggcagagcactgctgacgcaacataagatccgcacttgggagggcaaagagaagacactgacgctcatcaacgtatactgccctcacgctgacccaggacggccagagcgtttggtgtttaaaatgcgattttaccgcttgctgcagatacgagctgaagcgcttttagcggcagggagccacgttatcatcctcggggacttaaacactgcacacagacctattgatcattgggacgctgtgaacctggagtgtttcgaagaagaccccggaaggaagtggatggattccttactgtctaacctggggtgtcagagtgctagccacgtcggaccttttatcgatagctaccgctgctttcagcccaagcaggaaggcgcattcacttgttggagtgcagtgacgggcgcaaggcacctgaactacggaagccgtctcgactatgtgctcggggacagaactctcgtgatcgatacgttccaggctagttttttgctgcctgaagtgatgggatccgatcactgccccgtgggggctgtgttgtctgtgtccagcgttccagccaaacagtgccccccattgtgcactcgctttctcccagaattcgccggaacacagctcaagatcctccgtttcttggtcccccttgaacagagccctgttctcgaacagtctacgctgcagcataataatcaaacgcgggttcagacatgccagaataaagctcaggtgcgatccacccgcccacagccttctcaggttggcagctctcgaggacagaagaatctgaagtcctattttcagccaagcccttcgtgtccgcaggcgtctcctgatattgagcttccaagtttacctttgatgagcgccctgatgaccccaaaaacaccggaggagaaagccgtggctaaagtcgtgaaagggcaggcaaagacttctgaggccaaggatgaaaaggagcttaggactagtttttggaagtccgtgctcgccggtccactacgaacacccctgtgtggcggacatcgggaaccctgcgttatgagaactgtcaagaaaccgggaccgaacctgggccgaaggttttacatgtgtgcacgcccaaggggaccgcctaccgaccccagcagcagatgcaatttctttctatggtcccgcccatcatag

SEQ ID NO: 27309 - DNA, 1191 bp, synthetic construct
  misc_feature 1..1191: note = Description of Artificial Sequence: Synthetic coding sequence
  source 1..1191: mol_type = other DNA
atgcctcgggtcaaggctgcacaagcaggccgtcagtcaagtgctaagcggcacttagccgagcagttcgccgtgggtgagattataaccgacatggcaaagaaggaatggaaggtcgggctgccaatcggacaagggggattcgggtgtatatatcttgccgacatgaactcgtcagaatctgtcggaagtgatgccccatgcgtcgtgaaagtggaaccctcggacaatggccctctctttacagagctcaagttctaccagcgggctgccaagccggaacagatacagaaatggatacggacccgtaaactgaagtacctcggagtccctaagtactggggcagcggcttacacgataaaaacggtaaatcctaccgatttatgataatggacaggttcggcagtgacttgcagaagatttacgaggctaatgctaagagatttagtagaaaaacggtactgcagttatctctgaggatcctcgacatactggaatacatacatgaacacgagtacgtccacggtgatataaaggcatccaatctactcctgaactacaagaatcccgaccaagtgtacctcgtggattacgggctcgcgtaccgttactgcccagagggtgtgcacaaagaatacaaggaagaccccaagcgttgccatgacggcaccatcgagttcactagtattgacgctcacaacggagtggctccaagccggaggggcgatttggagatcctcgggtattgtatgatccagtggctaacggggcatctgccatgggaggacaatctgaaagacccaaaatacgttcgtgactctaaaattaggtacagggagaacatcgcctctcttatggataagtgtttcccggagaaaaacaagcctggggaaatcgcgaagtatatggagaccgttaaactcctggattataccgaaaagcccctctacgagaatctgagggacatcctgctgcagggactgaaggctattgggtctaaagacgatggcaaactggacttatcggtggtggagaacggaggactaaaagctaagaccataacgaaaaagcgcaaaaaggaaatagaagagtctaaggagcctggcgttgaagacaccgagtggtctaatacacaaaccgaagaggcgatccaaactcggtcccggacccggaaacgggttcagaagtag

SEQ ID NO: 27310 - DNA, 957 bp, synthetic construct
  misc_feature 1..957: note = Description of Artificial Sequence: Synthetic coding sequence
  source 1..957: mol_type = other DNA
atgccgaagcgcggaaagaaaggtgctgtcgctgaggacggggatgaattgcgaacggaacccgaggccaaaaaatccaaaaccgctgccaaaaagaacgataaagaggccgctggggaggggccagccttgtacgaagatcctccagatcagaagacatccccttccggaaaaccagccaccctgaaaatatgctcctggaatgtggacggtttgcgagcatggataaagaagaaggggctggattgggtgaaagaagaagctcccgatattctgtgcctgcaggaaacaaagtgttcagagaacaaattgccagcagagctccaggagctacctggcctaagccatcaatactggtcagcgccatctgacaaggaaggctactccggcgtcggtctgttgagtagacagtgcccacttaaagtttcctatggcattggtgacgaggaacatgaccaggaggggcgtgtcatagtggcagaatttgactcttttgtcctggtgacggcttacgttcccaacgctggacgcggacttgtacgcctcgaatatcggcaacgttgggacgaggcctttcgaaagtttctgaaaggcttggcatcacggaagccacttgtattatgcggggacctcaacgtcgcacacgaagagatcgatctgcggaatccaaaggggaataaaaaaaatgcgggttttactccccaggaacgtcagggcttcggggagttactccaggctgtccctcttgccgacagtttcaggcacctatatccaaatactccttatgcctacactttttggacctacatgatgaacgccagatccaagaatgtcgggtggcggctcgactatttcttactgtcccacagcctgctcccggcattgtgcgactccaaaatccgcagcaaggcgctcggatctgatcactgccccatcaccttgtacctggccctctag

SEQ ID NO: 27311 - DNA, 792 bp, synthetic construct
  misc_feature 1..792: note = Description of Artificial Sequence: Synthetic coding sequence
  source 1..792: mol_type = other DNA
atgccaaaaaggggtaagaagggtgctgtggcagaagatggggatgagttacgaaccgaacccgaggccaagaagagtaagaccgcggctaagaagaacgacaaggaggccgcaggggagggtccggcactgtatgaagatcccccagatcagaaaacctccccgagcggaaaaccggctactctgaagatttgtagctggaatgtggacgggctccgcgcatggatcaagaagaaagggctggactgggttaaggaagaggcacctgacatactgtgtctccaggagacaaaatgctccgagaataaacttcccgcagaactccaggaactccctggacttagccatcaatactggagtgcgccttctgacaaggaagggtattccggtgttggtctgctgagcagacagtgcccacttaaggtctcttacggtattggcgacgaagagcatgaccaggaaggtcgagtgatcgtggcggaattcgatagcttcgtcctggtcactgcatacgtgcccaatgctggtcgtggacttgtgcgccttgagtaccgacaacgctgggacgaagcattccggaagttcctcaagggtctggccagcagaaaaccactagtgctctgcggggacctgaacgtcgcccacgaggagatcgatctgaggaaccctaaaggaaacaaaaagaacgccggtttcacacctcaggaacgccaaggattcggggagctgctgcaagccgtgccactcgctgattctttccgtcatctgtaccccaatacaccctatgcttag

SEQ ID NO: 27312 - DNA, 957 bp, synthetic construct
  misc_feature 1..957: note = Description of Artificial Sequence: Synthetic coding sequence
  source 1..957: mol_type = other DNA
atgcctaaacggggtaagaagggagcggttgcggaggatggtgacgaactgcgcactgagcccgaggctaaaaaaagtaagaccgcagcaaagaaaaatgacaaggaggctgcgggagaagggcctgcactgtatgaggacccccctgatcagaagacttctccatcaggtaaaccggcaacactgaaaatctgctcctggaacgtggatggactgagagcctggattaaaaagaaggggctggactgggtgaaggaggaagctcccgacattttgtgcttgcaggaaaccaaatgttcagagaataagctcccggctgaactacaagaactgccgggtcttagccaccaatattggagtgctccgagtgacaaggagggctattctggcgttggactattgtcgagacaatgtccactcaaggtgtcctacggaatcggggatgaagaacacgaccaggagggcagagtgatcgttgccgaattcgattcctttgttttagtcacagcatacgtccccaatgccggaagggggctggtacggttagaatacaggcaacgatgggatgaagcttttcgaaagttcctgaagggcctggcatctcgaaaaccgctggtgctgtgcggggacctgaatgtagcccacgaggagatcgacctgcgcaatcccaagggcaacaagaagaatgccggtttcacaccccaggagcggcagggctttggggaactcctccaggcagtgccccttgctgactctttccgtcacctttaccctaataccccctatgcctataccttctggacttatatgatgaacgccagaagcaagaacgtgggctggaggctggattactttctcctgagccacagcttgttgcccgctttgtgtgattcaaaaattagaagtaaggcacttgggtctgaccattgcccaataacactgtacttggccctttag

SEQ ID NO: 27313 - DNA, 525 bp, synthetic construct
  misc_feature 1..525: note = Description of Artificial Sequence: Synthetic coding sequence
  source 1..525: mol_type = other DNA
atgccaaagcgcggtaagaaaggcgcagtagcagaggacggagatgaactccgtaccgagcccgaggccaagaaaagcaagacagcggctaaaaagaacgacaaagaagctgccggagagggacctgccctgtacgaggatcctcccgaccagaaaacctcaccctctggaaagcccgcaactttgaagatctgcagctggaatgtggatggtcttagggcgtggattaagaagaaggggcttgactgggtgaaagaggaggcaccagatatcttatgtcttcaggagaccaagtgctctgagaacaaacttcctgccgaattacaggaactccccggactatctcaccagtactggtctgcgccttctgataaggaaggctattcaggagtgggactactgagcaggcagtgcccacttaaggtttcgtacgggattggggacgaagagcacgatcaagaagggagggttattgtcgctgaatttgatagcttcgttctggtcaccgcctatgtccccaattag

SEQ ID NO: 27314 - DNA, 327 bp, synthetic construct
  misc_feature 1..327: note = Description of Artificial Sequence: Synthetic coding sequence
  source 1..327: mol_type = other DNA
atgcccaagcggggaaaaaagggcgctgtagccgaggatggggacgagctgagaacggagcctgaggctaaaaagagtaagaccgccgcaaagaagaacgataaagaagccgcaggggaaggtcctgcactatatgaagatcctcccgaccagaagacaagtccgtcaggaaagccggctactctaaaaatttgtagctggaacgttgacggactccgagcctggattaaaaaaaaaggcctggattgggttaaagaggaagcccctgacattctgtgtcttcaagagactaagtgtagcgagaacaaactcccggctgagctctag

SEQ ID NO: 27315 - DNA, 441 bp, synthetic construct
  misc_feature 1..441: note = Description of Artificial Sequence: Synthetic coding sequence
  source 1..441: mol_type = other DNA
atgcctaagcggggtaagaagggcgcagtcgcagaagatggcgatgaactgaggaccgagccagaggcgaaaaaaagtaaaacagctgccaagaaaaacgataaagaggcggctggcgaagggcctgccctttatgaagaccctcctgaccagaagacctccccctccgggaaaccagcaaccctgaagatatgcagttggaacgtggacgggctccgcgcttggataaagaaaaaaggcctcgactgggtgaaggaagaagctcccgatattttgtgcctccaggaaaccaaatgtagcgaaaacaaactgcctgctgaactgcaagagctccctgggctgagccatcagtactggtccgctccgtccgataaggagggatactctggcgtgggcttgctgagcaggcagtgcccgctgaaggtaagctatggaatatag

SEQ ID NO: 27316 - DNA, 975 bp, synthetic construct
  misc_feature 1..975: note = Description of Artificial Sequence: Synthetic coding sequence
  source 1..975: mol_type = other DNA
atgttccgatgcggtgggctcgcagctggcgctctgaagcagaagctggtcccgctcgtgcgtacagtttgcgtgcggagccctagacagagaaataggcttcccggtaacctattccagcggtggcatgtgccccttgaacttcagatgacaaggcagatggcaagcagcggggcatccggaggcaagatagataacagcgttctggtgctgattgtcggactgtcaactgtaggggcaggcgcatacgcatataagacaatgaaggaggatgagaaacgctacaatgagcggattagcggactgggtttgacgccagaacagaaacaaaagaaagccgcactgtcggcgtccgaaggagaagaggtaccccaggataaggcgcctagtcatgtcccatttttactcatcggcggtggaaccgcagcgtttgcagcggctcggagtataagagcacgtgatcctggagcaagggtgctcattgtgagcgaggacccagagctgccctacatgaggccacctctctccaaggagctctggttctccgatgaccccaatgtgaccaagacccttaggttcaaacagtggaacgggaaggagcgttcaatctattttcagccgccttccttctatgtgagcgcccaggatctgccgcacatcgagaacggcggagttgctgtcttgactggcaaaaaggttgtccagctcgacgtgcgcgataacatggtaaaactcaacgatggtagtcagatcacctatgagaagtgtctcatcgctactggcggaacccctcgatctctgtctgccatagatcgggctggcgctgaagtgaagagccgcacaacactgtttaggaagattggagacttccgctcattagaaaagatttccagagaggtgaaatccataactatcatcgggggaggatttttgggcagcgaattggcttgcgcgcttggccgaaaagacatttag

SEQ ID NO: 27317 - DNA, 1842 bp, synthetic construct
  misc_feature 1..1842: note = Description of Artificial Sequence: Synthetic coding sequence
  source 1..1842: mol_type = other DNA
atgttccgttgtggtgggttagccgctggcgctctgaagcaaaaattggtcccgctggtgcgaacagtgtgcgtacggagtcccaggcaaagaaatcgcctgcccggtaatcttttccaaaggtggcacgttccccttgagctgcagatgacacgtcaaatggcaagttccggcgcatctgggggtaaaatcgacaacagcgtactggtcctgatagtgggtctgagtacagttggggcaggcgcatacgcctataagactatgaaggaggatgagaagaggtataatgaacgaatctccggcctcggcctgacccctgagcagaaacagaagaaagctgccttgtcggccagtgagggggaagaagtgccacaggacaaggccccttctcatgtccccttcctgctcatcggcggtggtacagcagcctttgctgccgcacgaagtatcagggctcgggatcctggagccagagtgctcatcgtttcagaagacccggagctgccatatatgagaccccctctcagcaaggagctgtggtttagcgatgatcccaacgttaccaagaccctgcgattcaagcagtggaatggaaaagaaagatctatttactttcagccaccatctttttacgtgtccgcccaagaccttccgcatatcgagaacgggggtgtggccgtcctgacaggaaagaaagtggtccaattggacgtgcgtgacaacatggtaaaacttaacgacggatctcagattacttatgagaagtgtctgattgcaaccggcggaaccccaagaagcctttctgcaatcgaccgagctggtgctgaggtgaagtctagaactactctctttcgcaagatcggcgactttcgatccctggagaaaataagccgcgaagttaaatcaatcacgatcatcgggggaggttttctaggctccgagctagcctgcgccctgggcaggaaggccagggcccttggaacggaagtgattcaactctttcccgagaaagggaacatgggaaaaatacttcctgagtacttgagtaattggacaatggagaaagtaagaagagagggtgtgaaagtgatgcctaacgcgattgtgcagagcgtcggggtgtcctccgggaagctactgattaaattaaaggacggaaggaaggtcgaaaccgaccatatcgttgcagcagtgggcctcgaaccgaatgttgaactggccaagacagggggtcttgaaatcgacagcgacttcggagggtttagagtcaacgcggagctgcaggctagaagtaacatctgggtggctggagacgcagcctgcttttacgatataaaactgggtagaaggcgggtggagcaccacgatcacgccgtggtctctggcagactggctggtgagaacatgaccggagctgctaagccttactggcaccagtcgatgttctggtcagacctgggacctgatgtggggtacgaagccattggccttgtggacagtagcctgcctaccgtaggtgtgtttgctaaggccactgcgcaggataacccgaaatccgcaactgagcaatctggaacgggcatccgctctgaatccgagaccgagtcagaagcaagcgaaataacaatcccgccatccacgccagcagtgcctcaggcgcctgtccaaggagaagattatggcaagggagtcatcttttacttgcgggacaaggtcgtggtgggcatcgtgttgtggaatatcttcaacaggatgcctatcgcccgaaagataatcaaggacggcgagcaacatgaggatctcaacgaggtggccaaattgttcaacatacacgaagactag

SEQ ID NO: 27318 - DNA, 1830 bp, synthetic construct
  misc_feature 1..1830: note = Description of Artificial Sequence: Synthetic coding sequence
  source 1..1830: mol_type = other DNA
atgtttcggtgtggtggacttgctgcaggagcgttgaagcaaaagctggtacccctcgtgcgcacggtctgtgtgcggtctccccgacaaagaaaccgactgcccgtggtacagagccaccacctgggcagcccttccaggagcttggcctctacgggtgcctctggtaaggacggcagcaatttggtgtacttcctcattgtgggcgctacagtgactggggctggcgtgtactacgcctataagactatgaaggaagatgagaagcggtacaacgaacggatttctggcctggggctcactccggagcagaaacaaaagaaagcagcactttccgccagcgagggcgaagaggtgccgcaagacaaggccccaagtcacgtgcctttccttcttattggtggaggtaccgccgcatttgccgcagccagaagcattagggctagagatcccggtgccagagtcctgattgtgtctgaagatcctgaattaccctatatgaggccacccctcagcaaggaactgtggttctcagacgatcctaacgtaaccaagaccctgcgatttaagcaatggaatgggaaagagcggtcaatctacttccaacctcctagtttctatgtgtccgcacaagatctgccccacattgagaacggaggggtggcagtgctcacaggtaagaaggtcgtccaactggatgttagggacaatatggttaaactcaatgatggctcgcagattacatatgagaagtgcttgatcgccacgggtggaactcccagatcactttctgcgattgatcgggctggcgctgaggtgaaatcccgaacgacactcttcaggaaaattggagactttcgatcactggagaagattagcagagaggttaagtcaatcacgatcatagggggagggtttctgggaagtgagctcgcctgcgcgctcggacgcaaggcccgagctctggggacggaagtgatacagctgtttccggagaaaggcaatatgggtaagatcctcccggaatatctgtcaaactggacaatggaaaaagtccggagggagggtgttaaagtgatgccgaatgccatcgtgcaaagtgtgggggtttctagtggcaaattactgattaagctcaaggacggaaggaaggtggagacagatcacatcgtggctgctgttggcctagagcccaacgtagaactggctaagacaggtggcctcgagattgactctgactttggtgggttcagagttaatgccgagctgcaggctcggagtaatatctgggtcgcaggcgacgctgcctgcttttacgacatcaaacttgggcgtcgcagggtcgaacatcacgatcatgccgtggtgtcaggcagactggccggagaaaacatgaccggtgccgctaagccgtactggcaccagtctatgttctggtctgacttgggacctgacgtcggatacgaggcaatcggattggtcgattcctccctgcctaccgttggggtttttgctaaggccactgcccaggataatcccaagagcgccactgagcagtccgggactggcattcgcagcgagagcgaaacagagagcgaagcatccgaaattacaatccctcctagtacaccggctgttccacaagccccagtgcagggagaggactacgggaagggggtcattttctatttacgagacaaggtggtcgtcggcattgtgctctggaacatctttaataggatgcctatcgctcgtaaaataatcaaggacggagagcaacatgaggaccttaacgaggtcgcaaaactgttcaacatccacgaggattag

SEQ ID NO: 27319 - DNA, 981 bp, synthetic construct
  misc_feature 1..981: note = Description of Artificial Sequence: Synthetic coding sequence
  source 1..981: mol_type = other DNA
atgttccgctgcggcggactcgctgccggtgccctcaagcagaaattggtcccactcgttaggaccgtatgcgtacggagtccacgccagcgaaaccgcttacctgcccgtgcactcgggaccgaggtcatacagttgtttcctgagaagggaaatatgggcaagatcttgcctgaatacttgagtaattggaccatggagaaggtacggagggaaggagttaaggtgatgcccaatgctattgtccagtccgtaggtgtgtcttctggcaagcttctgatcaaactgaaggatggacgtaaagtcgagactgatcacatcgtggctgccgtgggcctagagcctaatgtggaactcgcaaagacagggggtttggaaatagactcagatttcggcggatttcgcgttaatgcagaactccaggcaagaagcaacatttgggttgccggagacgccgcttgtttctacgatataaagctgggtagacggcgtgtggagcaccacgaccacgccgtggtgtccgggaggctggcaggagagaacatgactggagcagctaagccctattggcaccagagcatgttctggtccgaccttggtccagacgtcggttatgaagcaatcggactcgtggacagctccctgccaaccgtgggcgtgtttgcgaaagccacagcacaagataatccaaaaagcgctacggagcagtctgggactggtatccggagtgagtctgagactgagtcagaggcgtcggagatcaccattccaccatctacccctgccgtcccacaggccccagttcagggggaagactacggcaaaggggtgattttctaccttagagacaaagtggtagtgggcattgtgctgtggaatattttcaatcgcatgccaattgccagaaagatcatcaaggatggcgaacagcatgaggatcttaacgaagtggctaaactgttcaacattcacgaggactag

SEQ ID NO: 27320 - DNA, 786 bp, synthetic construct
  misc_feature 1..786: note = Description of Artificial Sequence: Synthetic coding sequence
  source 1..786: mol_type = other DNA
atggagaaagtacgcagagagggggtgaaggtaatgccaaacgctatagtccaatcagtcggcgtgagctccggaaagctgctgataaaattgaaagatggaagaaaggtcgaaactgatcacattgtggctgcagtaggattggagcccaatgtggagctagctaaaactggcggtctggaaattgattccgactttggcggatttagagtaaatgcggaattgcaagccagaagcaacatctgggtggccggtgacgctgcatgtttctacgacatcaagttgggtcgcagaagggttgagcaccacgatcacgctgtagtcagcggtcgcctggctggagaaaacatgacaggagcagctaagccgtactggcaccaatccatgttctggagcgacctgggaccagacgttggctacgaggcgatcggtctggtagactcgtctctgccaacagtcggggtgttcgccaaagcaacagcacaggacaaccctaagagcgccacagagcaaagcggtacaggaatccgttcagaatccgaaaccgaaagcgaggcttccgagataacaattcccccatcaacacccgctgtgccacaggccccagttcagggggaggactacggtaagggagtaattttctacctccgcgacaaggtggtggtgggcatcgtgctttggaacatctttaatcggatgcccatcgcaagaaagatcatcaaggatggcgaacagcacgaagatcttaacgaagtggctaagctgtttaatatccatgaggactag

SEQ ID NO: 27321 - DNA, 825 bp, synthetic construct
  misc_feature 1..825: note = Description of Artificial Sequence: Synthetic coding sequence
  source 1..825: mol_type = other DNA
atggggaaaatcctgcccgagtacctgtcaaattggacgatggagaaggtcaggcgcgagggagtaaaagttatgcccaatgccatagttcaaagcgttggtgtaagctcaggcaaacttcttattaaactcaaggatggcaggaaggtggaaacagatcatatagtggccgctgttggtctggagccgaatgtggagttggccaagacaggtggcttggagatcgatagtgacttcggcggtttcagggtaaacgccgaactccaagctagatcaaacatttgggtagctggcgacgcagcgtgtttttacgacataaagctcggccgaaggcgggtggagcatcacgatcatgccgtggtatccggtcgcctggccggagaaaatatgacaggcgctgccaaaccctattggcaccagagcatgttctggtctgatcttggaccagatgtgggctatgaagctatcggcctggttgactcgtcgctgcccactgtgggggtgttcgcaaaggctaccgcccaggacaaccctaaaagcgcaaccgaacagtccggcacaggaattcgttcagaatctgaaaccgaaagcgaagcctctgagataacgattcctcctagtaccccagcggtgccacaagctcccgtgcagggcgaggactatggtaagggagtcatcttctacctccgcgacaaagttgttgtgggaatcgtgctatggaacatcttcaatcgtatgccaattgctaggaagattattaaggatggagaacagcatgaggacctcaatgaagtggccaaactcttcaacattcacgaggactag

SEQ ID NO: 27322 - DNA, 714 bp, synthetic construct
  misc_feature 1..714: note = Description of Artificial Sequence: Synthetic coding sequence
  source 1..714: mol_type = other DNA
atgaaggaggatgaaaagcgttataatgaaagaatctccggcttaggtctgacacctgagcagaagcaaaagaaggccgcactcagtgccagtgagggtgaggaggttccacaagacaaggcgcctagccacgttccatttcttctgatcggtggcggaactgcggcatttgcggcagctcgtagcatccgggcacgagaccctggtgccagagtgttgatcgtgtcagaagatcctgagctcccgtacatgagacctcctctatccaaggagctgtggttcagtgatgaccccaacgtgacaaaaaccctgagattcaagcagtggaatggaaaggaacgttctatctactttcagcctccctcattttacgtgtccgctcaagatcttcctcacattgagaatggaggtgtagcagtgttgaccgggaagaaagtggtccagctggacgtcagggataatatggtcaaacttaatgacggatcgcagataacctatgagaagtgtttgatagctacggggggtactcccagatccctcagtgccatcgatcgcgctggagccgaagttaagtccagaactaccctattccggaagattggagatttccgttctctcgaaaaaattagtcgggaagttaagtccatcaccatcatcggagggggatttcttggatccgagctggcatgcgcccttggacgcaaggatatttag

SEQ ID NO: 27323 - DNA, 1017 bp, synthetic construct
  misc_feature 1..1017: note = Description of Artificial Sequence: Synthetic coding sequence
  source 1..1017: mol_type = other DNA
atggatgccaaggcacgcaactgtttgctacaacatagagaagcccttgagaaggatattaaaaccagttatataatggaccacatgatctccgatgggttcctaactatctctgaagaggagaaagtaaggaacgaaccaactcagcagcaaagggccgcaatgctcattaagatgatcctgaaaaaagataatgattcatacgtctctttttataacgccctgctgcacgaggggtataaggacctggctgctctcctgcatgacggaattcccgtagtttccagctctagcggaaaggattctgtgtctggaatcaccagctacgtgcgaactgtgctgtgcgaagggggtgtgccccagcgccctgtggttttcgtgacccgcaagaagctcgtgaacgcgatccagcagaagctgtccaagctcaaaggggagcccggttgggtcacaattcacggcatggccggttgcggaaaatcagtgctggccgctgaggccgttcgggaccacagcctcttggagggatgcttccctgggggtgtgcactgggttagcgtgggtaaacaggataagagtgggctgctgatgaaactgcagaatttgtgcaccagactcgatcaggatgaatctttctcccagagactccccttaaacattgaggaagccaaagacagacttcgaattttgatgcttcggaagcaccctaggagtctcctgatccttgacgacgtgtgggatagctgggtgctgaaggcatttgactcccaatgccagatcttgcttaccacaagagacaagagcgtgacggactccgttatggggcctaagtacgtggtccctgtggaatcatccttgggaaaggagaaaggattagagatactctccctgttcgtaaatatgaagaaagccgacttacctgaacaggcccacagtatcatcaaggagtgtaaagtagtggagcgatgccactggggtattctgacggacctcctgcacaaatggaatcagagctag

SEQ ID NO: 27324 - DNA, 3492 bp, synthetic construct
  misc_feature 1..3492: note = Description of Artificial Sequence: Synthetic coding sequence
  source 1..3492: mol_type = other DNA
atggacgccaaggcaaggaattgtttgctgcagcatagggaagccctggaaaaagatattaagacaagttacattatggatcacatgatatctgatgggtttttgacaatttcagaggaggagaaggtgcggaatgagccgacacagcagcagcgtgccgctatgctgatcaagatgatcctgaaaaaggacaacgatagctatgtgagcttctacaacgccttgctgcatgaagggtataaagatctggcggctctgctccatgatggcatccccgttgtgtcctctagcagcgggaaggatagtgtttctggaattaccagctacgtgaggacagtgctctgtgagggcggtgtgccgcaacgtcccgttgtttttgtcaccaggaaaaaactggtaaatgccattcagcagaagctaagtaagcttaaaggggaaccagggtgggtgacgattcacggcatggcgggttgcggcaaaagcgtcctcgcagcagaagcagtgagagaccattctttgctcgaaggatgcttcccgggaggagtccactgggtgtccgtaggcaaacaagacaaaagcggcctgctgatgaagcttcaaaatctgtgcacaagactcgatcaagatgaatcatttagccagcgactgccactcaatattgaagaggctaaggaccgcctgagaatcctgatgctgcgcaagcatccccgaagtctgctgattcttgacgacgtctgggatagctgggtactgaaagccttcgattcacagtgccaaatcctacttacaacaagggataaatctgttaccgatagcgttatgggaccgaagtacgtggtgcccgtcgagtcttcactgggtaaagagaaggggttggagatcttatctctgtttgtaaacatgaagaaggccgatttacccgagcaggcacatagtatcattaaggaatgtaaaggctcccccctggtggtctcattgattggtgccctgctccgcgatttccctaaccgttgggagtattatcttaagcagctgcaaaataagcagttcaaaagaatccggaagtcttcatcatatgactatgaggcactcgacgaggcaatgtcaatctcggtggagatgctgagagaggacatcaaggattactataccgacctatcaattctccagaaggatgtaaaagtgcccaccaaggtgctgtgcatcctgtgggacatggaaactgaagaggtggaggacattctacaggagttcgtaaataagtcactgctcttttgtgatcgtaatggaaagagctttagatattacctgcacgacttgcaggtggatttcttgactgagaaaaattgtagccagttacaagacctgcacaaaaaaatcattacacaattccagcgctatcaccagcctcatactctatctcctgatcaggaggactgcatgtactggtacaattttctggcctaccatatggcgtcggctaaaatgcataaagaactatgcgcgctgatgttctctctggactggattaaagcaaaaactgagctcgttggacctgcccacctgattcatgagtttgtcgaatacagacacatcctcgatgagaaagactgtgcagtatccgagaatttccaggaattcctctcactgaacggtcacctccttggtcgccagcccttcccaaatatagtgcaactgggtctttgcgaaccagagacatctgaggtatatcagcaagccaaactacaggctaaacaagaggtcgacaatggaatgctatacctggaatggatcaacaaaaaaaacatcaccaacctttcgagactagtagtgaggccgcacacagatgccgtgtatcacgcctgcttcagcgaggatggtcagcgaatagcctcttgtggcgctgacaaaacactgcaagttttcaaggccgagaccggcgagaagctgctagaaattaaagcacacgaggacgaagtgctttgctgtgccttcagcacggacgaccggttcattgccacttgttctgtggataagaaagtcaaaatctggaactcaatgaccggagagctcgtccacacctacgacgagcacagtgaacaggtgaactgttgccatttcacgaatagctcccaccatcttctgctagcaaccggatcctcagattgtttcctcaagttgtgggacctgaaccagaaagaatgccgaaatacaatgttcggtcacaccaactcagtgaaccattgccgcttttctccagacgataaactcttggcgagttgttctgctgatggaacattgaagctgtgggacgctaccagcgcaaacgagaggaagtcaattaacgtgaagcaatttttcctcaatttagaggacccacaggaggacatggaggttatcgttaagtgctgtagttggagcgccgacggggctcgaatcatggtggcagctaaaaacaagatattcctgtggaacactgattctcgatccaaggtggctgattgccgtggtcatctcagctgggtgcacggggtgatgttctcccccgacgggtcatcctttctgactagctcagatgatcagacaatccggctctgggagacaaaaaaagtgtgtaagaactccgcagtgatgttgaagcaggaagtggacgtggttttccaagaaaacgaagtcatggtgctggccgtcgatcatatcagacggctgcaacttatcaatggacgcacaggacaaattgattatcttacagaggcacaagtatcttgttgctgcctatcgccccacctgcagtacatagcttttggcgatgaaaacggcgcaatagaaattctggaacttgtgaataaccggatctttcagagccggttccagcacaaaaagaccgtgtggcacattcagttcactgccgatgagaagaccctaatctcatcttcagatgacgctgagatccaagtgtggaattggcaactggataaatgcatatttctcagaggacaccaggaaactgttaaggatttccgcctactgaaaaattcccggctgctcagctggagcttcgacggaacggtgaaagtgtggaacatcatcaccggcaacaaagagaaggactttgtgtgccaccagggtacagtgctgtcgtgcgacatcagtcatgacgcaactaagttcagcagtacatccgccgataagactgctaagatttggaacgtaagcaacggcgagctgctgcatctttgcgcaccactctccgaagagggtgccgcaactcacgggggttgggtgacagacctctgtttctccccagacggcaagatgctgatctctgccggaggctatataaagtggtggaacgtggtgaccggcgagagcagccagaccttctatacaaatggcacgaacttgaaaaagatccacgtcagcccggatttcaagacatacgtgacagtggacaacttggggattctatatattttgcagaccctggagtag

SEQ ID NO: 27325 - DNA, 3618 bp, synthetic construct
  misc_feature 1..3618: note = Description of Artificial Sequence: Synthetic coding sequence
  source 1..3618: mol_type = other DNA
atggacgccaaggccaggaattgccttttgcagcatcgggaggcactagaaaaggatataaagacatcatacatcatggaccacatgatctccgatggcttcctcaccatttcagaggaggagaaagttcggaatgagccaactcaacagcaacgggcagcaatgctgatcaaaatgattctgaagaaagacaacgatagttatgtgagtttttataacgcacttctgcatgagggatataaggacctcgccgctcttctgcatgatggaatcccagttgtatcttcttcatcaggaaaggacagtgttagcggtatcacctcctatgtgcggacagtactatgtgagggaggcgtgccacaaagacctgtggtgtttgtgaccagaaaaaagcttgtgaacgcaatacagcagaagctcagcaaactgaagggcgagcccggttgggtgactatccatgggatggctggctgcggtaagagcgtgctcgctgcagaggcggtcagggaccactctcttttggagggatgctttcccggaggcgtacactgggtgagcgtaggtaagcaggataaatcgggattgctcatgaagctgcagaatttgtgtacacgactggaccaggacgagagcttctcacagagactccccctgaacatcgaagaagctaaagatagactcagaatcctgatgttaaggaagcacccaaggagcctgcttatcctggatgacgtttgggattcctgggtgctgaaggcattcgactcacaatgccagattctccttactacccgcgacaagagtgtgacagactctgtgatgggcccaaagtatgtggtgccagtggaatcgtctttggggaaggagaagggactggaaatcctgtctctctttgtgaatatgaagaaggccgacctcccagagcaggctcacagtataatcaaggaatgcaaggggtcccctttggtcgtgtcacttatcggcgctttactgcgcgacttccccaataggtgggaatactacctcaaacagctgcagaataaacagtttaagcgaataagaaaatcctcatcttatgactacgaggctttggacgaggccatgtccattagtgtagaaatgctccgtgaggatattaaagactattatacagatcttagcattttacaaaaggacgtgaaggtgcctaccaaagtcctgtgtatcctgtgggatatggagactgaagaggtagaggatatcctccaggaatttgtgaataagagcctgttattttgtgatcggaacggcaaaagctttcgctactatctgcacgacctgcaggtggactttctgactgagaaaaattgtagtcaactgcaagacttgcataaaaagattattacccagttccagagataccatcagccccacactctgagcccggatcaagaagattgcatgtattggtataatttccttgcctaccatatggccagcgcgaaaatgcacaaggagctgtgcgcactgatgttctcgctcgattggataaaggccaaaactgagttggtgggccctgcacacctcatccacgagtttgtggagtaccgccacattttagatgagaaagattgtgccgttagtgaaaactttcaggagtttctgagcctcaacgggcaccttctgggcaggcagccatttcccaatatcgttcagctagggctatgcgaaccagagaccagcgaagtttatcagcaggccaagctgcaggctaaacaggaagtggacaatggcatgctgtatctggagtggataaataaaaagaatattacgaatttgtcacggctggtggtcaggcctcatacagatgctgtgtaccacgcatgtttctccgaagatgggcaacgcatagcttcctgcggcgctgataaaacattgcaggtattcaaagctgagaccggcgagaagctgctggagatcaaggcacatgaggatgaggtgctgtgctgcgcattcagtaccgatgaccgattcattgcaacctgcagcgtggacaaaaaagtcaagatttggaatagcatgacgggcgaactcgtgcatacatacgacgagcatagtgagcaagtgaattgttgccacttcactaatagtagtcaccatttgttactcgctacaggcagttcagactgctttttgaagctttgggatctcaaccagaaagaatgcagaaacaccatgtttggacatacaaattccgtgaatcattgcaggttctcccctgacgataaactattggcatcttgcagcgcagacggtaccctgaaactgtgggacgcaacgtccgccaatgaaaggaaatccatcaatgtgaagcaattctttctgaacctggaggacccgcaggaggacatggaggtaatcgtcaagtgttgtagctggtccgcagacggtgctagaattatggtagccgcaaagaacaagatcttcctgtggaataccgacagccggtctaaggttgccgactgccgcggtcatttgagttgggttcacggagttatgttcagcccggacggcagctcattcctcactagctccgatgaccaaacaatacggctgtgggaaactaaaaaagtctgtaaaaactctgcggtgatgctgaagcaggaggtggacgtcgtatttcaggaaaatgaagtgatggtattggccgttgatcacatccggaggcttcagctgatcaacggacggactggtcagatagactacctgactgaagcccaagtatcttgctgctgcctatctccacacttacagtacattgcattcggtgatgaaaacggggctatcgaaattctggaattggtgaacaaccgtatcttccagtcccgctttcagcacaaaaagactgtctggcacatccagttcaccgcagacgaaaagacgctgatctcttcttctgatgacgccgagatccaagtgtggaattggcagctggacaaatgcatttttctccgtggtcaccaggagaccgtcaaggactttcgtctgcttaagaacagccgcctgttgagttggtcttttgacggtaccgtcaaggtttggaatataattacgggcaataaggaaaaggacttcgtgtgtcatcaaggtacagtgctatcatgcgacatttcccacgatgctaccaagttttcttctacatccgctgacaagaccgccaaaatatggtctttcgatctgctgctccccttgcacgaactcaggggccataatggttgcgtccgctgttccgcattcagtgttgacagcactctgctggctaccggtgatgataacggcgaaatacgaatctggaacgtaagcaacggcgaacttctccacctgtgcgcaccactatctgaggaaggggctgcaactcacgggggatgggtcaccgatctgtgcttctctccggatggcaagatgctcatatcggcaggcggatatatcaaatggtggaatgtggtgaccggggaaagctctcagacattctatacgaatggtacaaatctcaaaaagatccacgtctcccccgattttaagacctacgttacagtagacaacctcggcatcctgtatatcctgcagaccctggagtag

SEQ ID NO: 27326 - DNA, 3585 bp, synthetic construct
  misc_feature 1..3585: note = Description of Artificial Sequence: Synthetic coding sequence
  source 1..3585: mol_type = other DNA
atggacgcaaaagccaggaattgtctactccagcacagagaagctctagaaaaagatattaagacttcctatatcatggaccatatgattagcgatggcttcctgacaatctctgaggaggagaaggtgcggaacgagcctacacaacagcaacgtgctgccatgctcataaagatgatccttaaaaaagataatgattcctacgtttccttttataatgcgctgttgcacgagggttacaaggatttggcagctctccttcatgacgggatccctgttgtctccagtagctcagtcagaacagtcctctgcgaaggcggtgtccctcagagacctgtggtattcgtgacccgaaaaaagctggtgaacgcaatccagcaaaagctctccaagttgaaaggcgagccagggtgggtaacgattcacggaatggccggttgtggtaagagcgtcctggccgcagaggccgtcagagaccactcccttcttgagggctgcttcccgggaggcgttcactgggtgtccgtgggaaagcaagataaatccggtctgctcatgaagctccaaaacctttgcacacgattggatcaggacgagtctttttcccagcggctccctctgaatatcgaggaagccaaagatagacttaggatcctaatgttaagaaagcacccccgatcgttactgatcctggatgacgtctgggactcctgggtgcttaaggctttcgactctcaatgccagattcttctcacaacacgagacaagagtgtcaccgattccgtgatggggccaaaatacgtggtaccggtggaatctagcctcgggaaggagaaagggctggaaattctctcactcttcgtgaacatgaaaaaggcggatctgccagaacaggcccattcgatcattaaggaatgcaaaggaagccctcttgtcgtctccttgatcggtgcccttcttagagactttcccaataggtgggaatattatctgaaacagctgcaaaataagcagtttaagcggatcagaaaaagcagctcttacgactacgaggcactagacgaggctatgtccatttcagtcgagatgcttagagaggatataaaggactattatactgacctgtcaattctgcaaaaggacgtcaaagttcccaccaaggtgctgtgtatcctctgggacatggagactgaagaagtggaggatatcctgcaggaatttgtaaacaagagccttttattttgcgaccggaacggaaagtcttttcggtactacctgcatgatttacaggtagactttctgaccgagaagaattgttctcagctccaggatctacacaaaaaaatcatcactcagttccaaagatatcaccagccccacactctatcccccgatcaggaggactgcatgtactggtacaatttcttggcataccacatggcaagcgctaaaatgcacaaggagttgtgcgcgctaatgttctctctcgattggattaaagccaaaactgaactggtaggcccagcccatttgattcatgagtttgttgagtaccgccatattcttgatgagaaggactgtgccgtatctgagaacttccaggagttcctaagcctaaacgggcatctcctaggtcgccagcctttcccaaacattgttcagctgggtctgtgtgagccagagacatccgaggtttaccagcaggctaagcttcaggcaaagcaggaagtcgacaacggtatgctttacttagaatggattaataaaaagaacattacaaacctttctcggctggttgtgcgtcctcataccgacgctgtgtatcacgcttgttttagtgaggatgggcagcgcattgcctcgtgtggtgctgacaagacattgcaagtgtttaaagctgagacaggggagaagttgctagagatcaaggctcatgaggatgaggtgttgtgttgtgctttttccaccgacgacagattcattgccacctgcagtgtggacaaaaaagttaagatctggaactctatgaccggcgagttggtacacacctacgacgagcacagcgaacaggttaactgttgtcatttcacaaattcctcccaccatttgctgctggccaccggttcatcagattgttttctaaagctttgggacttaaaccagaaggagtgtagaaataccatgttcggtcacacaaactcagtcaaccattgtcgtttctcacctgatgataagctcctggcctcttgcagcgctgatggtacactcaaactgtgggacgccaccagcgcaaatgagcgcaagtccatcaacgtaaaacaattcttcctgaatttggaggatccacaggaagatatggaggtcattgtgaagtgttgcagttggtctgccgatggggcacgcatcatggtcgctgcgaaaaataagatctttctttggaacaccgattcccggagcaaggtggctgattgtcgagggcatctcagctgggttcacggtgtgatgttttcacccgacggctcctcctttctgacatcttctgacgatcagacaatccgcctttgggaaacaaagaaagtttgtaagaatagcgcggtcatgctaaaacaggaagtagacgtagtttttcaggagaacgaggttatggtgctcgcggtcgatcacatccgcagactgcaacttattaacggccgaactggccagatcgactacctgacagaggcccaggtgagttgctgttgtctctcgcctcacttgcagtatattgcatttggcgacgagaatggcgctatcgagattctggaactggtgaacaatagaatcttccagagccgattccagcacaagaaaacagtttggcatattcaatttactgcagatgaaaaaactctcatcagcagtagcgacgacgcagaaatccaggtttggaactggcagctggataaatgcatcttcctacgcggtcaccaggaaactgtcaaggactttagattgttgaagaatagccgtctgctcagctggtcattcgatggcaccgtgaaagtctggaacataataactggcaacaaggaaaaggactttgtgtgtcaccagggcacggtcctgagttgcgacatttcacatgacgcgacaaaattttcaagcacttccgctgataaaactgcaaagatctggtcttttgatctgctgctgcccttgcatgagctgcgtgggcacaacggatgtgtgagatgctctgcattttctgtggattcgacgctgcttgcaacaggcgacgacaacggggagattcgtatatggaatgtttctaacggcgagctgctacatctctgtgctccattatcagaggagggggcagcaacacacgggggatgggttacagatctgtgcttcagccccgacggaaagatgctgatatccgctggcggatacataaagtggtggaatgtggtaactggagaatcgtcacaaaccttctacacaaacggaacaaatcttaaaaagattcacgtgtcacccgatttcaaaacctacgttaccgttgacaacctggggatcctatatattctgcagacactcgagtag

SEQ ID NO: 27327 - DNA, 3618 bp, synthetic construct
  misc_feature 1..3618: note = Description of Artificial Sequence: Synthetic coding sequence
  source 1..3618: mol_type = other DNA
atggatgccaaggccaggaattgcctgctccagcatcgagaggccctggagaaagatatcaagacctcctacatcatggatcatatgatcagcgacggcttcctgacaatttccgaggaggaaaaagtcaggaatgagcccactcagcagcagcgcgctgccatgctaattaagatgatcctgaagaaagataacgactcttatgtatccttctataatgctctcctccacgagggctacaaagatctggctgctctgctgcatgacggcatccccgtcgtgtcttcctcatcaggtaaagactcagtgtccggtatcacttcttacgtgcggaccgtactttgcgaaggaggggtgcctcaacggccagtcgtgttcgtgacgagaaaaaaactcgtcaacgcgatccaacagaaacttagcaagctgaagggtgagcctggctgggttacaatccacgggatggctggttgcggaaaatcagtgctcgcagctgaggctgtgagagaccattccttgttggaggggtgcttcccaggtggcgttcactgggtcagcgtgggtaaacaggataagtcaggattgcttatgaaactgcagaatctgtgcactaggcttgaccaagacgagtcattcagtcaacgcctgccactgaatattgaggaagcaaaagataggcttaggattctcatgcttagaaagcaccctcgatccctcctgattttggatgacgtttgggatagttgggtgttgaaggcctttgattcgcagtgccaaattctactgactacccgtgacaagagcgttaccgacagcgtcatgggcccaaagtacgtcgtgccagttgagtcctcgctgggtaaagagaaagggctggaaatcctgtcactgttcgtgaatatgaaaaaagccgatctgcccgagcaagctcactcgatcatcaaagagtgtaagggcagccccctcgtcgtcagcctgatcggcgcactgctgcgcgatttccccaataggtgggagtattatctgaagcagttgcagaacaaacagtttaagcggatccgtaagagctcgtcctacgattatgaagccctggacgaagctatgtcgatcagcgttgagatgttgagggaagacataaaagattactataccgatttatccatccttcaaaaagatgtgaaggtccccacaaaagtcttgtgtatcctgtgggatatggagaccgaagaagttgaagatatcctgcaggagtttgttaacaagtctctcttgttctgcgacagaaatggcaagtcatttcggtattaccttcacgatctgcaggtggacttccttacggagaaaaactgcagtcaactgcaggatcttcataagaaaataatcacacagttccaacgatatcaccagccacataccctgagtcccgaccaggaggattgcatgtactggtacaacttcctggcttaccacatggcttccgccaagatgcacaaggagctctgtgcactgatgttcagtcttgactggattaaagcgaaaaccgagctggttggacctgcacatctcatccacgagtttgttgaatatagacacatccttgacgaaaaggattgcgcagtttcagaaaattttcaagaatttctgagtctgaatggccacttgttaggtcggcaaccattcccaaacatagttcagctgggactgtgcgaacccgaaactagtgaggtgtaccaacaggcaaagctgcaggctaaacaggaagtcgacaatggcatgctgtacttagagtggataaacaagaagaatatcactaacctgtccagactggtcgtcagacctcacaccgatgccgtatatcacgcctgcttttccgaagacggtcaacgcattgcctcctgcggggcagataagactcttcaggtcttcaaggccgagacgggcgagaagctcctggagattaaagcccatgaggacgaggtcctctgctgcgccttcagcaccgacgataggtttatcgccacttgtagcgtggataagaaagttaagatctggaatagcatgactggtgaactagtccatacttacgatgagcacagcgaacaagtcaattgttgtcattttaccaactcctcacaccatctgttgcttgccaccgggtcctccgattgctttctcaagctttgggacttaaatcagaaggaatgtcgcaacacaatgttcgggcacacaaactccgtcaatcactgtcggttttcaccagacgacaagctgcttgcctcctgctccgctgacggtaccctgaaactctgggacgcgactagtgccaatgagcggaaatcaattaatgtgaaacagttctttcttaatctggaggatccacaggaagacatggaagtgattgtcaagtgttgttcttggtccgctgacggcgcacgcatcatggttgctgctaagaataagattttcttgtggaacactgactccaggtcaaaagtggccgattgccggggacacctttcatgggtgcacggggtgatgtttagtccagacggctcctcattcctgacttcctcagatgatcagactatcaggctctgggagacaaagaaggtctgtaaaaacagcgctgtcatgctgaaacaggaagtggacgtggtcttccaagaaaacgaggtgatggtgctcgccgtggatcatatccgacgtttgcagctgatcaacgggaggacaggccagatagattacctcaccgaagcccaggtgtcctgttgttgcctcagcccccacctgcagtacatcgccttcggggacgagaatggggcaatcgagatcttagaactggtgaataatcgtatcttccaaagccggtttcagcacaagaaaactgtctggcacatccagtttacagctgacgaaaagacccttatcagtagcagcgatgacgctgagattcaggtgtggaactggcagctggataagtgtatatttcttcggggacatcaggagacagtgaaggactttcgcctccttaaaaatagtaggctcttaagctggagctttgatggcacggtgaaggtgtggaacatcattaccgggaataaggagaaggacttcgtgtgccatcagggcacggtcctgtcttgcgacatctcgcatgacgccaccaaatttagcagcacctccgcagacaaaacagcgaagatatggagctttgacctattactcccattgcatgagttgagaggccacaacggttgtgtgagatgctcagctttctcagtggattcaaccctgttagccaccggcgatgataatggcgagattcggatatggaacgtgagcaatggtgagttactgcacttatgcgcccctctgtctgaagagggggcagccactcatggcggatgggtcacagatctgtgcttttctccagatgggaagatgctgatcagtgccggtggctatatcaagtggtggaatgtggtgacgggagaatcctcacagactttttacacaaatggtactaacctgaaaaagatccacgtgtctcccgactttaaaacatacgtaacagtggataaccttggtatcctgtacatcttacagacactggagtag

SEQ ID NO: 27328 - DNA, 3492 bp, synthetic construct
  misc_feature 1..3492: note = Description of Artificial Sequence: Synthetic coding sequence
  source 1..3492: mol_type = other DNA
atggacgctaaagcaagaaattgcctgcttcagcacagggaagctctggaaaaggatattaagacttcctacataatggaccacatgatcagtgatggatttctaaccattagcgaagaggagaaggttagaaacgagcccacccaacagcagcgggctgccatgctcatcaaaatgatactcaagaaggataacgacagctatgtttctttctacaatgctttgctccatgaaggctacaaggatctcgcagcgctgctgcatgacgggattccagtggtgtcttcttcctctggaaaggatagcgtgagcggcatcacatcttatgtgaggactgtcctgtgtgaggggggagtgccacagcgtcccgtcgtgttcgtgacacggaagaagctggtaaacgcaattcagcagaagctgagcaaactgaaaggggaacctggatgggtcaccatccacggtatggcagggtgcggtaaatcggtgctggctgccgaagcagtccgcgaccatagtctcctggagggatgctttccagggggagttcattgggtctccgttggcaaacaggataaatccggccttctgatgaagctccaaaacctctgtaccaggctggatcaggacgagagctttagccaacggcttcccctcaatatcgaagaggccaaagacaggctgcggatcttaatgttgagaaaacatcccagatctttattaatcctggacgacgtgtgggactcctgggtgctcaaagcattcgacagccagtgtcaaatactgctcactacgcgcgataagtctgttacggatagcgtaatggggcctaaatatgtagtacccgtggagtccagtctgggtaaggagaagggacttgaaatcctctctctttttgtcaacatgaaaaaagcagacctgcctgagcaggcacattcaatcatcaaggagtgtaaggggagtccactggtggtcagcctcattggcgctctcctcagggacttccccaaccgatgggaatactacctcaagcagttgcaaaataagcaattcaaaaggattcgtaaatcttctagttatgattacgaagccctggatgaggccatgtctatttctgttgaaatgttgcgggaggatattaaggactactatacggacctatccatactgcagaaggacgtgaaggtgcctacaaaggtcctgtgtatcctttgggacatggaaaccgaggaggtcgaagacatcctgcaggaatttgtaaacaagtctttacttttttgtgatcgtaacggaaaaagttttaggtactacttacatgacctgcaagtggactttctcactgaaaaaaactgttcacaactgcaggatctgcacaagaagatcattacacaattccagagataccaccaaccgcataccctttcccctgaccaggaggattgcatgtactggtacaatttcttggcctaccatatggctagcgccaagatgcacaaggaactttgcgccctgatgttttccctagactggatcaaggccaaaaccgagctggtcggtcccgcacacctgatccacgagttcgtcgagtacaggcatattcttgacgagaaagattgcgcagtctccgaaaacttccaggagttcctcagtttaaatggccatctcttaggaaggcagcctttcccaaacatcgtccagctgggactttgtgagccagaaacttcggaggtctaccagcaggccaagttacaggccaaacaagaagtggacaacgggatgctgtatctggagtggataaacaagaagaatatcacaaacctgagccgactcgttgtccgaccacataccgatgccgtataccatgcctgtttctccgaggatggccagagaattgcctcttgcggcgcagataagacgctccaggtgttcaaagctgaaacaggggagaagctactagagatcaaggcccacgaagacgaagttttatgctgtgccttttccacagacgatcgcttcattgcaacctgctcggtggataagaaagtgaaaatctggaattcaatgacaggtgaactggttcatacctatgacgagcacagcgaacaggttaattgctgtcactttacaaattcttcacaccatttgctgctggctactggcagttcagattgctttctaaaattatgggacctgaatcagaaggaatgccgtaacacaatgttcggtcacacaaactccgtgaatcattgcaggttcagtcctgacgacaaacttctagcctcttgctcagccgacggtactttgaaactatgggacgcaacatctgcgaacgaacggaaatccatcaacgtgaagcagttcttcctgaatctggaggacccgcaggaggatatggaggtcatagtaaaatgctgttcctggtcagccgacggcgctagaattatggtggctgcgaaaaacaaaatctttctctggaatacagactcccgctccaaagtggcagactgtaggggacatttgtcctgggtgcacggagttatgttctccccagatggaagcagtttcttgactagcagcgatgaccagactattcggttgtgggagaccaagaaggtgtgcaaaaacagtgccgtgatgctgaagcaagaggtagacgtggtgttccaggagaacgaggtgatggtgctggccgtggatcacatccgcagacttcaattgattaacggtagaaccggacaaatcgattacctgactgaggcacaagtgtcttgctgctgtctctctccacacctacagtacatcgcatttggcgatgaaaatggggctatcgagatcctggagctggtaaataatcgcatattccaatcccgctttcagcataagaaaacggtgtggcatatccagttcactgcagatgagaagaccctgatttcttcatcggacgatgccgagatccaggtctggaattggcagttggataagtgcatttttctgcgagggcaccaggaaaccgtgaaagacttcagactgctcaagaactcacgactgctctcatggagttttgatgggacagtaaaagtgtggaacattatcacaggtaacaaggaaaaagatttcgtttgtcatcagggcaccgtcctaagttgcgacatttcccatgacgcgacaaaattctcatctacatccgccgacaagacagccaagatttggaacgtgtcgaacggtgaactcctgcatttatgcgctcctctcagtgaggagggtgcggctacgcacgggggttgggtcactgatctatgtttttcccccgatggcaagatgctgatcagcgctggtggatacatcaaatggtggaatgtcgtgactggcgaaagttctcagactttttacacgaacggtacaaatctgaaaaaaattcacgtgtcccccgatttcaaaacttatgtcacagtggataatctggggattctgtacattcttcaaactcttgagtag

SEQ ID NO: 27329 - DNA, 3714 bp, synthetic construct
  misc_feature 1..3714: note = Description of Artificial Sequence: Synthetic coding sequence
  source 1..3714: mol_type = other DNA
atggatgccaaggccagaaattgccttctgcagcatcgggaggccctcgagaaagatatcaaaaccagctacattatggaccacatgatttccgatggcttcttgactatcagcgaggaagagaaggtcagaaacgagccaacacagcaacagcgcgcagccatgcttattaaaatgatcctgaaaaaggataacgattcctacgttagcttttacaacgcgctcctccacgagggatataaagatctggccgcactccttcacgatgggatccccgtagttagttcatccagcgtgcggactgtgctgtgcgaaggtggggtgccccagagaccagtcgttttcgtgacaaggaaaaaactggtgaacgccatccagcagaagttatccaaattgaaaggcgagcccggatgggttacaattcacgggatggccggatgcgggaagtcagtgctggctgcagaggcggtgagggatcatagcctacttgaggggtgtttcccagggggagtgcactgggtgtctgtgggaaagcaggacaaatccggtttgctcatgaagctgcagaatctgtgcaccaggttagaccaagacgaatctttcagccaaaggctccccttgaacatcgaagaggcaaaagacaggctcagaatcctgatgctacgcaagcatcccaggtctctcctgatcctggacgatgtttgggactcctgggtgctgaaggcgtttgatagccagtgccaaatccttctgacgaccagagataaatctgtgaccgacagcgtgatgggacccaagtacgtggtgcccgttgaaagtagcctgggtaaagaaaagggtttggagattctgtccctgtttgtgaatatgaagaaggcagatctacccgagcaggcccacagcattatcaaagagtgtaaggggagtccactagtggtgagtttgatcggagccctgcttagggatttccccaaccgctgggaatattatctcaagcagcttcagaataagcagtttaagagaataagaaagagctctagctatgattatgaggccctcgacgaggctatgtcgatctccgtggagatgctgagagaggacatcaaagactactatacagacctctcaatcctgcagaaagacgtgaaagttcccactaaggtgctttgcattctctgggatatggagaccgaagaagtagaagatatactccaggagttcgtgaataaaagtttactgttctgtgacagaaacggcaaatcctttagatattatttacacgaccttcaggtggattttctaacagaaaaaaattgctcacagctacaagacctccacaagaaaattataacacaatttcagaggtatcatcagccacacaccctctcccccgaccaggaagactgcatgtattggtacaatttcctcgcctatcatatggcttccgccaagatgcataaggagctttgcgccttgatgttctcccttgattggattaaggctaagacagagttggtgggccctgcacatctgattcatgagttcgtggaatacagacacatactggatgaaaaggactgcgctgtgtctgagaacttccaggaattcttgtccctgaacgggcacctcctggggagacagccttttcccaacattgtacagctgggactgtgcgaacccgagacctcagaggtctatcaacaggcaaaacttcaagcaaagcaggaggtggataacggcatgctgtatctggagtggatcaataagaaaaacattaccaacctgtcacgactagtggtgagacctcacacagacgccgtgtaccatgcttgctttagtgaagatggccagcggattgccagttgtggagctgataagacactgcaggtgtttaaggctgagactggcgagaagcttctggagatcaaggcacacgaagatgaggtgctctgttgtgcattcagcacggacgatagatttatcgccacctgcagcgtggataaaaaggtcaaaatctggaattccatgacaggagaactcgtgcatacttatgacgagcactccgaacaggtaaactgctgtcacttcaccaactcctctcaccatctgttgctggcgacaggctcttctgactgctttctgaagctgtgggaccttaaccagaaggagtgcaggaatacaatgtttggccatactaattctgtgaaccactgtaggttctcaccagacgataagctgttggcctcatgctcagctgatggaacccttaagctctgggacgctaccagcgctaatgaacgcaaatccattaacgttaagcaattcttcctgaacctcgaggatccccaggaagatatggaagtgatcgtcaagtgttgctcatggagtgctgacggggctaggattatggtggcagccaagaataagattttcctgttcgacattcatacttctggtctgctgggcgagatccataccgggcatcattctactattcagtattgtgacttctctccccaaaaccacctcgccgttgttgccttgagccagtattgcgttgagctgtggaatactgacagcagatcaaaggtagccgactgtagaggccatctaagttgggtgcacggagtgatgttttctcccgatggctcttcatttctcacctcgtcagatgaccagaccatccggctttgggagaccaaaaaagtgtgcaaaaactctgcagtcatgctgaagcaggaggtcgacgtcgtcttccaggagaatgaggtgatggtgctcgctgtggaccatattagacgcttgcagctgatcaatggtcggacagggcagattgactatttgactgaagctcaggtgtcatgctgctgtctctcacctcatcttcagtacatcgcctttggagacgagaacggtgcaatcgagatattggaactggtcaacaaccgcatcttccagtctcgctttcagcataaaaaaacagtgtggcatattcagtttacggccgacgaaaaaacacttattagctccagcgatgatgccgaaatccaggtctggaactggcagctggataagtgcatcttcctaagaggccaccaggagactgtaaaagactttcggctgttaaagaactcaaggctgctcagctggagtttcgacggcacagtgaaggtttggaacatcataacagggaacaaggagaaagattttgtctgccatcaggggaccgtgctctcctgcgacatctcacatgacgctacaaagtttagctcgacatctgccgacaagacggcaaaaatctggtcatttgacctccttcttcccctgcatgaactccggggacataatggctgtgttaggtgcagtgccttttccgttgattctacccttcttgccactggagacgataatggggagatccgcatatggaatgtctcaaatggcgagctgctgcacctatgcgcacccctctccgaagaaggagctgcgacgcatgggggatgggtcacagacctctgtttcagccccgatggaaaaatgctcatcagcgctggtggctatatcaaatggtggaacgtagtgacaggcgagtcatctcagaccttctacacgaacgggaccaatctcaagaaaattcatgtatcgccagacttcaaaacatacgtcaccgttgataatctcggcatactctacattcttcaaaccctggaatag

SEQ ID NO: 27330 - DNA, 3747 bp, synthetic construct
  misc_feature 1..3747: note = Description of Artificial Sequence: Synthetic coding sequence
  source 1..3747: mol_type = other DNA
atggacgcaaaagcacgaaattgtctgctgcagcaccgcgaggcgctcgagaaggatatcaagacttcatatattatggaccatatgataagcgacggcttcctgaccatttctgaagaggaaaaagtgaggaatgagccaacacagcagcagcgggctgcaatgctgataaagatgattctgaaaaaggacaacgactcctatgtttctttctacaacgccttgcttcacgaggggtacaaagatttagcggctctcctccacgatggaatacctgtggtcagctctagttctgggaaagacagcgtcagcggaatcacctcatacgttaggactgtactctgtgagggcggagtaccccagagacctgttgttttcgtgacaagaaaaaagctggtgaacgcaatacagcaaaagctctcaaaactgaaaggagagccgggttgggtgaccatccacgggatggcaggatgcgggaagtccgttctggctgctgaagcagtgcgtgatcatagtctgctggaagggtgcttccccggtggcgtccactgggtgagtgtgggcaagcaagataagtcagggttgctgatgaagctccaaaacctgtgtactcggctcgatcaggacgaatcctttagccagcgccttccgctcaacatcgaagaagctaaagacaggttgcggatcctgatgctgcggaagcacccaaggtctctgctgatcctcgacgacgtatgggatagctgggtgctgaaagcttttgactctcagtgccagatcctgctgaccactagggacaagtccgtgaccgactctgtcatgggacccaaatatgtcgtcccggtggagtcatcactgggtaaggagaagggcctcgagattttatcactctttgtcaacatgaaaaaggccgatctcccggaacaagcacattcaatcataaaagagtgcaaaggctcaccgctggttgtgagcttgattggtgctcttctgagagatttcccaaatcgctgggaatactatctgaagcagctgcagaataaacagttcaaacgaatccgcaagtccagtagttacgattacgaggccctggacgaggccatgtccatttcagtggagatgttgagggaggacatcaaggactattacacagatctgtccatcctgcagaaggacgtcaaagtccctactaaagtcctgtgcatcctgtgggatatggagaccgaagaagttgaagacatactgcaggagttcgtaaataagtccctgctcttctgcgaccggaatggaaagagtttccgctactacctacatgacttgcaagttgattttctcaccgaaaagaactgtagccaacttcaggatctgcacaagaagatcatcacacagtttcaaaggtatcaccaacctcacacgttgagcccggaccaggaggattgtatgtattggtataatttcttggcctatcacatggcaagcgccaagatgcacaaggaactgtgtgccctcatgttttcactggattggattaaggctaagactgaattagtgggcccagcacatctcatacatgagtttgtggaatacaggcacattctggacgaaaaagattgcgccgtgagtgaaaactttcaggagtttctaagtttgaacgggcatctacttggtaggcagcctttcccgaatattgtccagctgggcctgtgcgagccagaaactagtgaggtctatcagcaggccaaactccaggccaaacaagaggtggacaacggcatgctctacctggaatggattaataagaaaaatataaccaatctgagtcgcctggtggttagaccacataccgatgccgtgtatcacgcatgtttctccgaggacgggcagagaatcgcaagctgtggggcagataagacactgcaggtgtttaaagcagagactggggaaaaattactggagatcaaggcccacgaagatgaggtcctttgctgcgcgttctcgacggacgaccggtttatcgcaacttgctcagtcgataaaaaagtgaagatttggaactcaatgaccggcgagttggtgcacacatacgatgaacacagcgagcaagtcaattgctgccactttactaacagcagccaccaccttctgttggccactggttcctccgactgtttcctgaagttgtgggacctgaaccaaaaagagtgccgaaacacaatgttcgggcatactaactccgtaaatcattgtcggttctcaccggacgataagctactggcatcctgttccgcggacggcacactcaagctttgggatgccacttctgcaaacgaacggaagtctatcaatgtgaagcagtttttcctcaatttggaagatccacaggaggacatggaagtcatcgtgaagtgttgctcctggagtgccgatggggcacggatcatggtcgccgcaaagaataagattttcctgttcgacatccataccagtggcttgctgggggagatccatacaggccaccatagcaccatccagtactgcgacttttctccgcagaatcatctggctgtggtggcacttagccagtattgtgtggagctctggaacaccgacagccgctctaaggtggctgattgccgaggccatttgagctgggtgcacggggtgatgttctcacccgacggctcgagttttttgacttccagcgatgaccagacaatacgcctctgggaaactaagaaagtgtgcaaaaattcagctgtcatgctaaaacaggaggtggatgttgtgttccaggagaacgaagtgatggtcctggccgtagaccacatcaggcgactgcagttgataaatggtagaaccggtcagatagactacctgacagaggctcaggtaagttgttgttgtctcagtccccacctccagtacattgccttcggggacgaaaacggcgctatcgaaatactagaactggtgaataacaggattttccaatccaggttccagcacaagaaaactgtgtggcatatccaattcactgccgacgagaagactttgatttcatcttcagacgacgccgaaatacaagtctggaactggcagctggataagtgcatttttttgcggggtcaccaggagactgtgaaagacttcaggcttttaaagaactcgagactgctttcatggagctttgacggaaccgtcaaggtatggaatataatcactgggaacaaagagaaggactttgtatgccaccaaggcaccgtattaagctgcgacataagtcacgacgccaccaagttttcgtctacatctgccgacaaaacagcaaagatctggtcctttgatctgctcctgccactgcacgagctgagaggccataatgggtgcgtgagatgtagcgccttctcagtcgactccacactgctggccactggtgatgataatggcgagattcgtatatggaacgtgtcgaatggtgaactgctgcacctttgtgccccactgagcgaggaaggcgcagcgacacacgggggttgggtcacagacctctgtttcagccctgatgggaagatgttaatctcagccggaggatatataaaatggtggaatgttgtgacaggcgaatccagccaaacgttttacactaacggcacgaacctaaagaagattcacgtgagccctgatttcaagacgtacgtcacagttgacaacctgggcatactttacatcctgcagacgctggagtag

SEQ ID NO: 27331 - DNA, 1017 bp, synthetic construct
  misc_feature 1..1017: note = Description of Artificial Sequence: Synthetic coding sequence
  source 1..1017: mol_type = other DNA
atggatgcaaaagcccgtaactgtctgctccagcaccgggaagctcttgagaaggacattaagacatcctatatcatggatcacatgatttctgatgggtttctgactattagcgaggaagaaaaagtgcggaatgaacctacacaacagcagcgtgcggcaatgctgattaaaatgatcctgaagaaggacaatgattcttatgttagcttctataacgcgctcctgcacgagggatataaggacctggccgctctgctccacgacgggatccctgtagtgtcaagttcctcagggaaagacagtgtgagcggcattaccagctatgtgcgtaccgtactctgtgagggaggtgttccccagaggcctgtggtgttcgtaacccgaaaaaagctggttaacgcaatacaacaaaaactgagtaagctgaaaggggaacccggatgggtgaccattcatggtatggctgggtgcggcaagagcgtgctggcagctgaagctgtgagagaccactctctgctcgagggttgttttccgggtggggtccattgggtgagtgtgggaaaacaggacaaaagtgggctgcttatgaagctacagaacttgtgcacccgactagaccaggacgagtcgttttcccagcggctccctctcaatatcgaggaggccaaggaccgcctgcggatacttatgctgcggaagcacccccgatccctgctgatactggatgacgtgtgggattcctgggttctcaaagccttcgatagccaatgccagatccttctgacgacaagagataaaagtgtgactgacagcgtcatggggccaaagtacgtggttccagtggagtcttccctcggcaaagagaagggcttagagattttatctcttttcgtcaatatgaaaaaggctgacctaccagaacaagctcatagtattataaaagaatgcaaggtcgtggaacgatgtcattgggggatcctgaccgacctgctgcacaagtggaaccagtcgtag

SEQ ID NO: 27332 - DNA, 2025 bp, synthetic construct
  misc_feature 1..2025: note = Description of Artificial Sequence: Synthetic coding sequence
  source 1..2025: mol_type = other DNA
atgccatcttacaccgttacggtcgctaccgggagccagtggttcgccggtactgatgactatatctacctatccctggtaggaagtgcaggttgttccgagaagcacctgttggataagccgttttataatgatttcgagaggggcgctgtagattcttacgatgtcaccgtggatgaagagcttggcgagatacagctggtacgaatagagaagcgaaaatattggttgaatgatgattggtacctcaaatacatcacactgaaaaccccccatggggactatattgaattcccatgttataggtggataacaggggatgtggaggtggtactgagggatggtcgcgcaaagctggccagagatgatcaaattcatatcctcaagcagcatagaagaaaagagctagaaacaagacagaagcaatatagatggatggagtggaaccctgggttccctctcagtattgatgccaagtgtcataaggacctccctagagacattcagttcgactccgaaaaaggcgtagattttgttttaaactatagcaaagcaatggaaaatctctttatcaataggttcatgcatatgttccaaagctcatggaatgacttcgcggacttcgaaaagatttttgtgaagatctctaatactatatcagaaagagtgatgaatcactggcaagaagatttgatgtttggctaccaatttcttaacgggtgcaatcctgtcctgatccgccgttgtacagagcttccagaaaaattgccagtgacaaccgagatggtagagtgctctcttgaaaggcaattgagtctggaacaggaggtccagcagggtaacatttttatagttgacttcgagctcctggacgggattgacgccaataaaactgatccctgcacactccagttcctggcggcacctatatgcctgctttacaaaaacttagcaaacaaaatcgtccctatcgccattcagctcaatcagattccaggcgatgaaaatccaatctttctacccagcgacgcgaagtacgactggctgctggcaaagatatgggtccgctcctctgattttcacgttcatcagaccattacccacctactccgtactcatctcgtttctgaggtatttggtatcgccatgtatagacagttaccagcagtgcacccaatcttcaaactcctggtggctcacgtacggtttacaatcgcgatcaacactaaggccagggagcagctgatctgcgaatgcggactgttcgacaaagcaaacgctacgggcggaggtgggcacgtccagatggttcaacgagcgatgaaagacctgacctacgcctctctctgttttcccgaggctattaaggctcgcggaatggaaagtaaagaagatatcccctactacttctatcgggacgatgggctgctggtctgggaagcaatacggacctttacagcagaagtcgttgacatctactatgaaggggaccaggtggtagaggaggacccagagctacaagattttgtaaacgatgtgtatgtgtacggcatgcggggaagaaagtctagcggctttccgaaatccgtgaaatccagggagcaactgagtgaatatttgacagtggtgatttttactgcgtcagctcaacacgctgctgtgaattttggtcaatacgattggtgctcatggatccccaacgccccaccaacaatgcgggctccacccccaacggcaaagggggtcgtgactattgagcaaatcgttgatacactcccggacagaggccgaagttgttggcaccttggcgcagtttgggccctgtcgcagttccaggagaatgaactgttccttgggatgtatccagaggagcacttcatcgagaagccggtgaaagaggccatggcccgtttccggaaaaatctggaggctatcgtgtccgtgattgctgagcgaaacaaaaaaaagcagctgccatattactatctttcccctgatcgcatcccaaattccgtggccatttag

SEQ ID NO: 27333 - DNA, 1854 bp, synthetic construct
  misc_feature 1..1854: note = Description of Artificial Sequence: Synthetic coding sequence
  source 1..1854: mol_type = other DNA
atgccctcctacacagtgaccgtggctacaggttcacagtggtttgctggcacagacgactacatttacctctccttggtgggtagtgccggttgtagcgagaagcacctgctcgataagccattctataacgactttgaacgaggcgcagtcgacagttatgacgtcacagtagatgaagaactgggcgaaatacagttagttcgtattgaaaaacgcaaatactggttgaatgacgattggtacctaaagtacatcactcttaagacccctcatggcgattatattgaattcccttgctaccggtggataacaggagatgtcgaagtggtactgagagacggacgtgccaaactagctcgagacgaccaaatacacatcctgaagcagcatcgtagaaaagaattagagacaaggcagaaacagtatcggtggatggaatggaatcccggatttccactttcaatagacgctaagtgccacaaggacttgccacgggatatccagtttgactccgaaaaaggagtggatttcgttcttaattactcaaaggccatggaaaatctgttcatcaaccggttcatgcacatgttccaaagtagttggaatgattttgcagacttcgagaagatctttgtgaaaattagtaacacaatctccgagcgcgtcatgaaccactggcaggaagacctgatgttcggctaccaattcttgaacggttgcaaccctgtgctgatccggagatgtactgagttgccggagaaactcccagtgacgacagagatggtggagtgctccttggagaggcagctttcactcgagcaggaagtccagcagggcaacatatttattgtggatttcgaactgctcgacgggattgacgccaataagacagacccgtgcaccttacagttcctggccgctccaatctgtctactgtacaagaacctcgctaacaagatagttcccatagccatccaactgaaccagattcctggcgacgagaacccgatctttttaccttcggatgcaaaatacgattggctccttgctaagatctgggtgcggtccagtgattttcacgtacaccagactattacacacctcttgaggacccatttagttagtgaggtgttcggtattgcaatgtaccgacagctcccggctgttcatcccatcttcaagctgcttgtggcccacgtgaggtttacaatagctatcaatactaaagcaagggaacagttaatctgcgaatgtgggttgtttgataaggccaacgccaccggtggagggggacacgtgcagatggtacaaagagccatgaaagacctgacgtacgcaagtctgtgtttcccagaggcaattaaagcaaggggcatggagagcaaagaggacattccttattatttttatcgcgacgacggactgctcgtctgggaggcaatccgaaccttcactgcagaggtcgtggacatttactatgagggcgaccaggtcgttgaagaggatcccgagttgcaggattttgttaatgatgtctatgtctacggtatgagaggaagaaaatcatctggattcccgaaaagtgttaagtctagagagcaactgagtgagtatctgaccgtggtgatcttcaccgcaagcgcacaacacgccgcagtgaacttcgggcaactctttctgggtatgtatcctgaagaacattttatcgaaaaacctgtaaaggaagcgatggcccgatttagaaagaacctcgaggcaatcgtatctgtgatcgcagaacggaacaagaagaagcagttgccttattactatctttcgccggaccggataccaaacagcgtggccatctag

SEQ ID NO: 27334 - DNA, 2511 bp, synthetic construct
  misc_feature 1..2511: note = Description of Artificial Sequence: Synthetic coding sequence
  source 1..2511: mol_type = other DNA
atgcacgcccagcgccagtttgttgtggccgctgtgcgggctgaagtccggcgacatgaggtagccaaacaggcacttaataggctcagaaagttagccgagcgtgtggacgacccggagctgcaggactcaatacaggccagtctagacagtattcgggaggccgtcataaattctcaggaatggaccctcagcagatcaatccccgagctaaggttaggcgtgcttggggacgcacgctcagggaagtcttccctgatacacaggtttctgaccggttcctaccaggtgttggaaaaaacagagtccgagcagtataagaaggaaatgctggttgatggccagacccacctcgtcctgatccgggaggaagcaggtgcccctgatgcaaagttcagcggttgggccgatgctgttatcttcgtcttttctctcgaggatgagaactcctttcaggctgtgtcaagactgcacggtcagctgtccagcctgcgtggggaggggagggggggtttggccctggcactggttggaacacaagaccggatcagcgcttccagtcctcgggtagtgggagatgccagggcaagggccttgtgtgcagacatgaaaaggtgctcctactacgaaacgtgcgccacctatgggctcaatgtagaccgcgtgtttcaggaagtcgcacaaaaagtggtgactcttcggaagcagcagcaactcctggccgcttgtaagtctctaccgagcagtcctagccattcagccgcatccacccctgttgccggacaggcaagtaatgggggacacacctctgattactcctcatctcttcccagtagtcccaatgtggggcaccgagagctccgtgcagaggcggctgccgttgcgggtctaagcactccgggaagcctgcatagggcagccaagagaaggacatcgttgttcgccaacaggcgtggctccgatagcgaaaagcggtctctagattcaaggggtgaaaccacaggcagtggacgggcaattccaattaaacaatcatttcttctgaaaagatccgggaactcactgaacaaggagtggaagaaaaaatacgtcacgctgtcaagtaatggcttcctcctttaccatccaagtattaatgattatatacattcgacccacgggaaagaaatggacctactgcggactacagtgaaagtgccaggcaagcgcccacccagagccattagtgcttttggtccctcagcgagcattaacgggttggtgaaagacatgagcaccgtacagatgggtgaaggcttggaggcaaccacccccatgccctctccatctccatctcctagctcactccagccaccgccagaccagacatcaaagcacctgctcaagccagatcgtaatctcgcacgagctctttctactgattgcacgccttcaggagacctctcccccctgtcacgcgaaccacctcccagccccatggtgaagaaacagcgcaggaaaaagctgacaaccccaagcaaaacagaggggagcgccggacaggccgaggaagaaaattttgagtttctcattgtgagtagtactgggcagacatggcattttgaagccgctagtttcgaagaacgcgatgcttgggtgcaggctattgaaagccagatccttgcctccctgcagtgttgcgaatcatctaaagtgaagcttaggacagattcacagtccgaggccgtggccatacaggccattcggaatgcgaagggtaatagcatttgtgtcgactgtggtgcacctaaccccacctgggctagcctcaacctgggggcactgatctgcatagagtgttctgggatccatagaaatttggggactcatctgtcaagggtgcggtctctggacttggatgattggccacgggaactgactctggtcctcacagctatagggaacgataccgccaaccgtgtctgggaaagcgatacacggggacgggctaaaccatcccgagattcaagcagagaggagagggagtcttggatccgagcgaagtacgaacagctgcttttcctggctccattgtccacctccgaggaaccactgggtaggcagctgtgggccgcagtccaggcacaggacgtggctactgtcctgctgttattggcccacgcaaggcacggaccattagatacgtcagtggaggacccccagttaagaagtcctcttcacctggctgctgaactcgcacatgtggttatcacgcaactgctgctgtggtacggggcagatgtggccgctcgggatgcacaaggaagaacagcgctgttctatgctcgccaggccggatctcagctctgtgcggatatcctccttcagcacgggtgtcccggtgaggggggttccgcagccactaccccctccgccgcaacgaccccatcaattactgcaacaccttcaccccgacgacgttcttccgcggcaagtgtgggtcgcgctgacgcaccagtggccctggtatag

SEQ ID NO: 27335 - DNA, 3579 bp, synthetic construct
  misc_feature 1..3579: note = Description of Artificial Sequence: Synthetic coding sequence
  source 1..3579: mol_type = other DNA
atgtcccgcggtgccggtgccctccagaggcgtactactacttacctcatatctttgaccctcgtaaaattggagtcagttccacctcccccaccctctccgtccgccgcagcagcaggtgccgcaggcgctcgcggttctgagaccggggacccgggatctcctcgaggcgctgaggaaccaggtaagaagaggcatgaacggctgttccaccgccaagatgccctctggatatcaaccagctccgctggcacaggtggcgctgagcctccagctctctctcccgcacctgcctctccagctcggcctgtgagtcccgcacctggtaggcgcctgagcttatgggcagtgccaccaggacctccactgagcggaggcctgagccctgatcccaagcccggaggggctcctaccagctccagacgccctctgttaagtagcccaagctggggcggtccagagccagagggccgtgcgggaggcggtatcccagggagcagcagtccccacccaggcacaggaagccgtcgacttaaggtggccccaccgcctcccgctccaaagccatgcaagaccgttactacttcaggcgctaaagctggcggaggtaaaggcgcaggcagtagactgtcttggccggagtctgaaggcaaacctcgggtcaaagggtccaagtcctccgctggaaccggggcatccgtgtccgcagccgcaacagccgctgcggcaggcggtggcggaagcaccgcttcaacttccgggggtgtgggggctggtgcaggcgcaagaggcaagctcagtccccgaaaaggaaaaagcaaaacccttgataactcggacctccatcctggccctcccgcaggcagcccccctcctcttacccttccaccaactccaagccccgctactgccgttactgctgcctctgcccagcctccgggtcccgctcctccaatcaccttggaacccccagccccagggttgaagaggggacgggaaggcggtcgagctagtacacgcgatcgcaaaatgcttaagtttataagtgggatttttactaaatctaccggtgggccacccggaagtggacccttgcccggacccccttcactatcgagcgggtctggctcgagggagcttctgggcgctgagctgagagcgagccctaaggccgtaattaacagccaggaatggactctgagtcgttccatcccggaactccgactaggcgtgctcggagatgcccgatccggaaagagctcattaatccatcgcttcctgaccggttcataccaagtgctggaaaagaccgaatcagaacagtacaaaaaagagatgctcgtggatggccagacccacctggttctgatacgtgaggaggcaggcgctcccgatgccaagttcagtggatgggcagatgccgtgatctttgttttctcactggaagatgagaactcattccaggcagttagtcggctgcatggccaactatccagccttcgtggtgaaggtcgcggtgggctcgctttagccttggtgggtacccaggatcggatctcagcaagctcacctcgggttgtgggagacgctagggcacgagctctttgcgctgacatgaagaggtgctcttactacgaaacctgtgcgacttacggtctgaatgtggacagagtttttcaggaggtggcccagaaggtcgtgacgctgagaaagcaacagcagctattagccgcttgcaaaagtctaccgagttcaccttcacattccgccgctagtactcctgttgccggacaggcaagcaatgggggacatacgagtgactacagcagctccctccccagctcccccaatgtggggcacagggagctccgtgcagaggccgcagcagtggccggtttgtccacacctggaagtctgcatcgtgctgccaagagaaggactagtctttttgccaacaggaggggttccgactctgagaagaggtcactggattctcggggtgaaactactggctctggcagagcaatccccataaagcaatcttttctgctgaagaggtccggcaattctttgaataaagaatggaagaaaaagtatgtgacactgtcgtccaatggtttcttgctataccatccttctatcaatgactatatccatagcactcacggcaaggagatggatctactgcgcacaacagttaaggtcccaggaaagagaccacctagggcaatcagcgcttttggaccgtccgcgtcaatcaacgggttagtgaaagatatgtcaactgttcagatgggagaaggtctggaagctacaacccccatgccttcaccctccccctctccctctagcttacagcctccacccgatcagacatcaaagcacctgctaaaaccggatagaaatctcgccagagcgctgagcacggattgcactcccagcggcgatctgagtcctctttctcgcgaaccaccaccttccccaatggtgaagaaacaaagacgcaaaaaactaacaaccccctccaagaccgaaggttcggccggacaggctgaggcaaagcggaaaatgtggaagttaaaatcattcgggagtttgcggaacatctacaaggctgaggaaaactttgagtttctgattgtgtcatccacagggcagacatggcatttcgaggccgctagtttcgaggaacgggacgcttgggtacaggccatagagtctcaaattctcgcatccttacagtgctgtgaaagtagtaaagtgaaacttcgaactgacagccagagtgaggcggtcgctatccaggcaatccggaacgccaaggggaacagtatttgcgttgactgcggtgctcctaaccctacatgggcatccctgaacttgggggcactcatttgtattgagtgttccggcattcaccgaaacctgggtacccacttatcccgagtgagaagcctggatcttgatgattggcctagagagctcactctggtgctgacggctataggcaacgacacggcaaaccgtgtgtgggagagtgacacgcggggacgggctaaaccatcgcgcgactctagccgtgaggaacgcgagtcatggataagggcaaagtacgagcaactcctgttcttggctccactgagtacctccgaggagcccctggggcgtcagctgtgggctgctgttcaagcccaggatgtcgcaacagttcttctgctcctggctcatgctcggcatggtcccttggatacttcagtcgaggacccacaattgcggagcccactacacctggctgcggaattggcgcacgtggtcatcacccaactccttttgtggtatggagctgatgttgcggctagggatgcccaaggacgaaccgccctgttttacgccaggcaggctggctcccagctgtgtgccgacatcctgctgcagcacggatgtccaggtgagggtgggtctgccgcaaccacaccgagtgcagccaccacccccagtataacagcgactcccagccctcggaggcggagctctgccgctagcgtgggacgtgctgacgcccctgtggctctggtctag

SEQ ID NO: 27336 - DNA, 1185 bp, synthetic construct
  misc_feature 1..1185: note = Description of Artificial Sequence: Synthetic coding sequence
  source 1..1185: mol_type = other DNA
atggatagtcagggacgcaaagttgtggtgtgtgataacggaaccggctttgtgaagtgtggatacgcaggatccaattttcccgagcacatcttccctgcactcgtagggagacccatcatccgatcaacaaccaaggttggaaacattgaaataaaagacctgatggtgggagatgaagcctccgagctgcggagcatgctggaggtgaactacccaatggagaatggcatcgtgagaaactgggatgatatgaagcacctgtgggactacacctttggccctgaaaagttgaacatcgatacaagaaattgcaagattctgctgacagagccccctatgaaccccacaaaaaacagggagaagatcgttgaggtgatgtttgagacatatcaattctctggcgtctatgtggccattcaggcagtgctgacactctatgcccagggactgctgacgggcgtggtagtggactccggcgacggcgtgacacacatctgtcccgtgtacgaaggcttttctctgcctcacttaactcgtagactcgacatcgcgggacgcgacatcacaagatacctgatcaaactgctgctgctccgaggatacgcctttaaccatagcgcagatttcgagacagtacgcatgatcaaggaaaagctgtgctacgtgggctacaacatcgagcaggagcagaaactcgcactcgagacaactgtgctggtcgaatcctacaccctgcctgacggcaggattatcaaagtaggaggtgagcggtttgaggctcccgaggcgctgttccagccacacctgatcaacgtggaaggcgtgggggtcgccgagttactgttcaacacaatccaggcagctgatatcgacacaagatctgagttctacaaacatattgtgctctccggaggaagcacgatgtacccaggactcccaagtaggcttgagagagaacttaaacagctttacctcgagcgagtcctgaagggcgacgttgaaaagctctccaaatttaaaattaggattgaagatcccccacggcgaaagcacatggtttttttaggcggagcagtgctggcagatatcatgaaggataaggataatttttggatgacaagacaggagtatcaggaaaagggagtgcgcgtgcttgaaaagctgggcgtgacggtgaggtag

SEQ ID NO: 27337 - DNA, 1200 bp, synthetic construct
  misc_feature 1..1200: note = Description of Artificial Sequence: Synthetic coding sequence
  source 1..1200: mol_type = other DNA
atggactcccagggcagaaaggtggtcgtgtgtgataatggaaccggatttgttaagtgtggctacgccggttccaatttcccagagcatatctttcccgcactagtggggaggcctatcatccgatcgaccaccaaagtggggaatatcgaaatcaagaacaataagaagatggatctaatggtgggcgatgaagcaagtgaattgcggagtatgctagaggttaattatccaatggagaatggaattgtccgaaactgggacgatatgaaacacctgtgggattacacgttcggcccagaaaagctcaatattgacactcggaactgcaagattcttctgacagagcctccaatgaacccaacgaagaaccgggagaaaatcgttgaggtaatgttcgaaacctatcaatttagcggagtgtacgtagcaattcaggccgtcctgactctgtacgctcagggactgctcaccggtgtggtcgtggatagtggggacggggtaacccacatttgtccagtgtatgagggcttttccctgccccaccttacaagacggctcgatatagcagggagggatatcacgcgctacctgataaaacttctgttgctcagaggatacgctttcaaccacagcgcagatttcgaaaccgtacgcatgataaaggaaaaactctgctatgtgggctataatatagaacaagaacagaagttagctctggagacgaccgtccttgtggagagctacactctcccagacggtagaataattaaggtcgggggagaacgttttgaagccccagaggccctgttccagccacatcttattaatgttgaaggggtcggggtggctgagctcctgttcaacaccattcaagccgctgacatcgataccagatccgagttctacaaacatattgtcttgagtggcggatctaccatgtatccgggactacctagtcggctagaaagggagctgaagcagctttatctggagcgggtactgaaaggggacgtggagaagctgagtaaatttaaaatcaggattgaggatcccccacgcagaaagcatatggtctttctgggaggtgctgtgctggcggacattatgaaggacaaagataacttctggatgaccaggcaggagtatcaggagaaaggggtgagagtgctagaaaagctgggcgtcacagtgagatag

SEQ ID NO: 27338 - DNA, 1020 bp, synthetic construct
  misc_feature 1..1020: note = Description of Artificial Sequence: Synthetic coding sequence
  source 1..1020: mol_type = other DNA
atggtgggagacgaggctagcgagcttcgctcgatgcttgaagtcaactacccgatggagaatggcattgtgagaaactgggatgatatgaaacacctgtgggactataccttcggccctgagaagttgaatatcgacactcggaattgcaagattttactcacagagcctccaatgaacccaaccaaaaatcgcgagaaaatcgtggaagtgatgttcgagacttaccagttctccggggtgtacgttgctatccaggctgtgttaaccctgtatgctcaggggctactgaccggggtcgtggtcgactctggcgatggggtcacacacatatgccctgtttatgaagggttctctctgccccacttgacccggaggttggacattgcaggccgagatatcaccaggtatctaattaagctacttctcctgaggggatatgcttttaatcattccgcagattttgagactgtgaggatgattaaagagaaactttgttatgtcggctacaacattgagcaagaacagaaactggctttggaaactactgtcctggtagagagctataccctgccagacgggcgtattattaaagttgggggagaacgattcgaagcacctgaggcactgtttcagccccatctaattaatgtcgagggtgtcggagttgccgagcttctgttcaatactatacaggccgcagatattgatacccggagcgaattctataagcacatagtcttgtcaggaggctccacgatgtaccccggactgcccagtaggctggaaagagagcttaagcagctgtatctggaaagagtgctcaagggtgacgttgagaagctctccaagtttaaaatcagaattgaggatccaccccgacgcaagcacatggtattcctgggaggggcagttctagctgatattatgaaagataaggacaacttctggatgaccagacaagagtaccaagagaagggggtccgggtgctggaaaagcttggggtaactgtgcggtag

SEQ ID NO: 27339 - DNA, 918 bp, synthetic construct
  misc_feature 1..918: note = Description of Artificial Sequence: Synthetic coding sequence
  source 1..918: mol_type = other DNA
atggtcggcgatgaggctagtgagcttaggagcatgctcgaagtgaactacccaatggaaaatggcattgtgaggaattgggacgatatgaaacacctgtgggattatacattcggtccagaaaaactcaacattgataccagaaattgtaaaatcctgcttactgagcccccaatgaatcctactaaaaatagagaaaaaatcgtggaagtgatgttcgaaacttaccagttcagcggtgtgtatgtggccatccaggccgtgctcactctgtatgcacaaggactattgacaggcgttgtcgtcgattcaggggatggggtgacacatatctgtcctgtgtatgaaggttttagcctacctcatctgacgaggaggctggacatagccggaagggatatcacacgttacttaataaaactgcttttactgcgaggatacgcattcaatcattcagctgacttcgaaactgtgagaatgatcaaagagaaactttgctacgttggatataacattgagcaggagcaaaagctggcacttgagactacggtgctcgtggagtcctacaccctgcctgacggcaggatcatcaaggtgggcggtgagcggtttgaagctcctgaggctttgttccaacctcatcttatcaacgtggagggcgtcggggtagctgagttactttttaacaccattcaggccgcagatatcgacaccagaagtgagttctataaacacattgtcttgtcaggtgggtccactatgtacccgggtctgccctcgaggctggagcgcgagctgaagcagctatatcttgaaagagtgttgaaaggtgatgtggaaaagctatcagtttcaatcagtaagtcaacaatcaccaatatcctcttaaagggctacacagtggtgtgcgagtcatag

SEQ ID NO: 27340 - DNA, 1257 bp, synthetic construct
  misc_feature 1..1257: note = Description of Artificial Sequence: Synthetic coding sequence
  source 1..1257: mol_type = other DNA
atggcagggcgattgcccgcatgtgtggtagattgcggaaccgggtacacaaaactgggatatgctggaaatacagagccccaattcatcatcccatcatgcatagccattaaggagagcgctaaggtgggagaccaagcccagagaagagtgatgaagggcgtggatgacttggacttctttattggggatgaagcaatcgagaagcctacctacgcaaccaagtggccaataagacacggcatagtggaagactgggacctcatggagcgatttatggagcaagtcattttcaaatatctcagagccgaacctgaagaccattactttctgcttaccgagccgccactgaacacccccgagaaccgcgagtatactgctgaaatcatgtttgagagcttcaatgtgccaggactgtacatcgccgtgcaagccgtacttgccctggctgcatcttggacctctagacaggtgggagagagaactttaaccggtactgttatagactcaggggatggggttacccacgttatacccgtcgctgaaggatatgtgattggcagctgcattaagcacatccccatagctggaagagatataacctacttcatccaacagttgctgagggatcgcgaagtgggcatcccaccagaacaatctctggaaacggcgaaggccgttaaagagagatactcttatgtctgccccgacctggtcaaagaatttaacaaatacgataccgacgggagcaagtggattaagcaatacaccggaatcaacgccatatcaaagaaggagtttagcatagatgtggggtacgagcggttcctgggccctgaaattttcttccatccagaattcgcaaatcccgattttacgcagccaattagtgaggtagttgacgaggtgatccaaaactgccccatagacgttagacggcctctctacaagaatattgtcctgagcggcggatctactatgtttagggatttcgggcgacggttgcagagagatttgaaacgcaccgttgatgcgaggctgaaactcagtgaggaattatcaggaggcagactgaagccaaaaccgattgatgtgcaggtcatcacccaccatatgcagcgttacgcggtttggtttggcggaagtatgctggccagtacacccgagttttatcaggtgtgccatacgaagaaggattatgaggagatcggtcctagcatttgtcgacataatcctgtgttcggagtaatgtcctag

SEQ ID NO: 27341 - DNA, 1104 bp, synthetic construct
  misc_feature 1..1104: note = Description of Artificial Sequence: Synthetic coding sequence
  source 1..1104: mol_type = other DNA
atgaagggtgtcgacgaccttgatttctttatcggagacgaggccatcgagaagccgacgtacgcaaccaagtggccaattcgccacgggatcgtggaggattgggatctgatggaacgttttatggagcaagtgatttttaaatatctgcgggcagaaccagaggatcactattttctcctcaccgaacccccactgaacactcctgagaacagagaatatacggctgagatcatgttcgagagcttcaatgtccctggactctacatcgctgtccaggcagtgctggcactggcagccagttggacctcaagacaggttggagaacggacattgactgggacagttatcgactcaggagacggcgtgacacacgtcatacctgttgctgagggatatgtcatcgggagttgtattaagcatattccaattgccggaagagatataacctacttcatacagcagctcctacgggaccgggaagttggcatccctcccgaacagagcctcgagacagctaaggccgttaaagagcgctattcctatgtctgcccagatctagtgaaagaattcaataagtatgataccgatgggtccaaatggatcaaacagtacacagggatcaacgccatctctaagaaggagtttagtatcgatgttgggtatgagaggtttttaggaccagagattttcttccatcctgagttcgcaaacccagatttcactcagccaatctcggaggtcgtcgatgaagtcatacagaattgccctatagatgtgcgtcggcctctgtacaagaatattgtcttaagtggcggatctactatgttccgagattttggacgcaggttacagcgcgacttgaagcgtactgttgatgcccgtctcaaactcagcgaagagctgagtggcggacgtctgaagcccaaacccattgatgtgcaggttatcacacaccatatgcaacgttacgcagtgtggtttggtggatccatgctcgccagtaccccagagttctaccaggtgtgccacactaagaaggactatgaagagattgggccatcaatctgccgccacaatcccgtctttggtgtcatgtcctag

SEQ ID NO: 27342 - DNA, 1071 bp, synthetic construct
  misc_feature 1..1071: note = Description of Artificial Sequence: Synthetic coding sequence
  source 1..1071: mol_type = other DNA
atgctggaaatccagaatcatagcttaagtagcctgccgtggcccattcgccacgggatcgtggaggactgggatctcatggagcggtttatggagcaagtcatttttaagtatcttcgggcagagcctgaagaccactacttcctgttgacggagcccccactgaacactcccgagaatagggagtatacggccgaaatcatgttcgaatcattcaatgtgcccggtctatatattgccgtccaagcggtattggcactcgctgcttcatggacaagtcgtcaggtcggtgagagaaccctcactggtaccgtaattgactccggcgacggagtgactcatgtgatcccggtggccgaaggatacgtgatcggctcttgtataaaacatatcccgattgcaggaagagatattacgtattttattcagcagctcctgcgcgatagggaggtgggtattccacctgagcaatccctcgagactgccaaagctgtgaaagagaggtatagttatgtttgtcctgacctggttaaggaatttaacaagtacgataccgatggatctaagtggatcaagcagtacacaggcatcaatgctattagcaaaaaggagttctccatcgacgtaggttatgaacgctttcttggtcctgagattttttttcatcccgagtttgccaaccctgatttcacccaaccaatctccgaggtagtggatgaagtgatacaaaactgccctattgacgtcaggaggcccttatataaaaatatcgttctctctggcggttccactatgttccgcgattttggccgacgactccagagggatttaaaaagaaccgtggacgccaggctcaaactttcagaagagctgtctggaggccgactgaagcccaagcccatcgacgtacaggtgattacccatcacatgcagagatacgcggtatggttcggcggatcaatgcttgcatcaacccctgagttttaccaggtgtgtcatacgaagaaggactatgaagaaatcggtccgagtatttgcagacacaacccggtgtttggagtcatgtcttag

SEQ ID NO: 27343 - DNA, 870 bp, synthetic construct
  misc_feature 1..870: note = Description of Artificial Sequence: Synthetic coding sequence
  source 1..870: mol_type = other DNA
atgtttgagtccttcaatgtgcctgggctgtacatcgctgttcaagctgtgctagcattagccgcatcgtggacatcccgccaggtgggggaaaggacactcacggggactgtgatcgacagcggcgatggcgtcacacacgtaattcccgtggcagaagggtacgtgattggctcctgcataaagcacattcctattgctggaagagacatcacctattttatccagcaactgctaagagaccgggaggtcggcattcctccagaacaaagcctggaaaccgccaaggcagtgaaggagcgctattcctacgtttgcccagacctggtgaaggaattcaacaagtacgataccgacgggagcaaatggatcaagcagtacactggcatcaatgccatctccaagaaagagtttagcatcgacgtcggatatgagaggttcctggggcctgagattttcttccaccctgagttcgccaatcctgatttcacacagccaatcagtgaggtcgttgacgaggtaatccagaactgcccaatagatgttagaagacctttgtataagaatatcgtgttgtccggtggctccaccatgttccgcgacttcgggaggagattacagagggacctcaagaggactgtcgatgcacggctgaaactttcagaggagctatcagggggaaggttgaaacccaagccaattgacgtgcaggtaataacacaccacatgcagcggtacgcagtctggttcggaggcagtatgcttgcctcaactcctgagttctatcaggtctgccacactaagaaggactatgaggagattggcccatccatctgccgccataatccagtatttggggtgatgagctag

SEQ ID NO: 27344 - DNA, 1749 bp, synthetic construct
  misc_feature 1..1749: note = Description of Artificial Sequence: Synthetic coding sequence
  source 1..1749: mol_type = other DNA
atcgatatagaatcaatggatacagataaagacgatccccacggcaggctcgagtataccgagcaccagggacgcatcaaaaacgccagagaagcgcattctcagattgagaagcggaggcgggataagatgaactccttcattgatgaactcgcatctctggttccgacatgcaacgcaatgtctcgcaagcttgacaaactgaccgttttacgtatggcagtccagcatatgaagaccctgcgcggagctaccaatccgtacaccgaggctaactacaaaccaacatttctttccgatgatgagctcaagcacttgatattgcgcgctgcggatggcttcctgtttgtagttgggtgtgatcggggtaagattctctttgtgtccgagtccgtcttcaagatcttaaactacagccagaacgatctgattggacagtccctgtttgactaccttcaccctaaggatatcgccaaggtgaaggagcagctgagttcttctgatactgcccctcgggaacggcttattgatgcaaaaaccggcctgcctgtgaagaccgacattactccagggccatctaggctctgttccggcgcacgcagaagctttttttgccggatgaaatgcaacaggcctagtgttaaggtggaagataaagattttccgtcgacttgctccaagaagaaggctgatcgaaaatctttttgtactatccattcgacaggctacctaaagtcctggccccctactaagatggggttggacgaggacaatgagccagacaatgaggggtgcaatctgtcatgcctggtagccatcggccgacttcactctcacgtggtgccccaaccggtcaatggtgagattcgggtgaagagtatggaatacgtaagcaggcacgcaattgatgggaagttcgtcttcgttgatcagagggccaccgcgatcctggcctatctgccgcaggagctcctgggcacatcttgttatgaatactttcaccaggatgatatcgggcatctagccgagtgtcaccgacaggtgctccaaacaagggagaagatcaccacgaactgctacaaattcaaaatcaaagacggttcattcataacgctgagatcccgctggttttctttcatgaatccctggactaaggaggtggagtacatcgtaagcaccaacacagtggttctggccaatgttttagaagggggtgacccaactttccctcagttaactgcttctcctcacagcatggactctatgctgccttcaggcgaggggggacctaaacgaactcacccgacagtcccaggcatcccaggtggcaccagagcaggagcaggaaagataggaaggatgatcgccgaagaaatcatggagatccataggattaggggtagttccccctcttcctgtggaagttccccactaaatataacctctacacctccaccagacgcatcctcacccggtgggaaaaagatcctgaatggtggcacgcccgacatcccgagcagtggactgctgagcggacaggcccaggaaaaccccggatacccttactcagactcatcctcgattcttggggagaaccctcacattggaattgacatgatcgataatgaccagggctcctcctcaccaagcaacgacgaagctgctatggctgtcatcatgtctctcttggaagcggatgctgggctgggagggccagttgactttagcgatctgccatggcccctatag

SEQ ID NO: 27345 - DNA, 1527 bp, synthetic construct
  misc_feature 1..1527: note = Description of Artificial Sequence: Synthetic coding sequence
  source 1..1527: mol_type = other DNA
atggctgaccagcggatggatatttcttcaaccattagcgatttcatgtcgcctgggcctacagacctcctgtcctccagtctgggcactagcggagtagattgtaaccggaaacgcaagggttcatccacagactatcaagaatccatggataccgacaaggatgacccacatgggaggcttgagtacactgagcaccagggtagaattaaaaacgcacgagaggcccacagccagatcgagaaacgccgacgtgacaagatgaactcctttatcgacgagctggcctcccttgtccctacatgtaacgcaatgagtcgtaagctagacaagctaacagtacttagaatggccgtgcagcacatgaaaacacttagaggagctacaaatccctacactgaagcaaactataagcccacattcttgagcgatgacgaattgaagcacctcatattacgggcagctgatggcttccttttcgtggtcgggtgcgatagaggaaagatactcttcgtgagcgagtccgttttcaagatcctaaattattcccagaacgacctgatcggccagagcctgttcgattatttacaccccaaggatatcgccaaggtcaaagaacagctttccagctcagataccgctcctagagaacgactaatcgatgctaagaccggtctgcctgtgaagactgatattacccccggaccatccaggctctgtagcggcgctaggagaagctttttttgcaggatgaagtgcaatagaccatccgttaaagtcgaagacaaagatttcccatctacctgctcgaagaaaaaggtgctgcagaccagagagaagattacgacgaattgttataaatttaagatcaaagatggctcgttcatcaccttacgctcccggtggttctcatttatgaatccatggaccaaggaggttgagtacattgtcagtacgaacacagtggtgctggccaacgtcttagaaggtggtgacccgacattcccccaactgaccgcctctccacattcgatggatagcatgttgccatctggtgagggtggcccaaagagaacccatcccactgtccccggtattccgggaggcactcgcgcaggtgccggaaaaataggacgaatgattgcggaagaaatcatggaaatccatcgcattaggggctcatccccgagctcctgtggttcttcccctctgaatattacatccacgccccctcctgacgcatcatctccaggtggaaagaagatcctgaacgggggtactccggatatcccaagctccggtttgctgtctgggcaagctcaggagaaccccggatacccttactctgactcaagctccatcctgggggaaaacccgcatattggcatcgatatgattgataatgaccagggatcctccagccccagcaatgacgaggctgctatggctgtcattatgagcttgcttgaagccgacgccggactcggcggaccagtggacttctctgacttaccatggccgctgtag

SEQ ID NO: 27346 - DNA, 1878 bp, synthetic construct
  misc_feature 1..1878: note = Description of Artificial Sequence: Synthetic coding sequence
  source 1..1878: mol_type = other DNA
atggccgaccagcgcatggatatcagcagtacaatttccgatttcatgtcaccgggtcctacggatctgctctccagcagccttgggacatcaggagtagattgcaatcgaaaaaggaaagggagcagcacagattaccaagagtctatggataccgacaaagatgacccacatgggagattagagtatactgaacaccagggcaggattaagaatgcaagggaggctcatagccaaatcgagaagcgccgaagggataaaatgaacagtttcattgacgagctcgcaagccttgttcccacatgcaacgcaatgtctcggaaactggacaaactgacggtcctccgcatggcagtacagcatatgaagaccctacggggagctactaacccgtacacagaggctaactataagccaacattcctgtctgacgacgagctgaagcatctgatattgcgggctgccgacggttttctcttcgtggttggttgcgataggggcaagatcctcttcgtttcagagagcgtgtttaaaatcctgaactattcccagaacgatttgatcgggcagtcgctcttcgactatctccatccaaaggacattgcgaaagtcaaggaacagttgagttcaagcgatacggcacctagggagagactgattgatgcgaaaactggattaccagttaaaacagacattactccagggccaagccgactgtgcagcggcgctcggaggtcctttttctgccggatgaagtgtaatcgtccaagcgttaaagttgaggataaggattttccctctacttgcagtaaaaagaaagatagaaagtctttctgcactatccacagcaccggttaccttaagtcttggccacctactaaaatgggcctggatgaggataacgaacccgacaacgagggctgtaacctcagctgcctggttgcaattgggaggctacattcacacgtggtccctcagccagtcaatggcgagatccgagtcaaaagcatggagtacgttagcaggcacgctatcgatgggaagttcgtgttcgttgatcaacgggcaacggcaatcctggcttacctgcctcaggagctcttgggaaccagctgctacgagtattttcatcaggacgatatcgggcatctggctgaatgtcacagacaggtactacagaccagagaaaaaattaccacaaattgctacaaattcaaaatcaaagacggctctttcatcactcttcggagtagatggttctctttcatgaatccctggaccaaagaggtggagtacatcgttagtactaacacggtggtccttgcaaatgttctggaaggaggggatcccacattcccccagctcaccgcttccccccactccatggattcgatgttgccatcgggtgagggcggacccaagaggactcaccccaccgttccagggattccagggggtactagagccggtgccggaaagatcggaagaatgattgccgaagagatcatggagatacacaggattcgcggaagttccccttctagctgtggcagttctcctttgaatatcacctcaactccccctcccgacgcgtcctcacctggaggcaagaaaatcctgaatggagggactccagacatccccagttccggactgctctcagggcaggcccaggagaacccaggatacccttactcagacagctcctccattttgggcgagaatccccatatcgggatagatatgattgacaatgatcaagggtcttcgtctcccagcaatgacgaagccgcaatggctgtcattatgtcactgctcgaggctgatgccggactcggcggaccagtcgatttctctgatctcccctggcccctctag

SEQ ID NO: 27347 - DNA, 1581 bp, synthetic construct
  misc_feature 1..1581: note = Description of Artificial Sequence: Synthetic coding sequence
  source 1..1581: mol_type = other DNA
atggcggaccagcggatggatatctcttctacaatttcagacttcatgagccctggtcctacagatctacttagctcctcactgggtacgagtggcgtggactgtaaccgcaagagaaaagggtccagcactgattatcaagaaagcatggataccgacaaggatgaccctcacggacgcctggaatacaccgaacaccaggggcgaatcaagaatgctcgcgaggcacactctcagatcgagaaacgccgacgtgacaagatgaactcgttcattgatgagctggcttctctcgtgccgacctgtaatgccatgtccaggaagcttgacaagcttacagtgctgcgtatggccgtacagcatatgaagacgctgaggggcgctacgaatccttatacagaggcgaactataaacctacatttttgagtgatgatgagctcaagcatctgatcctgagagctgccgacggcttcttattcgtggtggggtgcgacagagggaaaattcttttcgtgtccgagagtgtttttaagatcctgaactacagccaaaatgatctgatcggtcaatcgctctttgattatctgcatcctaaagatatcgccaaagtcaaggagcagttaagcagcagtgatacagccccaagagaacgcctcattgacgcaaaaaccggtctcccagttaagacagatatcacccctggcccatctagactgtgcagcggcgcacgcaggtccttcttctgccgcatgaaatgcaatcgaccttctgtaaaggtcgaggataaagactttccatccacctgcagcaagaaaaaggctgacagaaaaagcttttgtacaatccactcgaccggctacttgaagagctggccacccaccaaaatgggactggacgaggataatgaaccggataatgagggatgtaatctctcatgcctcgtagctattggcaggcttcactctcatgttgtgccacagcctgtgaacggggaaatcagagtaaaatccatggagtatgtctcgcgccatgctatcgatggcaagtttgtgtttgtcgaccagagagcgaccgcgatcctggcctacctacctcaggagctcctaggcacgagttgctacgaatactttcatcaagacgacatcggccacttagccgaatgccacagacaagtccttcagaccagagagaaaatcaccactaactgttacaagttcaaaattaaagacggctctttcattacgttgcgatcgaggtggttctcattcatgaatccctggactaaggaagttgaatacatcgtgagtaccaataccgtggtcctcagccgggtcgacaccggtcacctggggcaggtggaatggtgtacagtactgtcgcgaccagacagtagattcttgattgcaggcatgttcacggaaccgaccagttggaaggctggaacccagccatcccattcctcccagcatccccctaccgcctggactgcctgctgccctctggagaaggtagctcagagaggaccaactcctctgttccaggggttccagggtgagccaggtcttgggcaagagaaatag

SEQ ID NO: 27348 - DNA, 1878 bp, synthetic construct
  misc_feature 1..1878: note = Description of Artificial Sequence: Synthetic coding sequence
  source 1..1878: mol_type = other DNA
atggcagatcagagaatggatatatcttctactattagtgacttcatgagcccaggccctactgacttactgtcctcatcactcgggaccagtggagtcgattgtaataggaagcgtaagggctcgagcacagattaccaggagtcaatggacaccgataaggacgaccctcacggccgactcgagtacacagagcatcaggggaggattaagaatgctagagaagcacacagtcagatcgaaaaacggagaagagataaaatgaactcttttattgacgagctggcatccctcgtccccacctgtaatgccatgtccaggaaactcgacaagttgactgtgcttaggatggcagtgcagcacatgaagaccctcaggggcgctactaacccctacactgaagctaactacaagcctactttcctatctgatgacgagcttaaacatctgatactgagggctgcagatggctttctgttcgtggtgggatgcgaccggggtaagatcctgtttgtctcagaaagcgtatttaagattttgaattattcacaaaacgacctaatcggacaaagcttgttcgattacctgcatcctaaagatatcgccaaggtgaaggaacagctgtcttcgagtgatactgctccacgtgaacgtctcatcgatgctaaaaccggacttcccgttaagaccgacatcacccctggcccatccagactgtgcagcggggcacgacgctctttcttttgtaggatgaaatgtaatcggccatctgttaaagttgaagataaagacttcccgtccacctgcagtaaaaagaaagacagaaagtctttctgtactatccactcaactggttacctcaaatcgtggcccccaaccaagatgggcctggacgaggacaatgaacccgataatgaaggatgtaatctgtcttgcctggtggctatcggcaggttgcacagtcatgttgttccgcaaccggtgaatggagagattagggtgaaatccatggagtatgtgtctcgacacgcaatcgacggcaaattcgtttttgtagaccaacgagccacagcaattctggcttatcttccccaggaactgctgggtacaagctgctacgagtacttccaccaagatgatatcggccatctagccgagtgtcatcgccaggtcctgcaaacgcgcgagaaaattacaacgaattgttataaatttaaaattaaggacggatccttcattactctgcgctcaagatggttcagctttatgaacccgtggacgaaggaagtggaatacattgtgtccaccaacacggtggtcctggccaatgtgctcgaggggggtgaccctacatttccccagcttacagccagcccgcactcaatggatagcatgctcccatctggcgaaggtgggcctaaacgaacccatccaactgtgcccggtatccccggaggaacaagggcaggcgctgggaaaattgggagaatgatcgcagaagagattatggagatccatagaatacggggaagtagcccaagttcctgcggttccagtcccctgaacattacttccacccctccaccagacgctagcagtcctgggggaaagaagattctgaacggagggacgccagacataccaagtagtggattattgtccgggcaggctcaagagaaccccggatacccctatagcgacagcagtagcattctgggcgagaaccctcacataggcatcgacatgatagacaacgatcagggcagtagctcgcccagcaacgacgaagcagccatggccgtcatcatgtcccttctagaagccgatgctgggctgggaggaccagtcgacttcagcgacttaccctggcctttatag

SEQ ID NO: 27349 - DNA, 1752 bp, synthetic construct
  misc_feature 1..1752: note = Description of Artificial Sequence: Synthetic coding sequence
  source 1..1752: mol_type = other DNA
atgatcaacattgaaagcatggatactgacaaggatgatccacatggcagactcgaatacacagagcaccaggggaggatcaagaatgcaagagaggcgcacagccagattgagaagcgccgacgggataaaatgaactcattcatagacgagttggcttctctcgtccccacttgtaacgctatgtcccgtaaacttgacaagttgacagtccttcgtatggctgtgcagcacatgaagaccttaagaggggctacaaacccttatacagaggcgaattataagccaacgtttctatccgacgacgagctgaagcacctaattctgagagccgctgacggtttcctctttgtggtaggttgcgataggggaaaaattctgttcgtatcggaatctgtatttaagattctgaactatagccagaatgatctgattgggcagagtctgttcgattacctgcatcctaaggacatcgctaaggtgaaagagcaactgtcatcatcggacacggcccctagagaaaggttaatcgacgccaaaacagggctgcccgttaagaccgatatcactccaggacctagtcgactgtgcagcggcgcaaggaggagcttcttttgtagaatgaaatgcaacagaccctctgtgaaagtcgaggacaaagactttccatctacctgttcaaagaagaaggctgatcggaagtcgttttgcacaattcactcaaccggttaccttaagagttggcctcccacgaagatggggttggatgaggacaacgaacccgacaatgagggctgcaatctctcatgcctggtcgccatcgggcgtctccatagccacgttgtcccccaaccagtcaatggcgaaatccgtgttaagtctatggagtacgtttcgcggcatgcgatagacggcaaatttgtgttcgtggatcagcgggcaactgccattctggcgtacctgccgcaggagctcctcggaacgagttgctatgagtacttccatcaggatgatatcggtcatctggccgaatgtcaccgtcaggtattgcagaccagagagaagatcacgacgaactgctacaagtttaaaatcaaagatggctcttttataactctgagatcccgctggttcagttttatgaatccttggactaaggaagtggaatacatcgtgtcaacaaacacagtcgtcctggctaatgtcctggaaggaggagaccctaccttccctcagctcacagcatctcctcactcaatggactccatgttacccagcggtgaagggggacccaagcggacccacccgactgttccaggtatcccagggggtactagggccggagcgggtaaaatcggacgcatgattgccgaggagattatggagatacaccgaatccggggatcgtctccttcctcctgcggtagcagccctctgaatattacatccactccccctccggacgcaagctctccaggcggaaagaaaatactgaacgggggaacgcctgacattccatcctccggactgctatcagggcaagctcaggaaaatccgggttatccgtacagcgactcctcatccatcctcggcgaaaacccccacattggcattgacatgatagacaacgaccagggtagcagcagcccaagcaatgacgaagccgcaatggccgttatcatgagtctgctcgaggccgacgccggactgggaggccctgttgacttttccgacttgccatggcctctctag

SEQ ID NO: 27350 - DNA, 1881 bp, synthetic construct
  misc_feature 1..1881: note = Description of Artificial Sequence: Synthetic coding sequence
  source 1..1881: mol_type = other DNA
atggcggatcaaaggatggacattagtagcacaattagcgatttcatgtctcccggaccaactgacctgctgagcagctcgcttgggacatcgggtgtggattgtaaccgcaagcgcaagggcagcagcacagattaccaggaatccatggatactgataaggacgaccctcacggacgattggaatacactgagcaccagggacggatcaagaacgccagggaggcccatagccagattgagaagagacggagagacaaaatgaactccttcattgatgagctggccagccttgtccccacatgtaacgccatgagtagaaagctggataagttgaccgtgcttcgtatggctgttcagcacatgaaaacactcagaggggctaccaatccctataccgaagctaattataagcctacgtttctctctgacgatgaattgaagcacctgatcctccgggctgccgacggtttcctgttcgtggttgggtgcgatcggggaaagattctcttcgtgtccgaatctgttttcaaaatattgaactactctcagaacgatttgatcggacagtctctttttgattacttgcaccctaaagacatcgctaaagttaaggaacagttgtcgtcttccgataccgctccacgggaaagattaatagacgccaagacaggactcccagtcaagaccgacataacgccaggacccagcagactttgttccggcgcaaggcgtagcttcttctgtaggatgaagtgtaatagacctagcgtgaaggtggaggacaaagatttcccctcaacctgtagcaagaagaaagccgataggaaaagtttttgtacaatccactcaactggctatctgaaatcctggccgcctactaagatgggactggacgaggataatgaacctgacaatgagggatgcaatctatcctgcttggtagcaatcgggcgactccattctcacgtggtgccccagcccgtcaacggagaaatcagagttaaatccatggaatacgtctcacgacatgccatcgatggaaagtttgtttttgtggatcagcgggctaccgcgatcctcgcttacctccctcaggaactattgggcacatcatgctatgaatactttcaccaagacgatataggtcacctggctgagtgccataggcaggtgctgcagactagggagaagattacaaccaactgctataagtttaaaatcaaagacggatctttcatcactcttcgcagtcgctggttttccttcatgaacccatggacgaaggaagtcgaatatatcgtgagcacaaacacagtggtcctggctaatgtcttagagggtggagatcctaccttcccccagctcactgccagcccccattccatggatagtatgctaccgtccggagagggcggaccgaaacggacacaccctactgtcccaggtatcccaggtggaacacgggcaggtgctgggaagattggcaggatgattgccgaagagatcatggaaattcatagaatccggggaagcagcccttctagttgcggctcctctcctctcaatattacctctacaccacctccggacgcaagctcacctggaggcaagaagatactgaatgggggaactcctgacatccccagctctggactactgtcaggtcaggcccaggagaatcccggatacccctactctgattcctcaagcattctcggggaaaatccccacattggcatcgacatgatcgacaatgatcagggctcaagctctccctctaacgatgaggctgccatggcagtcataatgtctttattggaggcggatgccggtttaggaggccctgtggacttctcagacctaccatggcctctgtag

SEQ ID NO: 27351 - DNA, 1749 bp, synthetic construct
  misc_feature 1..1749: note = Description of Artificial Sequence: Synthetic coding sequence
  source 1..1749: mol_type = other DNA
atgatcaacatagagagcatggataccgataaggatgacccacacgggcgactggagtacaccgagcatcagggcagaatcaagaatgccagggaagctcatagccagattgaaaagcggaggagggacaaaatgaattcatttattgatgaactggctagtctagtgcccacatgtaatgccatgagccggaaactggataagttgacagtcctgagaatggctgtccagcatatgaaaactctaagaggagctaccaatccttatactgaggccaactacaaaccaacttttctgtcagatgacgagcttaagcatctgattctcagagctgcagacggattcttgttcgtggtcggatgcgacagaggcaagatcctttttgtgtccgagtctgtctttaaaatacttaactactctcagaacgatcttatcggccagagcctcttcgattacttgcaccctaaggacatcgccaaagtgaaagagcagcttagttccagcgacactgccccacgggaacggttaatcgatgcaaaaactgggctaccagttaagactgacataactccgggacccagccggctgtgctccggagctcgtcgatcctttttctgccggatgaagtgcaatcgcccatccgttaaggtggaggataaggacttccccagcacatgttcaaaaaagaaggaccggaaaagtttttgcacaattcacagcacagggtatctcaagagttggccacctacaaagatgggattggatgaagataacgagcccgacaacgaaggctgtaacctgtcgtgtcttgtggctatcggcaggctacattcccacgtagtgccgcagcccgtaaacggcgaaatccgggtgaaatccatggagtacgttagtagacacgccattgatggtaagttcgtctttgtggatcagcgagcaacggctatcctggcttatcttccacaggaattgctcggcacgtcttgttatgagtattttcaccaagacgatattggtcacctagccgaatgccatagacaggtgttgcagacccgcgagaagatcaccaccaactgctacaaatttaagataaaggacggttcctttattaccctgcggtcacgctggttttccttcatgaatccctggactaaggaggtcgaatatatagttagtactaatactgtcgtgttggctaacgtactggaaggtggggaccccactttcccccaattaactgcatctccacactccatggacagtatgctgccttccggcgagggcggaccaaaacggactcatccgactgttcctggcattcccggtggaacccgggctggcgcaggaaagatcggccgaatgatagcagaggagatcatggagatccatagaatacgcggatcctccccttctagctgtggctcaagtccacttaacatcaccagcactcccccaccggacgcatcgtcgccaggtggcaagaaaatcctcaacggcggtacccctgatatcccatctagtgggcttttatcaggacaggctcaagagaatccaggatacccttatagcgatagcagttccatcctgggagagaacccccatattgggattgacatgattgataatgatcagggctctagtagcccctcgaatgacgaggctgcgatggccgttataatgtccttgctggaggccgatgcaggtctggggggacccgtggacttctccgacttaccatggccactctag

SEQ ID NO: 27352 - DNA, 219 bp, synthetic construct
  misc_feature 1..219: note = Description of Artificial Sequence: Synthetic coding sequence
  source 1..219: mol_type = other DNA
atgatcaatattgagagcatggatacggacaaggatgaccctcatggtaggcttgagtacactgagcaccaaggaagaatcaaaaatgcacgggaagcccactcacagatagagaagcgacgcagagacaagatgaattcttttatcgatgagctagcatccctggtacccacttgcaatgctatgtcaaggaagcttgataagcttactgtcctctag

SEQ ID NO: 27353 - DNA, 231 bp, synthetic construct
  misc_feature 1..231: note = Description of Artificial Sequence: Synthetic coding sequence
  source 1..231: mol_type = other DNA
atggcggaccagcgtatggacatcagcagcacaatctcagatttcatgtcccccggtcccacagatttactgtcatcttctctgggcacgtctggggtcgattgtaaccggaaacggaagggcagctctacagactatcaggaaagcatggatacggacaaggacgaccctcacgggagacttgagtataccgaacaccaaggcaggatcaagaacgcacgcgaggcatag

SEQ ID NO: 27354 - DNA, 72 bp, synthetic construct
  misc_feature 1..72: note = Description of Artificial Sequence: Synthetic coding sequence
  source 1..72: mol_type = other DNA
atggctgaccaaaggatggacattagttccaccatctctgacttcatgtcacccggaccaaccgacctgtag

SEQ ID NO: 27355 - DNA, 408 bp, synthetic construct
  misc_feature 1..408: note = Description of Artificial Sequence: Synthetic coding sequence
  source 1..408: mol_type = other DNA
atggcagatcaaaggatggatatttcatcaaccatcagcgattttatgtcccctggtccgacggatcttctgtcatcatctttgggaacaagtggagtcgactgcaataggaagaggaaggggtccagcacagactaccaagaatcaatggacacagataaggatgaccctcacggacgcctcgagtacaccgaacatcaaggaagaattaagaatgcacgggaagcccacagccagattgaaaagcgaaggcgcgacaagatgaacagctttattgacgaactggcttcactggtgccgacctgcaacgccatgagccgtaagctcgacaaactcaccgtgcttcggatggcagtgcagcatatgaagacccttcgcggagccactaacccgtatacagaggcatag

SEQ ID NO: 27356 - DNA, 141 bp, synthetic construct
  misc_feature 1..141: note = Description of Artificial Sequence: Synthetic coding sequence
  source 1..141: mol_type = other DNA
atgattaacatagagtccatggatacagataaggacgacccacatggcagactcgagtacaccgagcaccaaggaagaattaaaaacgcacgcgaggcccactcccagatcgaaaaaaggcggagggacaagatgaactag

SEQ ID NO: 27357 - DNA, 426 bp, synthetic construct
  misc_feature 1..426: note = Description of Artificial Sequence: Synthetic coding sequence
  source 1..426: mol_type = other DNA
atgatcaacatagagtccatggacacggataaagacgacccgcacgggagactggagtacacagaacatcaaggacgcatcaagaacgcccgagaagcgcacagccagattgagaagaggcgtcgcgacaaaatgaactcgtttatcgacgagctggcctctcttgtcccaacctgtaatgctatgagcagaaaacttgacaaactgacagtgctaaggatggcggttcagcatatgaagaccctcagaggggcaacgaatccctacacagaggctaattataaacctactttcctgtcagacgatgaactgaagcatctgattctcagagcggctgacgggttcctgtttgtggtgggttgtgatagaggtaagatcctcttcgtttcagagtctgtttttaagattctcaattattcccaatag

SEQ ID NO: 27358 - DNA, 306 bp, synthetic construct
  misc_feature 1..306: note = Description of Artificial Sequence: Synthetic coding sequence
  source 1..306: mol_type = other DNA
atggctgaccagaggatggacattagcagcaccatcagcgatttcatgtcacccggaccaacagatttactgtcaagttctttggggaccagcggcgtcgattgtaatcgaaagaggaaaggatctagcaccgattaccaagaatcaatggataccgataaggacgatccacatggccgtctcgagtacacggagcatcagggccgtataaaaaatgccagggaggcccatagccaaattgaaaaaaggcggagagataagatgaatagctttattgatgaattagcatctctggtccctacgtag

SEQ ID NO: 27359 - DNA, 180 bp, synthetic construct
  misc_feature 1..180: note = Description of Artificial Sequence: Synthetic coding sequence
  source 1..180: mol_type = other DNA
atggccgatcagagaatggacatatcttctaccatttctgactttatgtcccctggccctacagatctcctttcttcatctttaggtaccagtggagtggactgcaatcggaagcggaagggctccagtaccgactaccaggaatccatggacaccgacaaggatgatccacatggttag

SEQ ID NO: 27360 - DNA, 1683 bp, synthetic construct
  misc_feature 1..1683: note = Description of Artificial Sequence: Synthetic coding sequence
  source 1..1683: mol_type = other DNA
atggaaccgctacagcagcagcagcagcagcagcagcaacagcagaaacagcctcaccttgcacccttacagatggacgcccgagaaaagcaagggcagcaaatgagagaggcacagttcctgtacgcacaaaaactagtgacgcagcctaccctgctcagtgctaccgccggacgtcccagtggcagcactcccttgggccctctcgccagggtccccccaactgcagccgtggcccaggttttcgagaggggcaatatgaatagtgaaccagaagaggaggacggcggactagaggacgaagatggcgacgatgaggttgccgaggtggctgagaaagaaacacaagctgccagcaaatattttcacgtccagaaagtggcacgacaggatccacgcgtcgctccgatgtccaaccttctgcccgctccgggactgcctccacacggccaacaagcgaaagaggaccacactaaggacgctagtaaggcctcaccctccgtgtctactgccggacagcctaactggaatttagacgaacagctgaaacaaaacggcggtctggcatggtccgacgatgccgacggcggaaggggaagggagataagccgggattttgccaaactttacgagctcgatggagacccagagagaaaagagttcctggatgatctctttgtgtttatgcagaaacgcggaacgcctatcaaccgaatccctattatggccaagcaaattctcgacctgtacatgctatacaaactggtgacggaaaaaggcggactggttgagattatcaataagaagatttggagagaaattaccaagggtttaaacctcccaaccagtatcacctcagcggcattcactctccgcacacagtacatgaagtatctttacgcctatgaatgcgagaagaaagccttgtcatcccctgctgagttgcaggccgctatcgacgggaacaggcgggagggtaggagaccttcctactcgagcagcctgtttgggtattcgcccgctgctgcaaccgccgctgccgcagccggagcacccgcattgctgagcccccctaagatccgatttccaatactgggcctcggttccagctccggcacgaatacctcctcccctcgaattagcccagcaaccacactgaggaaaggagacggagcacccgtgaccactgttcctgtgcccaaccgcttggcagttcccgtaaccctagcttcacagcaggctggcacccgcaccgctgcactcgaacagttgcgggagcggctcgagtctggggagccggctgagaaaaaagcgtcccgccttagcgaggaggaacaacggctggtgcagcaagcattccagaggaactttttctcgatggctcgccagttacctatgaagatccgcatcaacggcagggaggatcgggctgaggcatccgcggcagctctcaatctgactacaagctctatcggatcgatcaacatgagtgtcgatatcgatggcacaacttatgccggagttctgttcgcccaaaagccagtggtgcatctgatcacagggagtgcaccccagtccctggggagttctgcttctagtagctccagctcccactgctccccttcgcccacgagctccagaggcaccccatccgccgaacctagcacttcatggtctttgtag

SEQ ID NO: 27361 - DNA, 1335 bp, synthetic construct
  misc_feature 1..1335: note = Description of Artificial Sequence: Synthetic coding sequence
  source 1..1335: mol_type = other DNA
atggagcccttgcagcagcagcaacaacaacagcaacagcagcagaaacaaccccacctggcacccctccagatggacgctcgggagaaacagggccagcagatgagggaagcacagtttctttatgctcagaagctggtgacacagccaacccttctgtccgcaacggcgggtagaccatccggcagcaccccattaggcccactggcgcgagtgccacctacagccgcagtggctcaggtttttgagaggggcaatatgaactcggagcccgaagaggaagatggaggcctggaagacgaggacggagacgacgaagtggctgaagtggctgagaaagagacacaagcagcgagcaaatatttccacgtccagaaagtggcacgccaggaccctagagtcgccccaatgtccaacctgcttccagctcccggtttacctcctcatggccaacaggcaaaggaggatcatactaaagacgcatcaaaggcctcacccagtgtcagtacagcgggacaacccaactggaacctagacgagcagttgaagcagaacggcggattggcctggtcagatgatgctgatgggggtagaggccgagagatttccagggattttgcaaagctgtatgagctcgacggtgatccggaaaggaaagaattcctggatgatctgttcgtttttatgcaaaaaaggggcacccccatcaaccggattcccattatggccaagcagatcctggacctctacatgttatacaagctagtaacagagaaaggaggtctggtagagattataaataaaaaaatctggcgcgaaatcacgaaggggctaaacttgcctacctcaatcacctcagcggcatttactttgcgaacccaatatatgaaatatctatatgcatacgaatgcgaaaaaaaggcactgagctcacccgctgaacttcaggcggctattgacggcaaccgccgagaaggcaggcgtcctagctactcgtcctctctgttcggttattcccctgctgctgccacagccgctgcggctgccggagctccagctctgctcagtccccctaagatacggtttcccatcttgggcttgggcagctccagtggtacaaatacctcatcacctcggatcagcccagccactacattgcgaaaaggagatggtgccccagtgactactgtgcccgtgccaaaccggttagcagtgcccgtcacgctagcttctcagcaggctggaacccgcaccgccgcattagagcagcttagagagagactggagtcaggggaacccgcagagaaaaaagcatctggaacatggtgtcagtag

SEQ ID NO: 27362 - DNA, 1413 bp, synthetic construct
  misc_feature 1..1413: note = Description of Artificial Sequence: Synthetic coding sequence
  source 1..1413: mol_type = other DNA
atggaacctctccaacagcagcagcagcagcaacagcagcagcaaaaacagccccatcttgctcctttgcagatggatgctcgagagaagcaagggcagcagatgagagaagctcaattcctgtatgcacaaaagttggttacacaaccgacactactgtcagccacggcaggtcggcctagtgggagcacgcctctgggaccattagctcgagtgccgccaacagctgcagtagcacaggttttcgagcgaggcaacatgaactcggagcccgaagaagaagatggaggtctcgaggacgaagatggagatgacgaagtggccgaggtggccgaaaaagagacacaggcggcttcaaagtattttcacgtgcagaaggtcgccaggcaggatccacgggtggctcctatgtcaaatctcctgcccgctccaggcctcccaccacacggacagcaggccaaggaggaccacaccaaagacgcttccaaagctagcccctctgtgtccactgccggacaacctaactggaatctggatgagcaattgaagcagaatgggggtctcgcttggtcggatgatgctgacggcggtcggggtagggagattagccgtgacttcgcgaagctgtacgagctggatggagaccccgagaggaaggagtttctggacgatcttttcgtcttcatgcagaagaggggcaccccaatcaatcgcatcccgataatggctaaacagatcctggacctgtatatgttatacaagctggttaccgaaaagggcggactggtcgagattattaacaagaagatctggcgggagattacaaagggactgaacctgcccacatctattaccagcgccgcttttaccctcagaacacagtacatgaaatatttgtacgcttacgaatgcgagaagaaggcgttgtcctccccggcagaattacaggcggctatcgatggcaaccgtcgggagggcagaagaccctcttactcctctagcctctttggttacagccccgctgccgcaaccgcagcagcagctgccggtgcgcctgccctcctcagtcctccgaagattaggttcccaatactggggctaggatcttctagtggtacaaacacgtcttcgcccaggattagtccagccactacacttcgcaaaggtgacggggcaccggtgacaaccgtgcccgtacctaacaggctcgcagtgcccgtcaccctagcttcccagcaagctgggactagaacggctgctctcgaacagcttcgagagagactggaatctggtgaaccagccgaaaagaaagcatcccgtctgtccgaggaagagcagagacttgtgcagcaagcctttcagagaaatttcttttccatggccagacagcttagcattctttatgttttctag

SEQ ID NO: 27363 - DNA, 7934 bp, synthetic construct
  misc_feature 1..7934: note = Description of Artificial Sequence: Synthetic coding sequence
  source 1..7934: mol_type = other DNA
atgggcgaacacgggttggagctagccagcatgatacccgctctgcgagagctggggagtgccactccagaagaatacaatacggtggtgcagaaaccacgccaaatactatgtcagtttatagaccggatactgaccgacgttaatgtggttgccgtggaattggtgaagaagacagattctcagccaacatctgttatgttattggattttatccagcacataatgaaatcctctccacttatgtttgtgaatgtgtccggctctcacgaagcgaaaggctcttgtatcgaattctccaactggattattacacgcctgctaagaattgcggctacacccagctgccatctactgcacaagaagatctgcgaagtgatatgctcactgcttttcttatttaaatcaaagtcacccgctatctttggagtgttaaccaaagagcttctacagctcttcgaggatctggtctacctgcaccgacgcaacgtgatgggacacgcagtggagtggcctgtcgtgatgtccagattcctcagccagctcgatgaacacatgggttatcttcagagcgcgccactacagctgatgagcatgcagaacctggagttcatcgaagtgacgctcctcatggtgctgacccggatcattgcgattgtattctttcggagacaagaactgctgctgtggcagatcgggtgtgtacttctggagtatgggagtccaaagattaaaagcctggcaatctctttccttaccgaactctttcagctaggaggtctcccggcacaaccagcgtcaactttcttttccagtttcttggagctgctgaaacatcttgtggagatggacaccgatcagctaaagttgtacgaagagcctctgagcaaactgataaaaacccttttcccctttgaggctgaagcttaccgcaacatcgagccagtctacctgaatatgctcctcgagaagctttgcgtgatgttcgaagatggggtccttatgcgcctgaagtccgacctgttgaaagccgcactgtgccacctgctccagtattttctcaagttcgtgcctgcaggctacgagtctgctctccaagttcggaaagtgtatgtacgaaacatctgcaaagcccttctggacgtgcttgggatcgaggtggacgccgaataccttttaggccctttatacgccgcattgaaaatggagtccatggaaattatcgaagaaatccaatgccagacccagcaagagaacctgagcagcaactccgatgggatctctcctaagagacggagactgtcctcatcgttaaacccaagtaagagggcaccaaaacaaactgaggaaatcaagcacgtggacatgaatcagaaaagcatactgtggtcagcactgaaacagaaagcagagtcactccagatcagcttagagtattccggcctcaagaatccagtaatcgaaatgctcgaggggattgccgtggtgctgcagctgacggccctttgcacagtgcactgtagccaccagaacatgaactgccgcacattcaaggactgtcagcacaagtccaagaaaaagccatccgtggttatcacatggatgagtcttgatttctataccaaggttcttaaatcctgccgttcgctgcttgagtcagtgcagaagctggacctggaggccacgatagacaaagtggtgaagatttatgacgcgttgatctacatgcaggttaacagctccttcgaggaccatatactcgaagacctgtgtgggatgctgtctctcccttggatttactcacactcagatgacggctgtctgaaactgacgacgtttgctgctaatctgctgacactttcttgccgtatttccgatagctactctccccaagcccaatctaggtgtgtgtttctgctaactcttttcccgcgtaggatctttctggaatggcggacagcagtatataattgggcactgcagtcatcacatgaagtgatcagagcttcttgtgtgtctggctttttcatactgcttcagcagcagaattcatgcaatagagtgccaaagatcctcatcgacaaagtaaaggacgacagcgatattgtcaagaaggagtttgcctccatcctggggcagcttgtgtgtaccctgcacggaatgttttatctcacttcgtccctcacagaacctttttcagagcatgggcacgtggacctgttttgtcgcaacttaaaggcaactagtcagcacgagtgttctagcagccaactgaaagccagtgtttgcaagcccttcttgttcctgctgaaaaagaaaatcccttcacctgtcaagctcgcttttatagacaacttgcatcatctctgtaagcatcttgacttcagggaagacgagaccgacgtgaaagctgtgctcggcacattgcttaatctgatggaagacccggacaaagatgtacgcgtggccttttcgggaaacattaaacacatcctggagagcctcgattccgaagatgggtttatcaaagaactgttcgtgctgcggatgaaggaggcttacactcacgctcaaattagccgtaataacgagctcaaagacacacttattctgacgactggtgatattggacgagcggctaagggcgatcttgttccatttgctttactgcacctcctccattgcttgctcagcaaatccgcatcagtctctggcgcagcatacaccgaaattcgcgctctggtggccgctaaatctgttaaattgcagagttttttttcccagtacaaaaagccaatctgccaatttctggtcgagtccctacattcttcccagatgaccgcactgccaaacaccccatgccagaatgccgacgtccgcaagcaagacgttgctcatcaacgcgagatggcgctgaatactttgagcgagattgccaatgtcttcgacttccccgatttgaaccgcttccttacaaggacactccaggtactgctgcctgatttagccgctaaggccagtcctgctgctagcgcgctcattagaactctaggaaagcagttgaacgtgaataggcgcgagatccttatcaacaactttaagtatattttctctcatcttgtgtgctcatgctccaaggatgagctggagagagcacttcattacctgaagaacgagacagaaatcgaactcggatccttactgagacaggacttccaagggctccacaacgaacttctgttgcgcatcggagaacactaccaacaagtttttaatggtctgtccattctcgcctcgttcgcatcatcagatgacccgtatcaaggcccaagagacataatatctccagagctgatggccgattatttgcagcctaaattgctcggaatcttagcattcttcaatatgcaacttttatccagttcagtagggatagaggacaagaagatggcgctgaacagtttgatgtccctcatgaaactaatgggaccaaaacacgtttctagcgttagggtcaagatgatgacgactctgcggaccggactaaggtttaaagacgattttccagaactgtgctgccgcgcatgggattgctttgtgcgttgcctggaccatgcatgcctgggtagtttgttatcgcacgtgattgtcgccctgctaccgctaattcatatccaacctaaggagaccgccgctatttttcactacctgattatcgaaaatcgcgacgcagtacaggattttctccacgagatttattttctacctgatcaccccgaactcaaaaagatcaaggcagtccttcaggaatatagaaaggaaacctctgagagcacagacctgcaaacaactttgcagttatcaatgaaggctattcagcatgaaaacgtggatgtgaggatccatgccctgacaagtttaaaagaaaccctgtacaaaaatcaagaaaagttaatcaaatacgctactgacagcgaaacagtggagccgatcatctcccagctcgtgacagtgttactcaaaggatgccaggatgccaactcccaggccaggctcctttgcggagagtgcttgggggaactgggggctatcgatcctgggagactagactttagcaccacggagacccagggcaaggattttaccttcgtgacgggagtcgaggatagttcattcgcgtatggcctgttaatggagctcacgagggcttacctcgcgtatgccgataattctagggcccaggactctgcagcctacgccattcaagagctcttgagtatctacgactgtagagagatggagaccaatgggccaggccaccagctctggcggaggtttcctgagcacgtgcgtgagatccttgagccacacttgaacacaagatacaagtcatcacaaaaaagcacagactggtctggagtgaagaagcctatctatctgagtaagctaggttcaaattttgcagagtggtcggcatcttgggccggttacttgatcactaaggttcgccacgacctggcgtctaaaatctttacatgctgcagcattatgatgaagcacgacttcaaagtgacgatatacctgttgccgcatattctggtgtatgtcttgctggggtgcaatcaggaagatcagcaggaggtttacgcagaaattatggcagttctgaaacatgatgatcagcacaccattaatacccaggatatagcgtcagatctctgccaattatccacgcagaccgtgttttcaatgttggaccatctgacacagtgggctcgtcacaagtttcaagccttaaaggccgaaaaatgcccccattctaaaagcaatcgaaacaaagtggacagcatggtgagcacagtggattacgaggattatcaaagcgtcacccgattcctggacctgattcctcaggacaccctggctgttgcgtctttccgctcaaaggcttacacacgggcagtgatgcattttgaatctttcataacggagaagaagcagaatatacaggaacatctcggattcctgcagaagctgtacgccgcaatgcatgaacctgacggagtggccggtgtgagtgcaattagaaaggccgaaccgtccctcaaggaacagattttggagcatgaatccctgggattgctacgggacgctacggcctgctatgatcgggctatacaactagagccggatcaaatcattcattaccacggggttgtgaagtctatgcttggcctgggacagttgagtactgtaattactcaggtcaatggagtacatgccaaccggtcggaatggacagatgagttgaacacctaccgggtggaggcagcctggaagctgagccagtgggacttggtggaaaattacctggctgccgatggcaagagcacaacatggagcgtgcggctgggtcagctcctgctttcagccaaaaagagggatatcaccgccttttacgactcattgaaactggtgcgcgctgagcagatcgttccactttccgctgcaagcttcgagcgaggctcataccagcgaggatacgaatacattgttagacttcacatgttatgtgagctggagcacagtatcaaacctttgtttcagcattcccccggtgacagttcccaggaggatagcctgaactgggtagccaggttagagatgacccagaattcatacagggcaaaagaacccatcttagcactgaggcgggctctgctgtccttaaataagaggcctgattacaacgagatggttggcgaatgctggctgcagtccgctagagtagccagaaaggcaggccaccaccaaactgcttataatgccctgctcaacgcaggtgagagtcgcctcgcagagttgtatgttgaacgggcaaaatggctctggagcaaaggtgatgtgcaccaggccttgatcgtgctgcaaaagggggtggagctgtgcttccctgagaacgaaaccccccctgaggggaagaacatgctgatccacggacgggcaatgctcctagtgggaaggttcatggaagagaccgcaaacttcgaatctaacgccattatgaaaaaatataaagacgttacggcctgcctgccggagtgggaagacggtcacttctacctggccaagtactacgataaactgatgcctatggttacagacaataagatggagaagcagggcgatctcatccgctacattgtgctccattttggtcggtcactgcaatacgggaaccagtttatctatcagtcaatgccccgaatgctcaccctctggctagattatggaaccaaggcttatgagtgggagaaagcaggaaggtccgacagggttcagatgaggaacgacctcgggaaaatcaataaggtgatcacagaacatactaactacctggccccttaccaatttttgaccgctttctcccagctgatctcacggatttgccacagccacgatgaagtttttgttgtcttgatggaaatcatcgccaaagtgtttctggcctatccacagcaggcaatgtggatgatgactgccgttagcaagtcaagctaccccatgcgggttaaccgatgcaaagaaattctgaataaagctatacatatgaaaaagtccctggaaaagttcgtcggggatgcgacgaggcttacggataagcttctagaactgtgtaacaagcctgtggacggctctagttccaccctttccatgtctacccacttcaaaatgttaaagaaattggtggaagaagcgacgtttagcgaaatccttattccgctccagtccgtgatgataccgaccctccccagtattttgggcacccacgcaaaccacgctagccatgagcctttccccggtcactgggcatatatcgcaggatttgacgatatggtcgaaattctggctagcttacaaaagcctaagaaaatcagcttaaaggggtccgatggcaaattctacatcatgatgtgcaaaccaaaggacgatctgcggaaggactgtaggctgatggaattcaatagcctgattaataagtgtctacgaaaggacgcggaaagtcgcagacgcgaactgcacatccgcacatacgccgtgatcccccttaatgatgagtgcggtatcatagagtgggtgaataacacagccggtctgagaccaattttgaccaaactgtataaagagaaaggtgtgtatatgactggcaaagagttgagacagtgcatgcttcccaagagcgccgcactctctgagaaactgaaggtgttccgcgagttcctgttgcctagacaccctcctatatttcatgagtggttcctcaggaccttcccagaccctacgtcttggtatagcagcaggtcagcctattgcaggagtaccgcagtgatgagcatggtgggttacattctcggcctcggcgacagacatggagagaatatcctgtttgacagcttgaccggcgaatgtgtgcacgttgattttaattgtctgtttaataaaggtgagacctttgaagtgcccgagatcgttccgttcaggctgactcacaacatggtcaacgggatgggtcctatgggcactgaaggccttttcaggagggcatgtgaggtcactatgcgcttaatgagggatcagagggagcccctgatgtccgttctgaaaacgttccttcacgaccccttagttgaatggagcaagccagtaaagggacatagcaaagccccacttaacgagacaggagaggtggtgaacgagaaagcaaaaacacatgttctagatatcgaacagcggctgcaaggtgttattaaaactagaaatagggtcaccggtctgcccctcagtatcgaaggtcacgtgcattacctcattcaagaggccacggacgagaacctcttgtgccagatgtacctaggatggacaccatatatgta

SEQ ID NO: 27364 - DNA, 7742 bp, synthetic construct
  misc_feature 1..7742: note = Description of Artificial Sequence: Synthetic coding sequence
  source 1..7742: mol_type = other DNA
atgggagaacacggactggagttggcctctatgatccccgcactgcgggagctgggctctgcaactcccgaggaatataataccgtggttcagaagcccaggcaaattctgtgtcagttcatagaccgcatcttaaccgatgtaaacgtggtcgccgtagaattggtgaaaaagacagacagtcagcccacttccgtgatgctacttgacttcatacagcacattatgaagtcgtcccccttaatgttcgtaaacgtgtcaggcagtcatgaggcaaaggggagctgtatcgaatttagcaactggattatcactagactcttgcgaattgccgctaccccgagttgccatcttcttcataaaaaaatttgcgaggtcatttgtagtcttctcttcctctttaaatccaagtcaccagcaatttttggagtgctgactaaggagttgcttcagctgttcgaggacctggtttacctgcataggagaaacgtgatgggacacgccgtggaatggccagtggtgatgagccgattcttgtcccagctcgatgaacacatgggatatctgcagtctgcccctctacagctgatgtccatgcagaacctcgaatttatcgaagtaacgctgctgatggtgttgacacgaattattgcgatcgtttttttcagaagacaggaactgctgctgtggcagattgggtgtgtcctgcttgagtacggctcacccaagatcaagagcctggccatttcttttttgacagagctttttcagctcgggggactccctgcgcaacctgcgagtacctttttctctagttttctggagctcctcaaacatctggtcgaaatggataccgatcagctcaaattgtatgaggagcctctctcgaaactgataaagactctcttcccatttgaagctgaagcctatcggaatatagagcctgtttacctgaacatgctgctggaaaagctgtgtgttatgtttgaagacggtgttctgatgaggctgaagtctgatctgttgaaggctgcactgtgccacttgcttcaatatttcttgaaatttgtaccagctggttatgaatcagctttacaagttcgcaaggtgtacgtacgaaacatttgcaaggcactgctggatgtcctgggcatcgaggttgacgctgagtatttacttggacccctctatgccgctttgaagatggaaagcatggaaattattgaagagatccagtgtcagactcagcaggagaacctgagcagcaactccgacggtatctcccctaaacgcaggagactcagtagttctttgaacccatctaaaagggccccaaagcagactgaagatagaacatttaaggactgtcagcataagtctaagaagaagcccagtgtcgtaatcacctggatgagcctcgatttctatacgaaagtcttgaaaagctgtcgatcgttgctggaaagtgtacagaagctggatttggaggccacaatcgataaggtggtgaagatctatgacgccctaatatatatgcaggtcaactcatcgttcgaggaccatatcctagaggatctttgcggaatgctgagtctgccttggatttatagccattctgatgacggctgcctgaagctgactacctttgccgcaaacctgctgaccttgtcgtgtcgtatatctgacagttacagcccacaggctcaatcacggtgcgtgttcttattgactctttttccccgtaggatctttctagaatggcggaccgctgtctacaactgggctcttcagtcctcccacgaggtgatacgcgcttcatgcgtttcaggatttttcatcctgttgcagcagcaaaacagctgtaaccgggtgccaaaaatcctgattgacaaagtcaaggacgactcggacatagtcaagaaagagttcgcaagtattcttggacagctggtgtgtactctgcacggcatgttttacttaacttcttcacttactgagcccttttccgagcatggacacgtcgatctgttctgtcggaatttgaaggccacttcacagcatgagtgcagctctagccaactgaaggcttcagtttgcaagcctttcttgtttctgttgaaaaagaagatcccctctcctgtaaaactcgccttcattgacaatctgcaccatttgtgtaaacacctggactttcgagaggacgagaccgatgtgaaagctgttctcggtactctgttaaacctcatggaggacccagacaaggatgtgcgcgttgcattcagtgggaacatcaaacatatacttgagtccctcgattctgaggatggcttcattaaggaactgtttgtgctaaggatgaaagaagcttacacacatgcccagataagcagaaataatgagctgaaagatacactgattcttacaactggtgacattggcagagcggctaagggagaccttgtgcctttcgccctcctgcatctgctgcactgcctgctgagcaagagtgccagtgtcagtggggctgcatacactgaaattcgggctctcgtcgccgcaaaatcggtgaagctgcaaagctttttcagccagtacaaaaagcctatttgccagttcttggtggagagtctgcattcatcccaaatgactgctcttcctaataccccttgtcaaaatgcagatgttcggaagcaggacgttgcccaccaaagggaaatggccctcaatacactgtccgaaattgccaacgtgttcgactttccagatcttaacaggtttcttaccaggacgctgcaggtgttactacccgacctggcagcaaaagcgtcccctgccgctagcgcactaatccgaacccttggcaagcagttgaacgttaatcgtagagagatactaattaacaacttcaaatatattttctctcacctggtgtgtagttgtagcaaagatgaactggagcgtgcattacactatcttaaaaacgagaccgaaatcgagctgggcagtctcctgcgccaggactttcagggtctccacaatgagttactcttgcgtatcggtgaacactaccaacaagtatttaacggtctgtccattctcgcttccttcgcttcttctgacgacccatatcaaggacctagagatataatcagtcccgaactaatggccgattatctccaaccaaaattgctgggcatcttggcattcttcaacatgcagttgctgtctagctccgtgggaatcgaagacaaaaagatggcattgaatagtcttatgtctttgatgaagctgatgggtcccaagcatgtgtccagcgtcagagtgaagatgatgaccaccctgagaactggccttcgcttcaaagacgacttccctgagctgtgttgcagagcttgggattgcttcgttagatgtctggatcatgcctgcttggggtccttattgtcccacgtgatcgtggccttgttgcccctaatccatatccagcccaaggagactgcagcaatttttcattatttaatcattgagaatcgggatgcagtccaagacttcctgcatgagatttatttcctgcctgaccaccctgagttaaaaaaaattaaggccgtgctgcaagagtataggaaagaaacgtctgagtctacagacctgcagaccactctgcagttgtcgatgaaagcgattcagcatgagaatgtggatgtgagaatccacgcactgacatcgctgaaggaaacgctctataaaaatcaagaaaagttgattaaatatgccaccgattctgagaccgtggaacccatcatttcacagctggtgacagtgctcttgaaggggtgccaggatgccaactctcaggcacggctcctatgcggcgagtgcctgggagagctcggcgcaattgaccctggaagattggatttctctactacagagacacaggggaaggacttcacatttgtgaccggagtggaggattcctcctttgcatacggactgttgatggagctgactcgcgcttacctcgcctacgctgacaacagtagggcacaggacagcgctgcctacgcgatccaagagctcttgagcatttacgattgtagggagatggagactaacggcccaggtcaccagctctggcgacgcttcccagaacacgtccgagagattctggagccgcacctgaacacaagatataaatccagccagaagagcacagattggagcggggtgaagaagccaatttacctgtcaaagctcgggtcgaattttgccgaatggagcgcatcgtgggccggatatctcatcacaaaagtgcggcatgacttagcgagcaagatctttacctgctgttccatcatgatgaaacacgatttcaaagtgaccatctatttactcccccacatcttagtatacgtcctgctcgggtgcaaccaggaggaccagcaggaggtctacgccgagattatggccgtgctgaaacacgacgatcaacataccatcaatacacaagatatcgccagcgacctgtgtcaactgtcaacccagacagtgttttctatgcttgaccacttgacccagtgggcaagacacaaatttcaggccctcaaggccgaaaaatgtccccactcgaagtctaataggaacaaagtggattctatggtcagcacagtggactatgaagactaccagagtgttaccaggtttttagacctcatcccccaggacacattagctgtcgcttcttttcgttcaaaggcctatacccgggcagtcatgcattttgagtcattcataactgaaaaaaaacaaaatatccaggagcacttggggtttttgcagaaactttacgcagccatgcatgaacccgacggcgtcgcaggcgtctctgccattagaaaggcggagccttctttgaaagagcagatcctggagcacgaatcactcggcctcttacgcgacgcaaccgcttgctacgacagggctatacagctggagcctgatcagataatccattatcacggtgtagtcaaatcaatgctcggacttggccagctgtctaccgtgatcacccaagttaacggagtgcacgcaaatagaagcgaatggacagatgagttgaacacctacagagtggaagctgcctggaagctctcccagtgggacctagtcgagaactatctagccgcagacgggaaaagcaccacctggtcagtcagactggggcagctcctgctgtccgctaagaaaagagatatcaccgctttttatgattccctgaaactggtacgcgctgaacagatagtcccattgtctgcagcttcatttgagagagggtcttatcaacgtggctacgagtacatcgtgcggctgcatatgctttgtgagttggaacactctataaaaccgctctttcagcactcccctggggactcaagtcaggaagactctctcaattgggtggcacggctggaaatgacacagaactcctaccgcgctaaagaacctattctggctttacgaagagcacttctgagtctgaataagagacccgattataatgagatggtgggcgagtgttggctgcaatccgcaagagtggcccgtaaggccggacaccaccagaccgcgtacaacgcactcttaaatgccggagagtctcgtctggccgaactgtacgtagagcgcgcaaagtggctgtggtcaaagggggacgtccaccaggccctgatcgtgctgcaaaaaggggtagagctgtgtttccccgaaaacgagaccccccctgagggcaagaatatgctgatacacggcagggcaatgctgctcgtgggcaggttcatggaggaaaccgctaattttgagtcaaacgccataatgaaaaagtataaggacgttacggcctgtctgcccgagtgggaggatggtcacttttacctagccaagtattacgataagctgatgccaatggttaccgataataagatggagaagcagggggatctgatacggtatattgtactgcacttcggtagatctctgcagtacggcaatcagttcatttaccagtctatgcctcggatgctgaccttatggttggactacggtaccaaggcatatgagtgggagaaggcaggccgatcagatagggtccagatgagaaacgacctggggaagattaataaagtgatcacggagcacacgaattatctggcaccataccagttcctgacagcgttttctcaacttattagtcggatctgccatagccacgacgaagttttcgtagttctgatggaaatcattgcgaaagtattcctggcttaccctcaacaagcaatgtggatgatgactgcagtgagtaagagttcctaccccatgcgggtaaataggtgcaaagaaattctgaataaagcgatacacatgaaaaagtcattagagaagttcgtcggggacgctacgcgtctgactgacaaacttctggagctgtgtaacaagcctgtcgacgggagttctagcaccctgtccatgtcaacccacttcaaaatgctaaaaaagctggttgaggaggctactttttcggagatactgattcctcttcagtctgtgatgatcccaacgctaccgtccatcttaggtacccatgccaaccacgcctcacatgagccatttcccggacactgggcgtacattgccggttttgacgacatggtggagatccttgcaagcttgcagaaaccgaaaaaaatttccctcaaggggagcgatggaaagttctacattatgatgtgcaagcccaaggatgatctacggaaagactgtagattgatggagtttaactccctgattaacaaatgtttacggaaggacgcagagtctaggcgtagagagctccacattaggacctatgccgtcatacccctgaatgacgaatgtgggatcattgagtgggtgaataacacagccggtctgagacctatactgacgaagctctataaggagaaaggcgtatatatgacgggaaaggagctgcgacagtgtatgctcccaaagtcggcagcgctgtcagagaagctgaaagtgtttcgcgagttcctccttcctcggcatcctcctatcttccacgaatggttcttacgcacttttccagatccgacctcttggtattcaagccgaagtgcctattgccgaagtactgcggtgatgtccatggtggggtacatactgggtctgggagatcgccatggggagaatatcctgtttgactccttgacaggcgaatgtgtgcatgtagacttcaattgcttgtttaacaagggggagacctttgaagtccctgagatcgtgcccttccgcttgacacacaacatggtcaatggcatggggcctatgggaacggagggcctcttccggagggcttgcgaagtgaccatgcgcttgatgcgcgatcagcgagaacctcttatgtccgtgctgaaaacgtttctccacgatcctctggtggaatggagcaagccggtgaagggtcacagtaaggccccactgaatgaaacaggagaagtggtgaatgaaaaagccaagacacacgttttggatatcgaacagcggttacaaggagtgattaagacgaggaaccgggtaacaggccttcctctttcaattgagggccacgttcactatctcattcaagaggctactgacgagaatctgctgtgccagatgtatctcggttggaccccatacatgta

SEQ ID NO: 27365 - DNA, 9171 bp, synthetic construct
  misc_feature 1..9171: note = Description of Artificial Sequence: Synthetic coding sequence
  source 1..9171: mol_type = other DNA
atgagtctggtgttaaacgacctgctaatctgctgccggcagcttgaacacgacagagctaccgaaagaaagaaagaggtggagaagtttaagaggctcatcagggacccagagactataaagcacctcgatcggcacagcgattccaaacagggaaaatatttgaactgggacgctgtgttcaggtttcttcagaaatatattcaaaaagagaccgagtgtctgcggattgcaaagcccaatgttagtgcgtcaacacaggcaagcaggcagaagaagatgcaggaaatcagttccctggtaaaatattttatcaagtgcgcaaaccggcgtgcccctagactgaagtgtcaggagctgctcaattatattatggacacagttaaggacagttccaatggagccatctacggggctgattgttccaatatcctcctgaaagacatattatcagtgcgaaaatactggtgcgagattagccagcagcagtggctagagctgttctctgtctacttccggttatacctgaagcccagccaggacgttcacagggtgctggtggccaggatcatccacgcagtgaccaagggctgctgcagccagactgacggattaaatagtaagtttcttgacttttttagcaaggccatccagtgtgcccgacaggagaaatcatcttcgggcctgaaccacatattggccgctttgacaatctttcttaaaacattggccgtgaattttagaatcagggtttgcgagcttggcgatgagatactgccaacgctgctatatatctggacgcagcataggcttaatgattctttgaaggaagtgataatagagctgtttcagttgcagatatacatccaccaccccaagggggctaagactcaagaaaagggggcatacgaatcaaccaagtggcgatctatactgtataacctctatgacctcctggtgaatgaaatctcccatatcggttcccgcggtaagtactcaagtggcttcagaaacattgcggttaaggaaaatctgattgaactgatggccgatatatgccaccaggtgtttaacgaagacactagatcactggagatctcgcagagttacactacaacccagcgggaatctagcgactattctgtgccatgtaaacgaaagaagatagaacttggctgggaggtaatcaaggatcacctacagaaaagtcagaatgatttcgatctcgtgccttggctccaaattgcaactcaactgattagcaaataccccgcatcactgcccaactgcgagctgagtcccctgctgatgatcctgagccagctgctgccgcagcaacgtcacggcgagcgaaccccatacgttctccgttgtcttaccgaggtggccttgtgtcaggataaaaggagcaaccttgagtcttcccagaaaagcgatctgctgaaactgtggaacaaaatttggtgcatcacctttcgaggtatcagcagtgaacagattcaggctgagaacttcggcttattgggcgcaatcatccaggggagtcttgtagaggtggatcgggagttttggaaactgttcactggcagtgcctgccggccttcttgccctgctgtgtgttgcctgacacttgccctcaccacgtcaatagtgccgggaaccgtgaaaatgggtatcgaacagaatatgtgcgaagtcaaccgcagcttcagccttaaagaatcaatcatgaaatggctgctgttttatcagctggagggggatctggaaaactcgacagaagtgcctcctattctgcacagcaacttcccacatctggtgttggaaaagatccttgtgtccctgaccatgaaaaactgtaaagccgctatgaattttttccaatctgtgcctgagtgtgaacaccaccagaaggacaaggaagaactgtcatttagtgaagtggaggaactatttctgcagacgacatttgataagatggactttctgaccatcgtgcgagaatgtgggattgaaaaacatcagtccagcattggattctccgtccatcaaaacctgaaggagtcacttgataggtgtctgttaggattgtccgaacaactactcaataactattcttccgagattaccaactcagaaacgttagtacgctgtagtaggctgcttgtgggcgtgctgggctgctattgttacatgggcgtgatcgccgaggaggaagcctataaatccgaactgtttcagaaagcaaagagtttaatgcagtgcgccggagagtccatcaccctatttaagaacaaaacgaacgaggagttccgcatcggttccctccggaacatgatgcagctgtgcaccaggtgcctgtcaaattgtacaaagaaatctcccaacaaaatcgcctccggattcttcttacggctccttacaagtaaactgatgaatgacattgctgatatttgcaaatcactggcttctttcatcaagaaaccttttgatcgaggggaggttgagagcatggaagacgataccaatgggaatttaatggaagtggaggaccagagttctatgaatctctttaatgattaccctgactcatctgtatccgatgctaatgaacccggagagtcccaaagtaccatcggcgctatcaatcctctggccgaggagtacctctcgaagcaggatcttctcttcctggacatgctgaaattcctgtgcctgtgcgtcacaaccgctcagacaaacaccgtctcgtttcgggcagccgatatacgcagaaaactcttaatgttgatcgattccagcacccttgagccaacaaagagcctgcacttgcatatgtaccttatgctgctcaaggaactgccaggcgaggagtaccctctacccatggaggatgtgctggagctcctcaaaccactgagcaatgtctgttcactttacagacgagaccaggacgtgtgtaagacaatcctgaaccacgtccttcacgtggtgaagaatctgggacagagcaatatggatagtgagaataccagggatgctcaaggacagtttctgactgtgatcggtgcattttggcacctaaccaaggaacggaagtacatatttagtgttagaatggcactggtgaattgcctgaaaacacttcttgaagccgacccctattcaaaatgggccatcctcaacgtgatgggcaaggattttcccgtcaatgaagtgttcactcaatttctcgctgataaccaccaccaggtcaggatgctcgccgcagaatcaatcaacagacttttccaggacaccaagggagatagttccaggctccttaaggccttgcctctgaaacttcaacagaccgcatttgagaacgcatacttgaaggcgcaggaaggaatgagggaaatgagtcactccgcggagaaccctgaaacgctcgatgaaatctacaataggaagtccgtgctcctcaccctaattgctgtagtgctctcttgcagccctatttgcgagaaacaagccttgtttgcactctgcaagtccgtgaaagaaaacggattagagccgcacctggtaaagaaagtcctggagaaggtgagcgagacatttggctatcgtagactagaagactttatggcatcccacctggactacctggtacttgaatggctgaacctgcaggatactgagtacaacctttcctctttcccgttcatcttattaaattacacgaacatagaggatttctaccggagttgttacaaagtgttaattccccaccttgttatccgtagccacttcgacgaggtaaaatctatcgccaaccaaatccaggaagattggaaatctctgctaactgattgctttccaaaaattcttgttaacatccttccctatttcgcctacgagggcacaagggactccggcatggcgcagcagcgggagaccgcaacgaaggtttacgacatgcttaaaagcgagaaccttcttggcaaacagattgaccatcttttcatcagcaacctgcccgaaatagtggtagagttgctgatgactctgcatgaacccgcaaatagctctgcctcccagagtaccgacctctgtgatttctctggtgatctggatcctgctccaaatcctccgcacttcccctctcacgtgatcaaggccacttttgcctatatctctaactgccataaaacaaagctgaagtcaattctggaaatactgtctaaaagccctgattcttatcagaagatcttgctggccatctgcgagcaggctgcagaaactaataacgtctacaaaaagcacagaattctcaagatctatcacctttttgtaagccttttactaaaagatattaagagtggactgggcggagcttgggcatttgttctccgtgacgtaatttataccttgatacactacatcaaccagcgtcccagttgtattatggacgtctcgctgcgcagttttagtttgtgctgcgacctgctgtcccaagtttgtcagaccgcggttacctactgtaaggatgcgctagagaatcaccttcatgttatcgtcggaacactaatcccgctggtctatgagcaggtggaggtgcagaagcaggtgctagatttgctcaaatacctggttatagataataaagataatgagaatttgtacataaccatcaaactgctagacccctttcccgaccatgtcgtgttcaaggatttgagaattacccagcagaagattaagtatagcaggggccctttttccctccttgaagagataaatcacttcctctctgtgagcgtatacgacgccttgcctcttaccaggctagaaggcctgaaagacctgcgtagacaactggagttgcacaaagatcagatggtcgatatcatgagagcgagccaggataatccgcaggatggaataatggtcaagctagttgtcaatctgctgcagctgtccaagatggccattaaccatactggggaaaaagaggtgttggaggcggtaggcagctgtcttggagaggtggggccaatcgacttctcaactattgccatccagcattctaaagatgcctcttataccaaagctctaaaattgtttgaggacaaggagctgcagtggacatttataatgttgacctacctcaataacactcttgttgaggactgcgttaaggtccgatctgcggctgtcacttgtttgaagaatatccttgctacaaagacaggccacagcttctgggagatctacaagatgaccaccgatccaatgctggcgtacttgcaaccatttaggacttcccgcaaaaagttcttggaggtacctcggttcgataaggagaaccccttcgaagggctagatgatattaacctctggattcctctctccgagaaccatgatatctggatcaagacgctgacctgcgctttcttggacagcgggggaacaaaatgcgagatcttacagcttctgaaacccatgtgcgaggttaaaaccgatttttgtcagacagttctaccatacctgatacacgacattctactgcaggatacaaatgaatcctggagaaatctgctgtccacacacgtccagggattcttcacttcctgcttgcggcatttctcccagacctctcgcagcacaacaccagccaatctcgattctgagtctgagcattttttccgctgttgtttagacaagaaaagtcagcggactatgctggccgtagtcgactacatgaggagacagaaacgtccatcctctggaactatctttaatgacgcattctggttagacttgaattatttggaagttgctaaggtggcccagagctgcgcggcacactttacagcattattgtatgctgagatctatgccgacaagaaaagtatggatgaccaggagaagagaagtcttgcattcgaggaaggatctcagaataccactatctcctctttgagcgaaaagtctaaggaggagacaggcatatccttgcaggaccttctgctggaaatctaccgtagcattggtgaaccagatagtctctatgggtgcgggggaggcaaaatgctgcagcctatcacccgccttcggacctacgagcatgaggccatgtggggaaaagcacttgtcacctatgacttggagaccgcgattcccagcagtactcggcaggccggtattattcaggcactacaaaacctggggctctgccatattcttagcgtctatctcaaaggtcttgactatgaaaataaggattggtgtccggagcttgaggagctccactatcaggccgcttggagaaatatgcaatgggatcactgtaccagcgtctctaaggaggtggaagggacctcttatcacgagagcctgtacaacgcgctgcagagtctgcgggatagagagtttagtaccttctatgagagtctgaagtacgccagagtgaaggaggtggaggagatgtgcaagcgctccctggaatctgtctattcactatacccaaccctttcacggctccaggccatcggtgagctggaatctatcggggaacttttctcaagatccgtcactcacaggcaactgagcgaggtgtatatcaaatggcagaagcattctcaactgttaaaagatagtgattttagtttccaggaaccaattatggcgctccgaactgtgatactggagattttgatggaaaaggagatggacaatagtcagcgtgagtgcatcaaagacatattgactaaacatctggtggaactgtctatcctggccagaactttcaaaaatacccagttacctgaacgggctatcttccagattaaacaatacaattccgtcagttgcggcgtctctgaatggcagctcgaggaagctcaggtgttctgggcgaaaaaggagcagtcattggccctcagtattttaaaacagatgatcaaaaaacttgatgcgagctgtgcagccaataacccatcgctgaagctgacctacacggagtgtcttagagtctgtggaaactggctggcggaaacctgcctggagaatcccgctgtaattatgcagacatatctggagaaggcagtggaggtagccggtaattacgacggggagtcaagtgacgagctccggaatgggaagatgaaagccttcctgtcccttgcacgctttagcgatacgcaataccagcgcatcgaaaattacatgaagagttctgaattcgaaaacaagcaagccttgctaaaaagagccaaagaggaggtgggcctgttacgggagcataagatccagactaacagatatactgtgaaagtgcagagagagttagagctggatgaactcgccttacgcgctctgaaggaggaccgcaagcggtttctgtgcaaggccgtggagaattatattaattgccttctctccggtgaggagcatgatatgtgggtcttccgcctctgttccctctggctcgaaaactctggcgtgtccgaggtcaacggaatgatgaagagggatggtatgaaaatccccacctacaaattcctgcccctcatgtaccagctggctgctcgtatgggcaccaaaatgatggggggtctaggctttcacgaagtactgaacaatctgatttctaggatctctatggatcatccgcaccacaccttgttcattattttggccctggcgaacgctaatagagacgagtttctgactaaacccgaggtggcgcgacgatctagaattaccaaaaatgtgcccaagcagtcatctcagcttgatgaagatcgaacagaagctgctaacaggatcatctgtaccattaggagccggcgaccacagatggttcgatctgttgaggcactgtgcgatgcatacatcattctggccaacctggatgccactcagtggaagacacagcgcaaggggatcaacatacctgccgaccaaccgatcaccaagctaaagaacttagaagacgtggtggtgccgacaatggaaattaaagtcgatcataccggcgaatacgggaatctggtgacaattcaaagcttcaaggcagagtttcgcctggccggtggtgtcaacctgcccaaaattatcgactgtgtcggctcagacgggaaggagcgtcggcaactggtcaaaggtcgagacgacctgcgccaggatgccgtgatgcagcaggtttttcagatgtgcaatactctactgcagcgtaacacagagaccaggaagaggaaacttacgatttgcacctacaaggtggtgcccctgtcacagcggagcggtgtcctggaatggtgtacaggaactgtgcctatcggcgaatttttggtcaacaatgaagatggcgctcataaacgttatcgacccaacgatttctccgcctttcagtgccagaagaaaatgatggaggtgcagaagaagtcctttgaggaaaagtacgaggtgtttatggatgtgtgtcagaactttcaacccgttttccggtatttttgtatggagaagtttttagaccccgcaatatggtttgagaaacgcctcgcctatactcgcagtgtcgcgacgtcttctatcgtgggatatatactaggcctgggagaccgtcatgtgcagaacattttaatcaatgaacaatctgcggagctggtccacatcgatctgggcgtggccttcgagcagggaaagatcctgccaacaccagagaccgtacccttccggctgactcgagacattgtggacggtatgggaatcaccggcgtcgagggagtgtttcgcaggtgctgcgagaagacaatggaagtaatgcgaaattcccaggagacactgcttactattgtcgaggtgctgctgtacgaccccctgttcgactggacaatgaaccccctaaaggcgctttacttacagcagcgcccagaagatgagactgagctccaccctaccttgaacgccgatgaccaggaatgtaagaggaatctcagcgatattgaccaaagctttaataaggtcgccgaaagagtcctgatgaggctgcaggaaaaactcaaaggagtggaagagggaaccgtactgagcgttggcggacaggtgaatttgctcatccaacaagctatcgatcctaaaaacctgtctcggctgtttcctggatggaaggcatgggtatac

SEQ ID NO: 27366 - DNA, 417 bp, synthetic construct
  misc_feature 1..417: note = Description of Artificial Sequence: Synthetic coding sequence
  source 1..417: mol_type = other DNA
atgacccttcacgaacctgcaaactcaagtgcctcacagtccactgacttgtgcgatttttcaggggacctggacccagctcctaaccctccccacttcccgtcacacgtgataaaagccacattcgcttacatcagcaactgtcataagaccaaactcaaaagcatactcgagattctgtccaagagtcctgactcctaccaaaagatcctgctcgccatctgtgaacaagctgcagagaccaacaatgtttataaaaagcaccgcatcctcaaaatataccacctctttgttagtctgctccttaaggacatcaaaagtggtttaggaggcgcttgggcctttgttctccgggacgtgatttatacccttatacattacatcaatcagagaaaactaactatattcagtcaatag

SEQ ID NO: 27367 - DNA, 9170 bp, synthetic construct
  misc_feature 1..9170: note = Description of Artificial Sequence: Synthetic coding sequence
  source 1..9170: mol_type = other DNA
atgtctctcgtgttgaatgacctactaatctgctgccgccagttggagcacgacagggccacggagagaaagaaggaggtggagaaattcaaaagactcattcgcgatcctgaaacaatcaagcacctggaccgccacagcgattcaaaacaaggcaaatatctgaattgggatgctgtgttccgatttttacagaagtacatccagaaagaaaccgagtgcctacgtatagccaagcccaacgtgtcagcttctacccaagcatcacgccagaaaaaaatgcaagagatttcaagtctggtcaagtatttcattaagtgcgctaacaggcgtgcccctcggctcaagtgccaggaactgttaaactacatcatggacactgtgaaggactccagcaatggcgcaatatatggtgccgattgtagcaatatcctgttgaaggatatcctcagcgtgcggaaatactggtgcgagattagtcagcagcagtggctagagctgttttctgtgtacttccgtttgtatctaaagccctcacaggatgtccaccgggtccttgtcgcacgtataatccacgccgtgaccaaaggctgctgcagccagaccgacggcttgaacagcaagttcttagacttctttagcaaggccattcagtgcgctcgccaggagaagtctagttccggacttaaccatatcctggcagcccttactatcttcttaaagacccttgccgtgaattttcggatccgggtttgtgaacttggggatgagattctgccaacccttctctacatttggacccaacaccgcctcaatgattcactgaaggaggtgatcatagaactgttccagctgcagatttacatacaccatccaaaaggggcaaagacacaggagaagggcgcttatgagagcacaaagtggcgatctatcctttacaacttatatgatttgctcgttaatgaaatcagccacatcggatcacgtggtaagtatagctctggattccgaaatattgctgtaaaggaaaacctgatcgagctgatggctgatatttgccatcaggttttcaatgaagacactagaagtctggaaatctcccaatcctataccactacccagagggagtcatcggactacagcgtgccatgtaaacgcaaaaaaattgagctgggctgggaagttattaaggatcaccttcagaaatctcagaacgatttcgacttggtaccttggttgcagatcgccactcagttgatatcgaaataccccgcatcattaccaaattgtgagctttcaccacttcttatgattctgagccagctgctgccgcagcaaaggcatggcgaaaggactccgtacgtgctacgttgtctgacagaggttgctctttgccaggacaaacggtcgaatcttgagagcagccagaaatccgacctgcttaagttgtggaacaagatctggtgcataacattcagagggatttcctctgagcagattcaagcagagaactttggcctgctaggagctatcatacagggaagtctggttgaagttgacagggagttctggaaactgtttacaggaagcgcgtgcaggccaagctgcccagccgtctgctgtctgactttggcgctgactaccagcattgttcccggaactgtgaaaatggggatcgaacagaacatgtgcgaagtgaaccgttctttttccctgaaggagagtatcatgaagtggctgttgttttatcaattggaaggggacttggagaactccactgaggtcccccctatcctgcatagcaactttcctcacttagtgctggagaaaattctcgtgtccctgacgatgaagaattgcaaggccgctatgaactttttccagtctgtgcccgaatgcgagcaccatcagaaggataaagaggaactgagcttttccgaggttgaagaactctttctgcagacaacgttcgacaagatggacttccttacaattgttagggagtgcgggatcgaaaaacaccagagcagtattgggttcagcgtacatcagaaccttaaagagtctcttgatagatgtctgttggggctcagcgaacaactgctaaacaactactcttcagaaattaccaatagcgagaccctcgtgaggtgttccaggctcctggttggagtgctgggctgctactgttacatgggagtgattgcagaggaggaggcctacaagtcagagcttttccagaaggcgaagagtctcatgcagtgcgcaggagagtctatcacactctttaaaaataaaacgaatgaagaatttagaataggatccctccgaaatatgatgcagttgtgcaccaggtgtctttccaactgtaccaaaaaaagtccaaacaagattgccagtggcttctttctaagactcctgacatcaaaactcatgaatgatattgctgacatttgtaaatctttagcgtcctttatcaagaagccctttgataggggtgaagtcgaaagcatggaggatgacacaaacgggaacctcatggaagttgaggaccagtcttccatgaacctttttaacgactacccagactcttcggtctctgacgctaacgaaccaggcgagtcccagtcaaccataggagccataaatcctttggccgaggagtatctctctaaacaggacttgctgtttttggacatgcttaaattcctgtgcctttgcgtcacaaccgcccaaaccaatacggtctcgtttagagccgctgatatcaggcgtaaactactcatgctaatagactccagtaccctggaaccaaccaagagcttgcatctgcacatgtacctgatgttattaaaggaactcccaggcgaagaatacccactgccgatggaggacgtgctggagttactgaaacccctgagtaacgtttgctccctttacaggcgagatcaagacgtttgcaagacgatcctcaaccatgtattgcacgtagtgaaaaacctgggtcagtccaacatggatagcgaaaatactagagatgctcagggacagttcctgaccgtgatcggtgctttttggcatctaaccaaggaacgaaagtacatctttagcgtacgaatggcccttgttaactgcctgaagacactcctggaggcagatccttacagtaaatgggcgatcctgaatgtgatggggaaggattttcccgttaacgaggttttcacccaattccttgcagacaatcaccaccaggtgcggatgctagcagcagagtcgattaatcgactcttccaggacaccaaaggcgactcaagcagattgctgaaggctcttcccctgaagctgcagcagaccgctttcgagaacgcttatctgaaagcccaggaaggaatgcgggagatgtcacacagcgcggaaaaccccgaaacgctagacgagatttacaaccgcaagagcgtcctgctgacactcatagctgtcgtgctgtcatgttcaccaatctgtgagaagcaggccctctttgctctctgcaagtctgtcaaggaaaatggcctggaacctcatttggtgaaaaaggtcctggagaaagtgtctgaaactttcggataccgcaggctcgaagatttcatggcatctcacctcgactatctcgtgctggaatggctcaatctgcaggataccgaatacaatttaagtagcttccctttcatcctgcttaactatactaatattgaggatttctacaggtcatgttataaggtcctgattccacacctggtcatcaggtcccacttcgatgaggtgaagtccatcgcaaatcagatccaagaagattggaaatcgctcctgacggattgctttccgaaaatccttgtcaatatattaccatatttcgcgtatgaaggcacacgggattccggcatggctcagcagagggagacagctactaaggtgtacgatatgctcaaaagcgaaaacctgctgggaaagcagatagatcacctgttcatctccaacctgcccgagattgttgtggagttactaatgacgctgcacgaacctgccaactccagcgccagccagtccaccgacctgtgcgattttagtggagacctagatccagctcctaaccccccacacttcccctcccacgtcatcaaggctacattcgcatacatcagtaactgccacaagactaaactgaagagtattctggaaatcctaagcaaatcccctgactcctaccagaagatcctattagctatttgtgaacaggcagcagaaactaataatgtgtacaagaaacatcggattctcaagatctaccatttattcgtgagcctgttgctcaaagacattaaaagcggtctgggaggcgcttgggcattcgttttgagagacgtgatatacacacttatacactacataaatcagaggccttcttgtataatggatgtgagcttgagaagcttctccctgtgctgcgatcttctgtcccaggtgtgtcagaccgccgttacctattgcaaggacgcgctggagaaccacctgcatgtgatcgttgggacgctcatccctctagtctatgaacaggttgaagttcagaaacaggtgctggatttgcttaaatatctggtcatcgataataaggacaatgaaaacctgtacattaccattaaactgcttgacccattccctgaccatgtagtctttaaagacctgagaatcacccagcagaaaatcaagtattcccgcggacctttctctctgctagaagagatcaaccatttcttgagtgtaagtgtgtacgacgcgttgcccctaacaagactggaggggctcaaggatctgaggcgtcagctcgaacttcacaaggaccagatggttgatattatgcgcgctagtcaggacaacccccaagacgggataatggtgaaactggtagtgaatctgctacagttatcaaaaatggccattaatcataccggcgaaaaagaggtgttggaagccgttggaagctgtctcggcgaagtcggccctatcgacttcagcaccatcgctatccagcactctaaagatgcctcatataccaaggcactgaaactgtttgaggacaaagagcttcagtggacgtttattatgctgacttatctgaataatactttggttgaagactgtgttaaggtaagatctgcggctgttacgtgcctgaaaaatatccttgcgacgaaaaccggacattctttctgggagatctataagatgacgactgatccaatgctcgcctacctccaaccgtttcgcacaagcagaaagaaattcttggaagtcccccgattcgacaaggaaaatccgttcgagggcttagatgatattaacctatggatccctttaagcgagaatcacgacatctggatcaaaacactgacgtgcgccttcctggattcggggggtactaagtgtgagattctccagctgctcaaacctatgtgtgaggtgaaaacagacttctgtcagactgtattaccctacctgattcatgatattctgttacaggataccaatgagagttggcggaacctcctcagtacgcatgtgcagggattctttacctcctgtttgcgccactttagtcagacctctcgttccaccacaccagcaaatctggattcagagtcagagcacttctttaggtgttgcttagacaagaagtcgcaacggactatgctcgcggtggttgactatatgcgaagacagaaacgcccatccagcggaacaattttcaatgacgccttctggctcgatctgaactacctcgaggttgctaaagtagctcaatcctgcgccgctcacttcacggccctcctatacgcagaaatatacgccgacaaaaaatcaatggacgaccaggagaagaggtcactggcgttcgaagaaggatcgcaaaacacaaccatatcatcactctcggaaaagagcaaggaagagaccggtattagccttcaggatctactgttggaaatctaccgaagtattggggaaccggacagtctgtatggctgcggtggcggtaagatgctgcagccaataacccgattgcggacttatgagcacgaggcaatgtgggggaaagcacttgtcacttatgacctcgagacagctattccatccagcactaggcaggccggaataatacaagctctgcagaatcttggtttatgccacattttgtctgtctacctgaaaggtctcgactatgaaaataaggattggtgcccagaactggaggagctgcactaccaggcggcatggcgcaacatgcagtgggaccattgtaccagtgtgtccaaggaagtcgaaggtacaagctaccacgagtctctatataacgccctgcagagcctgcgggaccgggagttcagcactttttacgaatctctcaagtacgcaagagttaaggaggtggaggagatgtgcaagagaagcttggaaagcgtgtatagcctgtacccaacacttagtcgccttcaggccataggcgagctggagtctattggcgagttgtttagtcgcagtgtgactcacagacaactctcagaagtgtacatcaaatggcagaaacatagtcaactcctaaaggattccgatttctcgtttcaggaacctatcatggctttgcggacagttatactggagattctgatggagaaggaaatggacaacagccagcgcgagtgcattaaagacattttgaccaaacacttggtggagctttccatcttagctaggacttttaagaatacccaactcccggaacgtgccatcttccaaattaagcaatacaactctgtctcttgcggcgtgagcgagtggcaattagaggaggcacaggtcttctgggccaagaaggaacagagcctggctttatctattcttaagcagatgattaaaaagctggatgccagttgtgccgctaataaccccagtttgaagttaacttacaccgaatgcttgagggtgtgcggaaactggctggctgagacttgcctcgagaatccggcagtgatcatgcagacctatttagaaaaggctgtggaggtcgcagggaactacgacggtgaatcatccgacgagctcaggaatggcaagatgaaagcatttctcagcctggcgagattttcagacacacagtaccagcgcatcgaaaattatatgaagtccagcgagttcgagaataaacaggctctcttgaaaagagctaaagaagaggtcgggctcttgcgcgagcacaagatacagaccaaccgttatacagtgaaggtccagcgtgagttggagctggacgaattagctctgcgtgctctcaaagaagatcggaagaggttcctgtgcaaggccgtggagaactatataaactgtctgctttcaggggaagaacatgatatgtgggtgtttaggttgtgtagcctgtggctggagaatagtggcgtttccgaggtaaacggtatgatgaaacgggacggtatgaaaatccccacctataaattcttgcctctgatgtaccagctggccgctaggatgggtactaagatgatgggcggtctcggtttccatgaggtgctcaacaacctgattagccgaatctccatggatcacccacaccacactctcttcatcattcttgccctggctaacgctaacagagacgaattcctcaccaaacccgaggtggccaggcgctcccggataaccaaaaacgtgcctaaacaatcctcccaattagacgaagacaggacagaagcagccaaccggattatatgtacaatacggtcaaggaggccccaaatggtgaggtccgttgaggccctctgcgacgcctacatcattctagcaaatttggacgcgactcaatggaagacacaacgaaagggtataaacattccagcggatcagccaattacaaagctaaagaatctcgaggacgttgtggttccaaccatggaaatcaaggtggaccacaccggcgagtatggcaacctggtgactatccagagttttaaggcagaattccgattggccggaggtgttaatcttccgaagatcatcgattgtgtgggctctgacggtaaagagagaaggcagctagtcaagggccgagatgatctgagacaggacgcagttatgcaacaggttttccagatgtgcaataccttattgcagcgcaataccgagaccaggaagcggaaactgactatctgtacttataaagtcgtgcccctatctcagaggagtggcgtgctcgagtggtgcaccggcacagtgcctatcggcgaattcttggtaaacaatgaggatggagctcataagcgctacagaccgaacgatttttctgcattccagtgccagaaaaaaatgatggaagtccaaaagaagtcatttgaggagaagtatgaagtgttcatggacgtgtgtcagaattttcagcctgtattccggtatttttgcatggagaaatttctggaccccgctatctggtttgagaagaggctcgcatacacccgaagcgtcgctacttcatctatcgtgggatatattctgggattaggcgatcggcacgtacagaatatcctgattaatgagcaatctgcagaactggtgcacatcgacctgggggtagcgttcgagcaaggaaaaatcctgccaacacccgagactgtgccttttcgtctcacaagggacatcgtggatgggatgggcatcaccggggtggaaggcgtgtttaggcgctgttgcgagaagaccatggaggtgatgcggaactcacaggaaaccctacttactatagttgaagttctcctgtatgaccccctattcgactggactatgaaccctttgaaggcattgtatctgcagcagcgtcccgaggatgaaaccgagcttcaccccacattaaatgctgacgatcaagagtgtaagcgtaatctgagcgacatagatcagagtttcaataaggttgccgaaagagtgctgatgaggttgcaggaaaaactgaaaggggtagaggagggcactgtcctcagcgtgggcggacaagttaacctactgatacaacaagcaatagatcccaagaatctgtctcgactgtttcctgggtggaaggcctgggtcta

SEQ ID NO: 27368 - DNA, 4110 bp, synthetic construct
  misc_feature 1..4110: note = Description of Artificial Sequence: Synthetic coding sequence
  source 1..4110: mol_type = other DNA
atgtctctggtactgaatgatctcttgatttgctgccggcagctggagcacgaccgcgctacagaacgtaagaaagaggtggagaaattcaaacggctgattagagaccctgagaccattaagcacttggacagacattctgatagtaagcaaggtaagtacctgaactgggacgccgtgtttcgcttccttcagaagtatatccagaaggaaactgagtgcctccgcattgctaaacccaatgtctccgcctccactcaagctagtagacagaagaagatgcaagaaatttcaagcctggttaagtacttcatcaaatgtgcaaacaggcgggctcctagactgaaatgtcaggagttgttgaactatattatggataccgtgaaggacagttcaaacggcgctatatacggcgcagactgttccaacattctgctgaaggacattcttagcgttagaaaatattggtgcgaaatctcccagcaacagtggctggaactcttttctgtgtacttccggctctacctgaagccttctcaggacgtgcaccgcgtgctggtggcgcgaattattcatgccgtgacgaagggatgctgttctcagactgacggtctgaattcaaagttcctcgacttcttttccaaagctatacagtgcgcaaggcaggagaagagctctagcggtttaaaccacatcctggctgcattaaccattttccttaagactctcgctgtgaatttccggatacgcgtgtgtgagctgggcgacgagatcttaccgactctgttgtatatctggacccagcatcgcctgaatgacagcctcaaagaggtgattatcgagctcttccagcttcaaatctatatacatcacccaaagggcgcaaagacacaggaaaaaggcgcatacgagagtacgaagtggcgaagtatcctgtacaatctgtatgatctactcgtgaatgaaatcagtcatattggctctcgcggtaaatacagctcaggcttccgcaatatcgccgtgaaagagaatctaattgaacttatggctgacatatgtcaccaggtctttaacgaagacacaagatcactggagattagtcagagttacactacaactcagagggaaagctcggattacagcgtgccatgcaagaggaagaaaatcgagctggggtgggaagtgattaaagatcacctacaaaagagccagaatgacttcgacctggtgccatggcttcagattgcgacacaacttatttcgaagtacccagcgtcactcccaaattgcgagctgtctcccctgctaatgattctctcccaactgttaccacagcagaggcacggagagcgcactccatacgtactcaggtgtctgacggaggtggccctttgccaggacaaacgtagcaacctggagagctcccagaagtccgaccttctgaagctgtggaacaaaatatggtgcatcacttttcgaggaattagttctgagcagattcaggccgagaactttggtctgctcggcgcaataattcaggggagcctggtcgaggtggaccgtgagttttggaaactattcaccggcagcgcctgccgcccatcttgtcctgcagtgtgttgcttaaccctggcccttaccacaagcatagtgcctgggacagttaaaatggggattgagcagaacatgtgcgaagtaaacaggagcttcagcctcaaggaaagtattatgaagtggctcctattctatcagctcgaaggtgacctggaaaattccacagaggtaccgccaattctgcactcaaactttccgcatctcgtcctcgagaagatcctcgtgtccctgacaatgaaaaattgtaaggccgctatgaacttcttccagagcgtgccagagtgtgaacaccatcaaaaagacaaggaagaactgtcattctcggaagtggaggaactatttctgcagacgacattcgacaaaatggatttcctaacaatcgtgcgcgagtgcggcatcgagaaacaccagagcagcatcgggttctctgtccaccagaacctcaaagagagcctcgaccgatgtttacttggtctttccgagcagttactcaacaactatagctccgagataaccaacagcgaaacgttagtcaggtgctcacgactattggttggagtgcttggatgttactgctatatgggcgtcatcgcagaagaggaggcttacaagtctgaactctttcagaaggctaagagcctgatgcaatgtgcaggcgagtccatcacactttttaagaacaagaccaatgaagaatttcgaatcgggtctctccggaatatgatgcagctgtgtaccagatgtctcagcaactgcaccaagaagtctcctaacaaaattgcctctggctttttcctaagactgctgacttctaaactgatgaacgacattgccgacatttgcaagtccttggctagcttcatcaagaaacccttcgaccgaggggaagtggaaagcatggaggatgataccaacggcaacctcatggaagtggaagatcagagctctatgaatctctttaacgactaccctgactccagcgtttccgatgccaacgagccaggcgagagccaaagcacgatcggtgccatcaatcccctagccgaggagtatctcagcaagcaagatttgctgtttttagacatgctcaaatttctgtgtctgtgtgtgaccacagcacagaccaatactgtaagctttagggcagcggacatcaggagaaaactactgatgctgattgactcttctacactggagcccacaaagagcctccatctgcacatgtatttgatgcttcttaaggaactgccgggagaggaatacccactgcccatggaggacgtgctggagctgctgaagccgctgagtaatgtgtgctctctttatagacgcgatcaagacgtctgcaagacaattttgaatcacgtgctccacgtggtgaagaatctcggtcaatctaacatggattccgaaaacaccagggatgcccaaggccagtttcttacagtgatcggggcattctggcatttgactaaggaaaggaagtatattttttcggtccggatggcactggtcaactgcctgaagaccctgctggaggccgacccatattccaaatgggccattctgaatgttatggggaaagacttccctgtaaacgaagtcttcacccaattcctagccgataatcaccaccaggtccgcatgctagcggctgagtcaattaatcgccttttccaggatacaaaaggcgacagttcccggctcctcaaagctctccccctgaaactgcagcagaccgcttttgaaaatgcctatctgaaagcccaagaggggatgcgggaaatgtcccattcagcggagaatcctgagacgcttgacgaaatatacaataggaaatcagttctgctgactctcatcgcggtggtgctgtcttgcagtccaatttgtgagaagcaggcactcttcgccctctgtaaaagtgttaaggagaatggacttgagcctcacctagtcaagaaggttctggagaaggtgtccgagacatttggatatcgtagactggaggacttcatggccagtcacctggactatctcgtgctcgagtggctgaatttacaggacactgagtataacctcagctcctttccctttatattgctcaactatacaaatattgaagatttttacagatcctgctataaggtgctgatcccccatttggtcatccgaagccatttcgatgaggtgaagtctatagctaaccagattcaagaggactggaagtccttactgaccgattgcttccctaagattctggtcaatatattgccttattttgcgtacgaaggcacacgggactctggaatggcccagcagcgcgagacagcaactaaggtctacgacatgcttaagagcgaaaatctgcttggcaagcagattgaccatctgttcatctctaatctccccgagatagtggtcgaactccttatgacactgcacgagccagctaactccagcgccagtcagtctaccgacctgtgtgatttcagctag

SEQ ID NO: 27369 - DNA, 282 bp, synthetic construct
  misc_feature 1..282: note = Description of Artificial Sequence: Synthetic coding sequence
  source 1..282: mol_type = other DNA
atgtccctggtgttgaatgacctgctgatttgctgtaggcaacttgagcacgatcgagcgaccgagcggaaaaaagaagtcgagaagttcaagaggctgattcgcgatcctgaaaccattaagcacttagaccggcatagcgatagcaagcagggcaagtatcttaattgggatgcagtttttagatttctccagaagtacatacagaaggaaaccgagtgcctgcgcattgccaagcctaatgtctctgcatctacacaggccagcaggcagaagaaatag

SEQ ID NO: 27370 - DNA, 921 bp, synthetic construct
  misc_feature 1..921: note = Description of Artificial Sequence: Synthetic coding sequence
  source 1..921: mol_type = other DNA
atggagagtatctttcacgaaaaacagccttcaggcaatatggatgacagcggatttttttctatccaggtcatctccaacgcccttaaggtgtgggggctggaactcatcctcttcaatagccccgaatatcagagactccgcattgacccaatcaacgaaagatcttttatctgtaactacaaggagcactggtttactgtacgcaagctgggtaaacagtggtttaacctgaactcactgcttacaggcccagagcttatcagcgatacctacctcgccttattcttagcccagctgcagcaggaaggttattccatattcgtcgtgaaaggagacttgcccgattgtgaggccgaccagctgctccaaatgattcgagtccagcagatgcacaggcctaagttgataggcgaagagctggcacagctgaaggagcaaagagtgcataaaacagacctcgagagagtgcttgaagccaacgacggatccggtatgcttgacgaggacgaagaggacctgcagcgcgcactggccctgtcccggcaagagattgacatggaggatgaagaggccgacttgcgccgtgcgatacagcttagtatgcaaggcagctctagaaacatctcacaagacatgacacagacaagcggaacaaacctaacctccgaggagttgcggaagaggcgggaggcctacttcgagaagcagcagcagaagcagcagcagcaacagcagcagcagcaacagggggacttaagcggacagtccagccatccttgcgagcgacctgctacatcttccggcgctctgggctctgatcttggtgatgctatgtccgaagaagacatgctccaggctgcagtcactatgagcctggagacagtgaggaatgacctaaaaacggaggggaagaagtag

SEQ ID NO: 27371 - DNA, 1110 bp, synthetic construct
  misc_feature 1..1110: note = Description of Artificial Sequence: Synthetic coding sequence
  source 1..1110: mol_type = other DNA
atggaaagtatcttccacgagaaacaggagggatcactctgcgcccagcactgcctgaacaatctgctccagggagagtatttcagccccgtggagttgtcctctatcgctcatcaactagacgaggaagaaaggatgcggatggcagaaggaggcgtcacaagcgaggattacaggactttcctccagcaaccctccggcaacatggacgacagtggattcttttcaatacaggtaatttctaacgcacttaaggtgtggggactcgagttgattctatttaatagcccggaataccagaggttaagaattgaccctatcaacgagcgatcattcatttgtaattataaggagcattggttcacagtgagaaagctcgggaagcagtggtttaacctgaactcactgctgactggccctgaattaatatctgatacatatctggccttgttccttgctcagctccagcaggaaggttattctattttcgttgttaagggcgacctaccagactgtgaggcagaccagttgcttcagatgattagagtccagcagatgcatcgccctaaacttattggcgaggagcttgcccagttgaaggaacagcgagttcacaaaaccgacttggaacgcgtattggaagccaacgacggctccggtatgctagatgaagatgaggaggacctccagcgtgccctcgccctgagccggcaggagatagatatggaggatgaggaggccgacctgcggcgtgccattcagttatccatgcaaggttcctctagaaacatatcccaggacatgactcagactagcggaaccaatctaacatccgaggagcttagaaagcgcagagaagcatacttcgagaaagaccagcattttcatatcttgaaacagcaacagaagcagcagcagcagcagcaacagcagcagcagggtgatttaagcggacagtcctctcatccttgtgagcgtccggcaaccagctctggagctctggggtccgatcttggtgacgccatgtccgaggaggatatgctgcaggccgcagtgactatgagtctggaaacagtgcgaaacgacctaaagaccgagggtaagaagtag

SEQ ID NO: 27372 - DNA, 1086 bp, synthetic construct
  misc_feature 1..1086: note = Description of Artificial Sequence: Synthetic coding sequence
  source 1..1086: mol_type = other DNA
atggaaagcattttccatgagaagcaggagggcagtctttgtgctcagcactgtctgaacaacctcctgcagggcgagtatttttcaccggtggagctttccagcattgctcaccagctggatgaggaggaacggatgcgaatggcagagggtggagtgacatccgaggactatcggacctttctgcaacagccaagcgggaatatggatgattccggctttttcagtatacaggtgatctcaaatgccctgaaagtgtggggccttgagctcatcctgttcaattcacctgagtatcagcgactcaggattgaccctattaatgagagaagctttatttgtaactacaaagagcattggttcactgtccggaaattgggaaagcagtggtttaacctgaacagcctcctaactggcccagagctgatctccgacacgtaccttgccctgtttctcgctcagctccagcaagagggctatagtatctttgttgtgaagggcgacctgccagactgcgaggcagaccaactgctacagatgatcagagtacaacagatgcacagacctaaactgattggtgaagaactggcacagctcaaagaacagagggtgcataaaaccgaccttgaacgggtacttgaagccaacgatggatccggcatgttagatgaggacgaagaggatcttcaacgagcgttagcccttagccgacaggagatcgacatggaagacgaagaggcagatctccgcagggctatccagttgtctatgcaggggtcttctaggaacattagccaagacatgactcagacatccggtactaaccttacctccgaagaactgcggaaacgcagagaggcttactttgaaaaacaacagcagaaacaacagcagcagcagcagcagcaacagcagggcgacctatccgggcaaagcagtcacccctgcgagcgcccagctacatcttccggtgctctgggtagcgatctgggagatgcaatgagcgaagaggacatgttacaggctgcagtgactatgtcgttagagaccgtgcgcaatgacctgaagactgaaggcaagaaatag

SEQ ID NO: 27373 - DNA, 1101 bp, synthetic construct
  misc_feature 1..1101: note = Description of Artificial Sequence: Synthetic coding sequence
  source 1..1101: mol_type = other DNA
atggagtctatctttcacgagaagcaggaagggtcgttgtgtgcacagcattgcctcaataacctgttacaaggcgaatacttttccccagtggaactctcttcaattgcccaccagctggatgaggaagagaggatgagaatggccgaaggaggcgtcacctcagaagactatcgtaccttcctgcagcaaccctccggtaacatggacgattccggcttcttttccatccaggtcattagcaacgctcttaaggtgtggggtctggaactgatcctgttcaactcgccagagtaccagcggctaagaatagatcccatcaacgagaggagcttcatttgcaactacaaagagcattggttcaccgtgaggaagctggggaagcagtggttcaacctgaacagccttttgactggcccagagctgatctctgacacataccttgccctattcttggcccagctccagcaggaaggttatagtattttcgtagtcaagggtgacctccccgactgcgaagccgatcagctactccagatgattcgggtgcagcagatgcaccgacccaagctgatcggagaggagcttgcacaactcaaggaacagcgagtgcataaaacagatctggagcgggtgttggaagccaatgacggctccggcatgttggacgaagatgaggaggacctgcagcgtgcccttgctctgagcaggcaggagatcgatatggaggatgaagaggcggacctgaggagggcaatccaactgagtatgcagggctcatcgcggaatatctctcaagatatgacacagacatccggcactaatctcacctccgaggaactgcggaagagaagagaagcgtactttgagaatgactacttcgacagtcagcagcagaagcagcagcagcaacagcagcagcaacagcagggagatctcagcggccagagcagccacccctgtgaacgcccagccaccagtagtggcgcactagggagcgatctcggcgacgccatgagcgaggaggatatgctccaagccgctgtgactatgtccctggagacagtaaggaacgatttgaagacagagggaaagaaatag

SEQ ID NO: 27374 - DNA, 1065 bp, synthetic construct
  misc_feature 1..1065: note = Description of Artificial Sequence: Synthetic coding sequence
  source 1..1065: mol_type = other DNA
atggagtctatcttccacgaaaagcaggagggatcactttgtgcccagcactgtctgaacaatttgctacaaggagaatactttagtccagtggagctgtcttctattgcccatcagctggacgaggaagagcggatgcggatggccgagggcggtgtcacctcagaggattatcgtactttcctgcaagttattagcaacgcattgaaggtctgggggctcgagctcattcttttcaacagccccgaataccagcgtctcaggatagaccccatcaacgaacgtagctttatctgcaattacaaagaacactggtttactgtgcgtaaactgggaaagcagtggttcaatctgaatagtttactgacaggtccggaactgataagcgacacctacctcgccctgttccttgcccaactgcagcaggagggctatagcatcttcgtggtaaagggggacctgccagattgtgaggcagaccaactgttacaaatgattcgtgtgcaacagatgcataggcctaaactgattggagaggagcttgctcagttaaaagagcaaagagtgcataagaccgacttggaaagggtcctggaggctaatgacggtagcggaatgttggacgaggacgaggaagacctacaaagggcactcgccctgtcacgtcaggaaatcgatatggaggacgaggaggctgatttacgtagagctatccagctgagcatgcagggatcgagtcgaaacatcagtcaggatatgacgcagactagtgggaccaatcttacctctgaagagctgagaaagaggagagaagcttacttcgaaaaggatcagcactttcatatcctgaagcagcagcagaaacagcaacagcagcagcaacaacagcagcagggagacctctccggacagagctcacacccttgtgagcggccagcaacaagctccggagcattgggaagtgacttaggcgatgccatgagtgaagaagatatgctgcaggctgctgtgaccatgtccctcgaaaccgtcagaaatgatcttaaaactgagggaaaaaaatag

SEQ ID NO: 27375 - DNA, 1113 bp, synthetic construct
  misc_feature 1..1113: note = Description of Artificial Sequence: Synthetic coding sequence
  source 1..1113: mol_type = other DNA
atggagtctatcttccacgaaaagcaagagggcagcctgtgcgcccagcattgcctcaacaatctgcttcagggagagtattttagtcctgtcgaactgtctagcatcgctcatcagttggatgaagaggagagaatgcggatggctgaaggcggtgtgacatctgaagattatcgaacctttctccagcagccttctgggaacatggacgactctggattcttctcgatccaggttattagtaatgcccttaaagtgtggggccttgagcttattttgtttaacagtccggagtatcagcgcctaaggattgatccaataaacgagcggtctttcatctgcaactacaaggaacactggttcacagtccggaagttaggcaagcagtggtttaatctgaatagccttcttacaggcccagaactgatctcagacacataccttgcactgtttcttgcccagctgcagcaggagggttacagcattttcgtggtcaaaggggacttgccagattgcgaggccgaccagctactgcagatgatacgcgtgcagcagatgcacaggcctaagctaatcggggaggaactggcccagctgaaggaacagcgagtccacaagacggacctggaaagggtgctcgaagctaacgacggttctggtatgttagatgaagatgaagaggatctgcagcgagccctcgcgctctcaaggcaggaaattgatatggaggacgaagaagctgatctgcgtcgtgctatccagctgtccatgcagggctcctcacgtaatatctctcaggacatgacccagacttcaggaacgaatttaacgtccgaggagcttcgtaaacgtcgcgaagcttacttcgagaaaaccgagtccagatcggtggctcaggcccagcaacagaagcagcagcaacagcagcagcaacagcagcagggcgatttgtcaggccaatcatcacacccgtgcgaacggccagcgactagctccggtgctctgggctcagacctaggggatgccatgtctgaagaagacatgctccaagccgctgtcactatgagtctggaaaccgtaaggaatgacctgaagactgaaggtaagaaatag

SEQ ID NO: 27376 - DNA, 1041 bp, synthetic construct
  misc_feature 1..1041: note = Description of Artificial Sequence: Synthetic coding sequence
  source 1..1041: mol_type = other DNA
atggagtctatcttccacgaaaagcaggaaggatcattatgtgctcagcattgcctgaacaatctcctgcagggtgagtattttagcccagtcgaactgagctcaattgcacatcagctggacgaggaggaacgtatgagaatggcggaaggaggagtaacgtctgaggattatcggacatttttacaggtgatttccaacgcgctgaaggtgtggggcctggagttaattctgttcaacagccccgaatatcaacggctcagaatcgaccccattaatgagaggtctttcatctgcaactacaaagaacactggttcaccgtgaggaagcttggtaaacagtggttcaacctaaattcactgttgacaggtcctgagctgatttctgacacatacttggcgctgtttctagctcagctgcagcaagaaggctattcaatcttcgtggtgaaaggagacttacccgattgcgaggctgaccagctgctgcagatgattcgggtacaacaaatgcaccggcctaagctgattggggaggagcttgcccagctcaaggagcagagggtgcataagacagatctggaacgcgtcttggaagccaatgacgggagcggcatgttggatgaagatgaggaagatctccagcgtgccctggcactttcccgacaagagatcgacatggaggacgaagaagccgacttacgtagggccatccagctgagcatgcagggatcttcgcggaacataagccaggacatgactcagacttctggaacaaatctaacctcggaggaactgcgcaagcgtcgtgaggcgtatttcgagaagcagcaacagaaacaacagcagcagcaacaacagcagcagcagggggacctgtctggtcaatcaagtcacccgtgtgaacgcccagccacctctagcggggctttgggatccgatctcggcgacgcaatgtccgaagaagatatgcttcaggccgcagtcaccatgtcactcgagaccgtgcgcaacgacttaaaaaccgaaggcaagaaatag

SEQ ID NO: 27377 - DNA, 1095 bp, synthetic construct
  misc_feature 1..1095: note = Description of Artificial Sequence: Synthetic coding sequence
  source 1..1095: mol_type = other DNA
atggaaagtatctttcacgagaaacaagagggttccctctgtgcccaacattgtttgaacaatctattgcagggcgaatacttctcacctgtagagctgagttccatagcccaccaactggatgaagaggaacgcatgcgtatggctgaggggggagtgacgtccgaagattatcggacgtttctgcaacagcctagtgggaatatggacgacagcggattcttttccatccaagtgatttccaatgccctgaaagtgtggggccttgaactgattctgtttaactcccccgaataccagagactccgaattgaccccataaatgagcgctccttcatttgcaattataaggagcactggtttactgtgcgcaaactgggtaagcaatggtttaacctgaacagcctgcttacagggcctgagttaattagtgatacttacctcgcactgtttctggcccaattgcaacaggagggctacagcatttttgttgtgaagggtgacctgccagactgcgaggccgaccagctcctgcagatgattcgcgtccaacaaatgcaccgaccaaagctgatcggggaagagctcgcacagctgaaggaacagagggtgcacaagaccgacctggaacgggtgctcgaggctaatgatggctccggtatgcttgatgaagatgaggaggacttgcagcgggcactcgccctttcaagacaggagatcgacatggaggatgaggaggctgacctcagaagggccattcagctctcaatgcagggctcctcccgaaatatttcccaggacatgacacagacgagtgggaccaacctgacatccgaggaattaaggaaaagacgagaagcatatttcgaaaaacagcagcaaaagcagcagcagcaacagcaacagcagcagcagggcgacctgtctggacagtcaagccacccatgcgaaagaccagccacttcatctggcgctctaggctcggacctcggaaaggcctgctcaccctttatcatgtttgcaacctttaccctttacttgacctacgaactgcacgttatttttgccctacattattcctctttccctttgtag

SEQ ID NO: 27378 - DNA, 1119 bp, synthetic construct
  misc_feature 1..1119: note = Description of Artificial Sequence: Synthetic coding sequence
  source 1..1119: mol_type = other DNA
atggaaagcatttttcatgagaaacaagagggatcgttatgtgctcagcactgtctgaataaccttctgcaaggggaatacttcagcccagtcgagctttcatctatcgcgcatcagcttgatgaggaggaaaggatgcgcatggcagaagggggagtgactagtgaagactacagaacttttttacaacagccatccggtaacatggatgacagtggtttcttctccatccaggttatcagcaatgccttaaaggtgtggggcctggaattgatcctgttcaatagccctgaatatcaaaggctgcgtatcgaccccattaatgaacgaagtttcatatgcaactacaaagagcattggttcacagtgcggaagcttggaaaacagtggttcaatctgaacagcctgttgacaggcccagaattgataagcgatacttacctggccctgttccttgctcagctgcagcaggagggctacagtatattcgtggttaagggggacctcccagactgcgaggccgaccagctgctgcaaatgattagggttcagcagatgcaccgtcctaaactgattggagaagagcttgcccaactgaaggagcagcgagtgcacaaaacggacttagagagggtgctggaggcaaatgacggatccggaatgctggatgaggacgaagaggacctgcagcgggctctagcactttcccggcaggagatcgatatggaagatgaagaagccgacctaaggcgagccatccagttgagcatgcaaggatcttcaagaaacatcagccaggacatgacccaaacttctggcactaatctcacctccgaagaactacggaagagacgagaggcctattttgagaaatttggcagaccgaggagagctgattgcttgaggcagcagcaaaagcagcagcaacaacagcagcagcagcagcagggcgacttgagcggccagtcctcccatccgtgtgaaagacctgccaccagctcgggggcattgggttccgacttgggtgatgccatgagtgaagaggacatgctgcaagcagctgtgaccatgagcctggaaaccgttaggaacgaccttaagaccgagggaaagaaatag

SEQ ID NO: 27379 - DNA, 1128 bp, synthetic construct
  misc_feature 1..1128: note = Description of Artificial Sequence: Synthetic coding sequence
  source 1..1128: mol_type = other DNA
gacagtgtgagcaagaaaaaacaggagggcagcctgtgtgcccagcattgtttgaataatctgctgcagggtgaatacttctcgccagtagagctgtctagcatcgcccaccagctggacgaggaggagaggatgcgaatggccgagggcggtgtgacatccgaggattaccgaactttccttcagcagcctagtggaaacatggacgactcaggatttttcagtattcaggtcatatctaacgctctgaaagtctgggggctcgaactgattctatttaacagtcctgagtatcagaggctgcggattgatcccatcaatgagaggtccttcatttgcaattataaggagcactggtttacagtccggaaactcggaaaacagtggttcaatcttaatagtcttctgactggaccagaactgatctctgacacctaccttgccctgtttctcgcccagctgcagcaggagggctacagtatcttcgtagtgaagggcgacttgcccgactgcgaagctgaccagctgctacagatgatccgggtacaacagatgcatagacctaagctaattggggaagagcttgctcagctcaaggagcagagggtgcacaaaacagatttggagcgggtattggaggccaatgacggttcaggcatgctggatgaggatgaagaagatctgcaacgagcgctcgccctgtcccggcaagaaatagatatggaggacgaagaggccgatctgaggcgggctattcagctctcaatgcaaggctcatcacggaatatcagccaggacatgacacagacatcagggaccaatctgacatccgaggaactgcgcaaacgccgagaagcatactttgagaaaaaatttaccgcgaacagaacggaccagcattttcatattctgaagcagcagcagaaacagcagcagcagcaacagcaacaacagcagggcgacctgtcggggcagtcttcacatccttgtgaaagacccgcaacctcatcaggagcccttggttctgacctcggtgatgccatgtccgaagaggatatgctccaagccgctgtgacaatgtctttggagacagttcgcaacgatctcaaaacagaagggaagaagtag

SEQ ID NO: 27380 - DNA, 1125 bp, synthetic construct
  misc_feature 1..1125: note = Description of Artificial Sequence: Synthetic coding sequence
  source 1..1125: mol_type = other DNA
atggagtctatctttcacgaaaaacaagagggttccctgtgcgcccagcactgcctgaataacctcttacagggcgagtatttttcaccagttgagcttagtagcattgcccaccagctggacgaggaagaacgcatgagaatggctgagggtggtgtcacttctgaggactatcgaacgtttctccagcagccatcaggcaacatggatgatagcggtttcttttccatccaggtgatttcgaatgcacttaaggtctggggcctcgagctgatcttatttaactcgccggagtatcagcgcctgcggattgatccaattaatgagcgttcatttatttgcaactacaaagagcactggtttacagtccgcaagttgggaaaacagtggtttaatcttaactcactgctcaccggacccgagcttatctcagacacttatctcgcgctatttctggcacagctgcagcaggaaggttacagcatattcgtcgtcaaaggcgatctccctgactgcgaggctgaccagttgttgcagatgatccgtgtgcagcagatgcaccgccctaagttaatcggcgaagagttagcgcagctgaaagagcagcgcgtccacaaaactgacctggagcgagtcttggaggccaacgacggcagcggaatgttagatgaggacgaggaggacctacaacgcgcattagccctcagccgtcaggagattgatatggaagatgaagaagcagatctccgacgtgctattcagttgtccatgcagggatcttcccggaatattagccaggatatgacccaaaccagcggcactaacctgacttcagaggaattgaggaaaagaagggaggcatattttgagaaggtcttcttcaaaaacctacaacagatcggcagagccaggcaacagcagaagcagcagcaacagcagcaacagcagcagcaaggggatctgtccggccagtctagccatccgtgcgaaaggcctgctaccagctcaggggctctgggctccgacctgggggatgccatgtcagaggaagatatgctccaagccgctgtgaccatgagtttggagaccgttagaaacgacctgaaaacagaagggaaaaaatag

SEQ ID NO: 27381 - DNA, 1113 bp, synthetic construct
  misc_feature 1..1113: note = Description of Artificial Sequence: Synthetic coding sequence
  source 1..1113: mol_type = other DNA
atggagagcattttccacgaaaaacaggagggttctctctgtgcacaacattgcctcaacaatctgctgcaaggcgaatacttttcaccggtggagctgtcatctatagcccaccagctcgatgaagaggaacgcatgcggatggctgagggtggtgtgacaagcgaggactacagaaccttcctccagcagccgtctgggaatatggacgactctgggttctttagtatccaggttatctcgaacgccctgaaggtttggggactcgagctaattctatttaatagtcccgaatatcagcgcctgcgaatagatcctataaacgaaaggtctttcatttgcaactacaaagaacactggtttactgtccgtaagctgggcaagcaatggtttaacctcaatagcttactgaccggcccagagctgatatctgacacctacttagctctgttcctcgcccaattgcagcaggagggctacagtatttttgtcgtgaaaggagatcttcctgactgcgaagctgatcagctgctccagatgattagagtacagcaaatgcatagaccaaagctgattggagaggagctggcccaactgaaggagcagagggtgcacaagacggacctggagcgtgtgctggaggctaatgacgggagtgggatgctggatgaggacgaggaggacttgcagcgcgctttagcattgtcaaggcaggagatcgatatggaggacgaagaggcagatctaaggcgggctattcagctgtcgatgcagggcagctcgcgtaacataagccaggacatgacccaaaccagcggaaccaatctgactagcgaagaactacgaaaacggagggaggcttactttgagaagatctactttaccttcgagtgtttccgtcagcaacaaaaacaacagcagcagcagcagcagcagcaacagggcgatcttagcggccagagtagtcatccctgtgagcgccctgccacatcgtcaggagccttaggctccgacctgggcgacgcaatgagcgaggaagacatgctccaggccgctgtgacgatgtccctggaaaccgttagaaatgatttgaaaactgaaggtaagaagtag

SEQ ID NO: 27382 - DNA, 1134 bp, synthetic construct
  misc_feature 1..1134: note = Description of Artificial Sequence: Synthetic coding sequence
  source 1..1134: mol_type = other DNA
atggagtccatattccatgaaaagcaggaaggttccctgtgcgcccagcattgcctgaataacttgctccagggagagtacttttcccccgtagaactctcatccatcgcccatcagctggatgaggaggagcggatgaggatggccgagggtggagtgacatctgaggattatagaaccttcctgcagcaacccagcgggaatatggacgacagcgggttttttagcattcaggttatatccaatgctctgaaggtttggggactggagttgattctttttaacagtccagagtaccagcggctaaggatcgaccccatcaatgaacggagtttcatctgtaactacaaggaacattggttcactgtccgaaaactcggcaagcagtggttcaacctgaatagcctgttgaccgggccagagcttataagcgacacttacctagccttattcctcgcgcagctgcaacaagaagggtacagtatcttcgtcgtcaaaggagacctgcctgactgcgaagcggatcagttactccagatgattcgcgtacagcagatgcaccgacccaaactcatcggagaggagctggcccagctaaaggagcaacgcgttcataaaacagatttggagagagtcctggaggctaacgatggcagtggaatgttggacgaggacgaggaggacttgcagcgggctctggccctgtctaggcaggagattgacatggaagatgaggaggccgatcttaggcgcgcaatacagctcagcatgcagggttctagccgcaacatcagccaggacatgacacaaacatctggtactaatctcactagcgaagagctgcgcaagcgcagggaggcctattttgagaaggtgttctttaaaaacctacagcagaatcagcactttcatatcctcaagcagcagcagaagcagcagcaacagcaacagcaacagcagcagggagacctgagcggccagtcctcccatccatgcgagaggcccgctacttcctccggggctctcggttcagacctaggagatgcgatgtcagaggaggatatgttgcaagcagccgtcacaatgtctctggagactgttagaaacgatctcaagacagaggggaaaaagtag

SEQ ID NO: 27383 - DNA, 549 bp, synthetic construct
  misc_feature 1..549: note = Description of Artificial Sequence: Synthetic coding sequence
  source 1..549: mol_type = other DNA
atgatacgagtgcaacaaatgcaccggcctaagctgattggcgaagagctggcccaattgaaggagcagagggtgcataagacagatctcgaacgcgtgctggaggccaatgacggatctggtatgctggacgaggatgaagaggacttgcagcgcgcactggccttatccagacaggaaattgacatggaagatgaagaggcagatctgagaagagcgatacagctgtccatgcaagggagcagtcgcaacattagtcaggatatgactcagacaagcggcacaaatctaacaagcgaggaattacgcaagcggagagaggcctacttcgagaagcagcaacagaagcagcagcagcaacaacagcagcagcagcagggcgacctgtcgggtcagtccagccatccatgcgagagacctgccacaagctctggcgctctcggaagcgaccttggagacgctatgtctgaagaagacatgctgcaggccgcagttacgatgagcctagagactgttaggaatgatttgaaaacagagggaaaaaaatag

SEQ ID NO: 27384 - DNA, 3306 bp, synthetic construct
  misc_feature 1..3306: note = Description of Artificial Sequence: Synthetic coding sequence
  source 1..3306: mol_type = other DNA
atgtcagctaaggctatttcagagcagaccggaaaggaactcctatacaagtttatctgcacaacaagcgccatacaaaaccggtttaagtacgctcgtgtgacacctgataccgattgggctcgccttctgcaggatcacccgtggctgctcagccagaatctggtagtgaaaccagaccagctgattaaaagacgtggtaagctgggactcgtgggagtgaacctcaccctggacggggtgaaatcatggctcaaaccccgtctggggcaggaggctacagtcggtaaagctaccggctttctgaaaaacttcttaatagaacctttcgtccctcactcgcaagccgaggagttctacgtgtgcatctacgccaccagggagggagattatgtgctatttcatcatgaaggcggagtggacgtcggcgacgtggatgcaaaagcacagaaattactagtgggggtagatgagaagctgaatccagaggacataaaaaaacacttactcgtccacgcccctgaggataaaaaagagattctggcttcgtttatcagtggattatttaacttctacgaagatctgtatttcacatatttggagatcaatcctctggtggtgacaaaggatggagtttatgtgcttgatctcgccgcaaaagtggatgctacggccgattacatttgtaaggtgaagtggggcgatattgagtttccgccaccatttgggagagaagcctaccccgaagaggcgtatatcgcagatctggatgccaagagcggcgcaagcctcaagctaacactcctgaatcccaaaggacggatttggacaatggtcgctggagggggagccagcgtagtgtactcagacacaatatgcgacctcggcggagtgaacgagctggccaattacggggaatattccggagcgccaagtgagcagcaaacatacgactacgccaagacgatcctgagtctgatgactcgggagaaacacccggacggaaaaatcctgataatagggggatccatcgccaatttcacaaatgtcgccgcaacctttaagggcatagtacgagctatcagggattaccagggaccacttaaggagcatgaagtgacaatattcgtgaggcgcggagggccaaactaccaagaaggtctacgagttatgggagaggtcggaaagaccactggtatccccatccatgtgtttgggacagagacacacatgacagcaatagtgggaatggccctgggccacaggcccattcctaaccaacctcctacagcagcccataccgctaatttcctgctgaacgcttctggcagcacgtccacccccgctcccagtcgcaccgcctccttcagtgagtcacgggctgacgaagtagcccctgccaagaaggctaaaccggcaatgccccaggactctgttccctctcctaggtcgctgcagggcaagtctaccacactgttctcgcgtcatactaaagccatcgtctgggggatgcaaacacgtgctgtccagggtatgttggatttcgactacgtgtgttcacgcgatgagcccagcgtggctgcaatggtttatccttttaccggcgatcacaagcagaagttttactggggtcacaaggagattttaatacccgtctttaagaacatggcagatgctatgcggaagcacccagaggtggatgtactcattaactttgcaagcctgcgaagcgcctacgattctactatggagacaatgaattacgcacagattagaacaattgcaatcatcgccgagggtatcccagaagcccttacccgtaaattaattaagaaggctgatcagaaaggcgtgactataatcggcccagccaccgtggggggtattaaaccaggatgcttcaaaataggaaacactggaggcatgctggacaacattctagccagcaagctgtatcgtcctgggtccgtggcctatgtttccagatctggcggtatgtcaaatgagcttaacaacataattagccggacaacggatggagtttatgagggcgttgctattggcggtgacagatacccaggatctacatttatggaccatgtgctgcgctaccaggacacccccggtgtaaaaatgattgtcgttcttggagaaatagggggaactgaagagtacaagatttgtcgtggaataaaggaggggcgtctgacaaagcccattgtctgctggtgtattggaacatgtgccaccatgttcagttcggaagttcaattcggacacgcaggggcatgtgctaatcaggccagcgagacagctgtagcgaaaaaccaggccttaaaggaagccggagtctttgtccctcggtcctttgacgaactaggcgaaattatccaatcagtgtacgaggaccttgtggcgaatggcgtaatcgtgcctgcacaggaggtcccgccacccactgttccaatggactatagctgggccagagagctggggttgattaggaaaccagcaagcttcatgacctccatttgcgatgagcggggacaggagctgatatatgcgggtatgcccattaccgaagtgtttaaggaagaaatgggcataggaggcgttctcggcctactgtggtttcaaaaaagactgccaaagtattcctgtcagttcatagagatgtgtctcatggtcactgctgaccatggacccgcagtgtcaggggctcataatacgattatctgtgccagagccggtaaagatttagtaagcagtcttacctctgggctactaaccattggggaccggtttgggggagcactcgacgccgcagctaagatgttttctaaagcattcgactctggcataatcccgatggaatttgtaaataaaatgaagaaggagggcaaactgattatgggcattgggcatagggtgaagagcataaacaatcctgacatgagggtccaaatcctcaaagactacgtgcgtcaacactttcctgccacaccattactggattatgctcttgaagtcgagaagatcaccacgagcaaaaagcccaatctaattcttaatgtcgatgggctgatcggcgtggcattcgtggatatgttgagaaattgtggctcgttcacgagggaggaggcagatgagtacatcgacattggcgctttgaatggaatttttgtgctgggccgttccatggggttcattggacattacctagatcaaaagcgattgaagcaagggctgtaccgccatccctgggatgatatatcgtacgtgctgccggaacacatgtcaatgtag

SEQ ID NO: 27385 - DNA, 3276 bp, synthetic construct
  misc_feature 1..3276: note = Description of Artificial Sequence: Synthetic coding sequence
  source 1..3276: mol_type = other DNA
atgtctgccaaagccatctctgagcagacggggaaagagctgctgtacaaattcatctgtaccacctccgccatccagaatcgttttaagtacgcccgtgtgacacctgacacggactgggcacgcctgctgcaggaccacccttggctgttatctcagaatttggtggtgaagccagatcagctcatcaaacgcagaggtaagctgggactggtgggagtcaaccttacgctggacggtgtcaagtcatggctgaagccccgtctcggtcaagaagccacagtgggaaaggccacaggctttctgaaaaactttctgattgaaccgtttgtgcctcactcgcaggcagaggagttctacgtttgtatatacgccacaagagagggggactatgtcttgttccaccacgagggcggtgtcgatgtcggtgacgtggatgcaaaggcccagaaattactcgtcggggtggatgaaaagctcaatccagaagacatcaaaaaacacctcctggtccatgcgcctgaggacaagaaagagatcctggcttcattcatttcaggactatttaacttttacgaggatttgtactttacatacctcgaaatcaatccacttgtagtcaccaaggatggcgtgtacgttctggacctggccgctaaagtggacgccaccgcagattacatctgtaaggtgaaatggggcgatattgagtttccgcctccgtttgggagggaagcctacccagaagaggcatacattgctgacctggacgcgaagtccggtgcttccctgaagctgaccctgctcaaccccaaggggagaatctggaccatggtcgccggtgggggtgcttccgtcgtgtatagcgataccatttgtgacctcggcggtgtcaacgaactcgcgaattacggtgagtacagtggggcaccatctgaacagcagacctacgattatgccaagactattctgagtctcatgacgcgagagaagcatcccgatgggaagattttaataattggaggcagcattgccaattttaccaacgtcgccgcaacgttcaagggtatcgtgcgcgcaatacgagattaccaggggcctttgaaggaacacgaggtcacaatctttgtgaggagggggggacctaactatcaggagggactcagggtgatgggtgaggtgggaaagaccactggcatcccgatacatgtgttcggcacagagactcacatgacagccatcgtgggcatggctctgggccatcgtcctatcccaaaccagccaccaacggccgctcataccgccaatttcctcctcaatgcatctggaagcacgtccactcccgcaccctctaggacagccagcttttcagaatcccgggcagatgaagtagcaccagcaaagaaagctaagcctgcgatgccgcagggcaaaagcacaaccctctttagccgccacaccaaggccatcgtgtggggtatgcaaactcgcgctgtgcaggggatgttggactttgactatgtgtgcagccgtgacgaacctagcgtggctgctatggtgtacccattcaccggggatcacaagcagaagttctattggggacataaggagattctgatacctgttttcaaaaacatggccgacgcaatgcgaaagcatcccgaagtggacgtgctgataaactttgcttcactaagatcagcctacgacagcacaatggagactatgaactatgctcagattagaacaattgctataatagcagaagggatccctgaggcactgactcgtaagttgatcaaaaaggcagaccagaagggagtaaccattatcgggcctgcaaccgtcggagggatcaagccgggatgctttaagataggcaacacaggtggaatgcttgataatatccttgccagcaaattgtacaggccgggatccgtcgcctatgtctccaggagcggcggaatgtccaacgaattgaacaacatcatatcacgcaccaccgatggcgtttacgagggggtggccatcggcggtgacaggtatcccggaagtactttcatggaccacgtgctgcgttaccaggatacaccgggtgtcaagatgatagtagtcctaggcgagatcggagggaccgaggaatacaaaatttgtcgcggaattaaggagggtcggttaacaaaacctatcgtctgctggtgtatcgggacctgcgccaccatgttttctagtgaagtccagttcggccacgccggtgcttgcgctaatcaggccagtgaaaccgcagtcgcaaagaaccaagccctcaaagaagctggcgtgtttgtgcccagatccttcgatgagctcggagaaattatccagtcagtttatgaggacctagtcgctaatggtgtcattgtgcctgcccaagaggtaccgcctccaacagtgcctatggattactcttgggctcgtgaactcggcttgatccggaaaccagcgtcatttatgacctcaatctgcgacgagcgcggacaggagctcatttacgcagggatgcctatcactgaggtcttcaaggaggaaatgggaatcgggggagttctcggcctcctttggttccaaaagaggttgccaaagtacagctgccagttcatcgaaatgtgcttgatggttaccgcggatcatggacctgccgtttccggtgctcacaatacgatcatctgcgctagagccggaaaagaccttgtgtctagcctgacctcagggctcctcaccatcggtgaccgtttcggcggagctctggacgcagctgccaaaatgttcagcaaggcatttgacagtggtattatacctatggagttcgtgaacaagatgaagaaagagggaaagttgatcatggggatagggcacagagttaagagtatcaataaccctgacatgcgcgtgcagatccttaaagactacgtgcggcaacactttcccgctacccctttactggattatgctctggaagtggagaagatcacgacatctaagaagcctaatctgattttgaacgtggacggattgatcggggtcgcgtttgtcgacatgctcaggaattgtggctcttttacccgcgaggaggcagatgagtatattgatattggggcacttaacggcatcttcgtcctgggtcgatccatgggattcattggtcattacttggatcagaagaggttgaagcaggggctgtatcggcacccatgggacgatatctcatacgttctacctgagcacatgtcgatgtag

SEQ ID NO: 27386 - DNA, 3276 bp, synthetic construct
  misc_feature 1..3276: note = Description of Artificial Sequence: Synthetic coding sequence
  source 1..3276: mol_type = other DNA
atgtccgctaaagcaatcagcgaacagacaggaaaagagcttctgtataagtttatttgcactacctcggcgattcagaaccgctttaaatatgcccgagtaacccctgacaccgactgggcccgtctactgcaggaccacccctggctgctctctcagaatctcgtggtgaagcccgaccagctgatcaagaggcgaggtaagctgggcctggttggcgtaaatctcaccctggacggagtgaaatcctggctgaagccgagactcggccaggaagcaacggtgggaaaggctactggtttcctgaaaaatttccttatcgaaccgttcgtgcctcatagccaggcggaggagttctatgtgtgcatttatgccaccagggaaggggattacgttcttttccaccacgaaggtggagtggatgtcggcgatgttgacgccaaggcccagaaactcctggtgggcgtcgatgagaagttgaaccccgaggacattaaaaagcatctccttgtgcacgcacctgaagataaaaaggaaattctggcgtcctttatcagcggactgttcaatttttacgaggacctgtactttacttacctagaaattaacccgctggtggtgactaaggacggcgtgtacgtgctggatctcgcggctaaagtagatgccacagccgactatatctgcaaagtaaagtggggggacattgagttcccccctcctttcggacgcgaggcctaccctgaggaggcttacatagccgacctggacgccaagagcggcgcttcgctgaagctgaccctgctgaatcccaaagggagaatttggacaatggttgccggtgggggagcctcagtggtgtactccgatactatatgcgatctggggggagtaaacgagctggccaattatggggaatatagtggagcaccttccgaacagcagacatacgactatgctaagaccatcttgtctttgatgactcgtgagaaacatccagatggcaaaattctcatcattggaggaagcatcgcgaatttcaccaatgtagctgccacttttaaggggattgttcgcgctatccgggattaccagggaccattgaaggagcacgaggtgaccatctttgtgcggagaggcggaccaaattatcaggagggtctgcgggttatgggggaagtaggaaaaactactggcatcccgatacacgtgtttggaaccgaaacgcatatgacggcaattgtgggaatggccttgggacacagacccattccaaaccagccacctactgctgctcatactgcaaattttcttttgaatgcctctggttccaccagcacacccgcacccagcagaacggcaagtttctccgagtcccgcgcagatgaggtggcccctgccaagaaagccaagccagccatgcctcaggggaaatcgaccaccctcttcagtcgccacaccaaggctatcgtgtgggggatgcagacccgagccgtgcaggggatgctggattttgattacgtttgtagtagagacgagcccagtgtggccgcaatggtctatccatttacaggcgatcataagcagaaattttactggggacataaggagatactgatccccgtctttaagaatatggctgacgctatgagaaagcacccagaggttgacgtcctcattaactttgcctccctgcgaagcgcttatgactctactatggagacaatgaactacgcccagatccgtacaatcgctattatcgcagagggtatccccgaagccctgacgagaaagcttataaaaaaagcagaccagaaaggggtgaccattataggacccgctacagttggaggtatcaagcctggctgcttcaagattggcaataccgggggaatgttggacaacatcctggcatcgaagctataccgccctgggtctgttgcgtatgtttcgagatccggcggaatgtccaacgagcttaacaacataatctctcgcaccactgacggtgtgtatgagggagtggccattggaggggaccgttatcccggttcaacatttatggaccacgtcttgcgctatcaggacacccccggtgtgaaaatgattgtcgtgctcggggagatagggggaactgaggaatataagatatgtcggggaatcaaagaagggaggttaaccaagcctattgtgtgctggtgtatcggcacatgcgcgactatgtttagcagtgaggtgcagtttgggcatgcaggcgcatgtgcaaatcaggcgtcggagaccgccgtggcaaaaaaccaggccctcaaggaggcgggtgtgtttgttccgcgttccttcgacgaacttggagagatcatccagtcagtgtacgaggacttggtagccaacggagtgatcgttccagctcaggaggtccctccccctacagtgcccatggactattcttgggccagagaactggggctgatccgcaagccggctagctttatgaccagcatatgcgacgaaaggggtcaggaactgatttatgcaggtatgcctattactgaagtgtttaaagaagaaatgggcatcggcggagttctcggactactgtggttccagaaacgtctgccaaagtactcttgccagttcattgagatgtgcctgatggtgactgcagatcacggaccggctgtgtctggcgcacacaacaccatcatctgtgcacgcgctgggaaagatctcgtgtcgtctctcacctctggcctgttgaccatcggagatagatttggaggggcattagatgccgctgcaaaaatgttttccaaggccttcgactctggcattatccctatggagtttgtaaataagatgaaaaaggagggcaagctcattatgggaatcgggcacagagtgaaaagcatcaataacccggatatgcgcgtccagatcctgaaagactacgtgcgacagcactttcctgctacgccattactggattacgccctcgaagtggagaagatcaccacctcaaagaaaccgaatttgatcctcaacgtcgacgggctcatcggggtggcttttgtggacatgctccgaaattgcggttccttcacaagagaggaggccgatgaatatattgacataggcgctttaaacgggatcttcgtactgggacgttcaatgggcttcatcggccattacctcgatcaaaagcggttgaaacagggcctctacagacatccttgggatgatatctcgtatgtactacctgagcacatgtccatgtag

SEQ ID NO: 27387 - DNA, 3468 bp, synthetic construct
  misc_feature 1..3468: note = Description of Artificial Sequence: Synthetic coding sequence
  source 1..3468: mol_type = other DNA
atgggggcaggtaagagccctgctggaccagggcagaagcccgatcccggtaaactgccagcagcgggtgtactgcgtatcctacgcggatcttccggtctgtggaaaaaacgacgtgctcgaacctccgccgagaccgggcgagcgggactctccgccgcaatgagcgccaaggccattagcgaacagacgggcaaggaactcctctataaatttatttgtactacctctgccatccaaaataggttcaagtacgccagggtcactccagatacagactgggccagactgcttcaggaccatccttggctgctgagtcagaatctggtggttaagccagaccagttgatcaaaaggagagggaaactcgggcttgttggcgttaacctgacactggatggggtgaagagctggctgaagccacgtctcggacaggaggcaactgtgggaaaagctacaggcttcctgaaaaacttcttgattgagccatttgttccacacagccaggctgaagagttctacgtgtgcatttacgctacacgagaaggcgattatgtgttattccaccacgagggtggagtagacgtaggcgacgtggacgctaaggcccaaaagctgttggtgggcgtggacgagaaactaaatcctgaagacatcaagaagcacctgctggtgcatgcccctgaagataaaaaggagatcctggcctcgtttatttctggtttattcaatttctacgaggacttgtatttcacctacctcgaaattaatcctctggtcgtcactaaggatggggtgtatgtgctggacttagccgcaaaagtggatgctacagctgactacatctgcaaggtgaagtggggtgacatcgagtttccaccgccttttggcagagaagcatatccagaggaggcctacatcgccgacctggacgcaaaatcaggtgcttcgcttaaactgaccttgcttaatcctaaagggcgtatctggaccatggtagccggaggcggagcatctgtggtgtattcagacacgatctgcgaccttggcggtgtaaacgaactagctaactatggcgagtactccggagccccatcagagcagcagacttacgattatgctaagaccatcttatcccttatgacacgcgaaaagcatcctgacgggaaaattttgattataggcggaagtatcgccaattttacaaatgtggcggctactttcaagggaatcgttagagcaatccgcgactaccagggccctctgaaggaacatgaagttaccattttcgtgcgtcgcggagggcctaactatcaggaaggccttcgcgtcatgggtgaggtgggaaagacaacaggtattcccattcatgtttttggcactgagacgcatatgaccgccatcgtggggatggctctgggccatagacctatccccaaccagcctcctaccgcagcccacacggccaactttttgcttaacgcttcggggtctacatccacaccggctccttctcgcacagcgtccttttctgagtcgcgggctgatgaggttgctcctgccaaaaaggcaaaacctgccatgccacaggacagcgttccaagccctcgatccctccaaggaaaaagtacaacgcttttcagtcgtcataccaaagctattgtctggggcatgcaaacccgggcagtgcaggggatgctggactttgattatgtctgcagcagagacgaaccctccgtggctgccatggtatatcccttcactggggaccataaacagaaattctactggggtcacaaggaaatcctgattcctgttttcaagaacatggcggatgcaatgcgcaaacacccagaagtggatgtgctgatcaatttcgcctcactgcgttcagcatacgattccacgatggagactatgaactatgcccagattaggacgatcgctatcattgccgaaggtatacccgaggccctgacccggaaactaatcaagaaggccgatcaaaagggtgtaaccattataggtcctgcaaccgtgggcggtatcaaacccggatgcttcaaaatcggtaacactggcggtatgctggataacatactggctagtaagctgtataggcctggttcggttgcatacgttagtcggtctggcggaatgtcaaacgagctgaacaacattatttctcgaaccactgacggagtgtacgagggagttgcaattggtggcgacagataccccggatctacttttatggaccacgtgcttcggtaccaggacacccccggagtgaaaatgatcgtggtgcttggggaaataggcggtaccgaggaatacaaaatatgtagaggcattaaggaaggaaggctcacaaagcccatcgtctgctggtgtatcggcacctgtgcaacaatgttctctagcgaggtgcagttcggtcatgccggagcctgtgccaatcaagccagcgaaaccgcagttgccaagaaccaggctcttaaagaggcgggagtgttcgtgcctaggtcatttgatgaactaggcgagattatccagagtgtatatgaggatcttgtcgctaatggcgttattgtccccgcacaggaggttccacctcctacagttcctatggattattcttgggcgagagaactgggtctgatcaggaagcctgcctcttttatgacctctatttgtgacgaacggggtcaagagttaatctacgccggaatgcccatcacagaggtgtttaaggaggaaatgggaattggtggcgttctcggcttgctgtggttccagaaacgacttccaaagtacagttgccagttcatcgagatgtgtctaatggtgactgctgatcatgggccagccgtctctggagctcataatactatcatttgcgctagggcgggtaaggacctcgtctcctccctaacgagtgggttgcttaccatcggtgataggttcggcggagccctggacgccgcagctaaaatgttctccaaggcatttgattcgggtataataccgatggagtttgtgaataaaatgaagaaggagggcaaactgatcatgggtataggccacagggtgaagtcaattaataaccccgatatgagagttcaaatcctgaaagactatgtgagacaacacttccccgcaaccccacttctagactacgctcttgaagtggaaaaaatcactacaagtaaaaaaccaaatctcattctgaacgttgacggcttaatcggagtggctttcgtagacatgctccgaaattgcggatcatttaccagggaagaggccgacgagtacatcgatattggcgcactgaacggaatatttgtgctgggtagatcaatgggattcattggtcactatctggatcagaagagattaaagcagggcctgtaccggcacccgtgggacgacatcagctacgtgttgcccgagcacatgagcatgtag

SEQ ID NO: 27388 - DNA, 2493 bp, synthetic construct
  misc_feature 1..2493: note = Description of Artificial Sequence: Synthetic coding sequence
  source 1..2493: mol_type = other DNA
atgtctgccaaagcaatctccgagcagacaggcaaggaactcttgtacaagttcatctgtaccaccagcgccattcagaatagatttaagtacgcacgcgtcacacctgatacagactgggcaagacttctccaagaccacccttggttgctgtcccagaatctcgttgttaagccagaccagctaataaaacggaggggcaagctgggcctggtgggcgtgaatctaactttggatggagtgaaatcatggctcaagccccgacttggtcaggaagctacgggtatagtgcgggcaatccgcgattaccaagggcctttgaaagagcatgaagtgacaattttcgtccgacggggtggccctaactatcaggaaggcctgcgcgtcatgggcgaagtcgggaaaacaactggcatacccatccacgtatttgggaccgagactcacatgaccgctatcgtgggcatggccttaggtcataggcctatccctaaccagccaccaactgccgctcacacagccaattttcttctaaacgcgagtggctccacctcgactcccgctccttcccggacggcgagcttcagcgaaagccgagctgatgaagtggcacccgctaagaaggccaagcccgcaatgccccagggaaagagtacaactctcttctctaggcacactaaagcaattgtgtgggggatgcagacacgtgcggtacaggggatgctggacttcgactacgtttgcagccgggacgagccatctgtggctgccatggtctacccctttaccggggatcataagcaaaagttctactggggccacaaggagatcttaattcccgtgttcaagaacatggccgacgcgatgaggaaacaccccgaggtggacgtgctaatcaatttcgcaagcctccgaagcgcttacgactctaccatggagaccatgaactacgcacagattagaaccattgccattattgccgaaggtattcccgaggcactcacacggaagctgataaaaaaagccgatcagaagggggtgactattatcggtcctgctacagtgggcggtatcaaaccgggatgctttaagatcggaaacaccgggggtatgctggacaacatcttagcatctaaattgtacagaccagggtcagtggcatatgtctctcgttctggaggcatgtcaaacgagctgaataatatcatttctaggactaccgacggagtttatgaaggtgtggccatcgggggagataggtatccaggcagtacattcatggatcacgtcctcaggtaccaggacacccccggagtaaagatgattgtggtgttaggcgagattggaggaacggaggagtacaaaatctgcagaggcataaaggaggggagactcactaagccaattgtttgttggtgcataggcacctgtgctactatgtttagctcagaggttcagtttgggcatgcaggtgcctgtgcgaaccaggccagtgaaactgccgtagcaaagaaccaagccctcaaggaggctggcgtgtttgtgccacgctcatttgatgagctgggcgagatcatccaatccgtatacgaggacttagtcgcaaacggggtgattgtgccagcccaggaggtgccaccgcctaccgtgcctatggactactcatgggccagagagctgggtctgatccgaaagccggctagctttatgacttctatctgcgacgagagaggacaggagctgatttacgcaggtatgcctatcactgaggtctttaaggaggagatgggcattggaggtgtgctgggcctgctgtggttccagaagcggttgccgaagtatagctgccagttcatagaaatgtgcctcatggttactgccgaccacgggccagctgtgtcaggcgctcacaataccattatatgcgccagggcaggaaaggacctggtgtcaagtctcacatcaggtctgctgactatcggtgatcggttcggcggagcgctcgacgcagcagctaaaatgtttagcaaggcattcgactcgggcattatccccatggaattcgtaaacaagatgaaaaaggagggaaaactaatcatgggaatagggcaccgcgttaaatctatcaataaccccgacatgcgtgtgcaaattttaaaagactatgtgcggcaacacttccctgcaacacctctcttggactacgctctcgaggtagagaaaatcacaacctcaaagaaacctaacctaatactgaatgtagacgggctgattggcgtggctttcgttgatatgctgagaaattgtgggtcttttaccagggaggaggcagacgagtacatcgatattggcgctctgaatgggatctttgtcctagggaggagcatggggtttatagggcattatttggaccaaaagcgcttaaaacaaggactctaccgccacccttgggatgacatctcctacgttcttccggagcacatgtccatgtag

SEQ ID NO: 27389 - DNA, 1512 bp, synthetic construct
  misc_feature 1..1512: note = Description of Artificial Sequence: Synthetic coding sequence
  source 1..1512: mol_type = other DNA
atgtcgtccatcctggaagaaagaattctgggagccgacacgagcgtggatctcgaggaaactgggagggttctgtccattggggacgggattgcacgagtgcacggcctgcgcaacgtgcaggctgaggaaatggtcgagttttcctccggactgaagggaatgtcacttaatctggagcctgacaatgttggggtggtggtgttcgggaatgataagctcatcaaggagggcgatatcgtgaagcgaaccggagcgattgtagatgtgccagtgggcgaggagctactcggcagggtcgtcgatgcactgggcaatgctatcgatggaaaaggaccaatcgggtctaaaacccgaagacgcgtgggcttgaaagctccgggtattataccccgtatctcagttcgggaacccatgcagacaggcattaaagccgtggattctctggtgcccattggcagaggacaaagggagctgattatcggcgacagacaaactggtaaaacgagcattgcaatcgacacaatcatcaaccagaaaaggtttaacgacgggagtgatgagaaaaagaaactgtattgtatctatgtggccatcggacagaagcgatccacagtggcacagctggttaaaagactgaccgacgccgatgctatgaagtacactatcgtggtctctgccactgcatcagatgcggcacccctgcaatatttagctccctatagtggatgcagtatgggtgaatatttccgagacaatggcaagcacgcactgattatctatgacgacctgagcaagcaggctgtggcctataggcagatgagcctcctcctgcgcaggccacccggaagggaggcctatcctggtgacgtcttttacctgcactctcgcctcctggaacgggctgcaaaaatgaatgatgcatttgggggaggaagcttgaccgcccttcctgtgattgagacacaggccggagacgtttctgcttatatacctacgaatgtgattagcatcacagatggccaaattttcctcgagaccgaactcttctataaaggaatccgaccggcaatcaatgtaggcttaagcgtcagcagagtcggctcggcagcacagactagagccatgaagcaggtggctggcacaatgaaactggagctggcccagtatcgcgaggtggcggcttttgcacagttcgggtccgatcttgacgccgctacccagcaactgctgagcaggggagttcggctgactgagttgcttaaacagggacaatattctcctatggctattgaagagcaggttgctgttatttacgccggagtgagaggttatttagataagctcgaaccctcaaaaatcaccaagttcgaaaatgcgttcctgagccacgtggtttctcagcaccaggctctcctcggtactattcgtgccgacgggaagatcagtgagcagtcagatgccaaactcaaagagattgttaccaattttttggcgggatttgaggcctag

SEQ ID NO: 27390 - DNA, 177 bp, synthetic construct
  misc_feature 1..177: note = Description of Artificial Sequence: Synthetic coding sequence
  source 1..177: mol_type = other DNA
atgctgtctgtgagagtggccgcagccgtcgtgcgggctcttccccgtcgggcaggcctggtgtcaagaaatgccctgggtagttctttcattgctgctaggaacttccacgctagcaatactcatctgcagaagactgggaagctgttatttttaagcctgaggagaacatattag

SEQ ID NO: 27391 - DNA, 1596 bp, synthetic construct
  misc_feature 1..1596: note = Description of Artificial Sequence: Synthetic coding sequence
  source 1..1596: mol_type = other DNA
atgctgtctgtgcgagtagctgctgcagtggtccgagcgttgcccaggcgagcgggattagtgtctcgtaacgcccttggttcttcgttcatcgctgcaaggaactttcatgcttcaaacacacacctacagaaaaccggcaccgccgagatgtcttccattttggaagagcgaattttgggcgcagatacaagtgtagatctggaggaaaccggaagggtgctttcaatcggggatggcattgccagggttcacggtctgcggaacgtccaggcagaagagatggttgagttctcctccggtttaaaaggcatgtccctgaatcttgagcctgataacgtgggtgtagttgtctttgggaacgataagttgataaaggagggcgacatcgtgaaacgcactggcgctattgtggatggacctattggtagcaagactcggcgaagagtcggcctcaaggcaccaggcatcatcccaagaatatccgtacgggagcccatgcagacagggattaaagctgtggacagcctcgtacccatcggaagaggtcagcgagagcttatcatcggagataggcaaactggcaagacaagcatcgctattgacactatcatcaatcagaaacgctttaatgacggatcggacgagaaaaagaaactctattgcatctacgtcgctattggacagaagcgatctactgtggcacagctggtcaaaagacttacggatgcggatgccatgaaatataccatcgttgtatcggcgaccgccagtgacgccgcaccactgcagtatcttgctccttacagcggatgttctatgggggagtattttagagataacgggaaacacgctttgatcatctacgatgatctgtctaaacaggctgtggcttaccgacagatgtcactgctattgagacggccacccggacgggaagcctaccccggagatgtcttttatctccatagtagactgctcgaaagagctgcgaaaatgaatgatgcgtttggaggaggaagcctcacagcactgcccgttattgagactcaagccggtgatgtttctgcctacatccctacaaacgttatcagtatcaccgatgggcagatctttctggaaactgagctcttctacaagggcattcgtcccgcaatcaacgttggcttgagcgtgtcccgtgtgggatcggctgcccagacacgcgctatgaaacaggtggcgggtactatgaagctcgagctagcccagtaccgagaggttgccgctttcgctcaattcggctcagacctggacgcggcaacacaacagttgcttagccgaggcgttcggctgactgagctgctcaaacagggccagtattctccaatggccattgaggaacaggtggcagtgatctacgctggcgttaggggctacctggacaaactggaaccaagtaagatcaccaaatttgagaatgcatttctgtcacacgttgtgagccaacatcaggcgctgctgggaaccatccgcgcagatggcaagatttctgaacagtccgacgctaagctgaaggagatcgtgaccaacttcctggcaggttttgaagcctag

SEQ ID NO: 27392 - DNA, 1662 bp, synthetic construct
  misc_feature 1..1662: note = Description of Artificial Sequence: Synthetic coding sequence
  source 1..1662: mol_type = other DNA
atgctctcagtacgggtggctgcagccgtggttagagctctaccgaggcgggcaggacttgtgtctcgcaacgcccttggctccagtttcattgcagcccgtaatttccacgcttccaatacccatctgcaaaaaaccggaactgccgaaatgtcttccatactggaggaaagaattctcggagccgacacgagcgtcgacctcgaggagaccggtagggtactctcaatcggcgatggaatagccagagtgcacggactccggaatgtgcaggctgaggagatggtcgagtttagctccgggctcaaaggcatgtctttgaatctcgaacctgacaatgtcggcgtcgtagtattcgggaatgataagctgatcaaagagggcgacatcgttaagcgtaccggcgctatcgtggatgtgcctgtaggtgaggaacttctggggagggtggttgacgcactcgggaacgccatcgatggcaaagggccaataggcagcaagacgcgcagacgggtaggacttaaagccccaggcatcattcccagaattagtgttcgagagcccatgcagaccgggattaaggccgtggacagtctggtacctattggcaggggtcagagggaactgattatcggtgaccgccagaccggaaaaacaagcatagctatagatactattattaaccagaagaggttcaatgatggctctgatgagaaaaaaaaactgtactgtatttacgtggccatcggacagaagcggagtaccgtggcccagctcgtcaagcggctgaccgatgcagatgccatgaagtatactatcgttgtgtctgccactgccagtgatgcagcccctctccaatacttggccccttatagtggttgctccatgggcgaatactttcgggataacgggaaacatgcactgatcatctatgatgacttgagcaaacaggccgtggcataccgacagatgagcctgctcctgcgcaggccacctggcagggaagcttacccaggtgacgtgttctacttacactcccggctgttagaacgcgcagctaagatgaacgacgcttttgggggtggctctctgaccgctctaccagtgatagagacccaggcaggtgacgtgagtgcatatattcccaccaatgtgatcagcattacagatggacagattttccttgagaccgaactgttctataagggcatcaggccagctatcaatgtgggactgtctgtctcacgagttggaagcgcagcccaaactagagccatgaaacaagttgccggaacaatgaaattggaacttgcacagtacagagaagtggctgccttcgcacagttcggttccgatctggacgccgctacccagcaactgttaagtcggggagttagattgactgagctgctgaaacaaggtcagtattcccctatggctattgaagagcaggtggctgttatttatgcaggtgtcaggggttatctggacaagctggagccctctaagatcaccaagttcgagaatgccttcctatcacacgtcgtgtcccagcaccaggccttgttaggaactatccgggctgacggcaaaatttctgaacagagtgatgctaaactaaaggaaatcgtgaccaactttctagcgggtttcgaagcatag

SEQ ID NO: 27393 - DNA, 1662 bp, synthetic construct
  misc_feature 1..1662: note = Description of Artificial Sequence: Synthetic coding sequence
  source 1..1662: mol_type = other DNA
atgctgtcagtgcgggtcgccgctgccgtggtgagggcccttccgcgaagggccggtttagtgagtcgaaatgccctggggtccagcttcattgcggctaggaattttcacgcttccaacacacacctgcagaagacgggtaccgctgagatgtccagtattcttgaggagcgcatcctcggagctgatacgtccgtggacctggaggaaaccggccgagtcttgtctattggagatggaatcgcacgcgtgcatggtctgcgaaatgtgcaagccgaagagatggtcgaatttagtagcgggctcaaaggtatgtctttgaatttggagcctgacaatgtaggtgtagtcgtattcgggaacgacaaactgataaaagaaggggatatcgttaaaaggaccggagcaattgttgatgtgccggtgggcgaagagctgctgggccgagtagtcgatgcactgggaaatgctatcgatggtaaaggccctattggttccaagacacgccgtagagttgggctcaaggctcccggaattatcccccgtatcagtgtgagagaaccaatgcaaactgggatcaaagcggttgactctctggttccaattggacggggtcaacgcgaattgattattggcgacagacagaccggaaaaacttcaattgccatcgatactatcataaatcagaaaaggttcaatgacggttccgatgagaagaagaagctatattgtatttatgtcgccatcggccagaaacgaagtactgtggcccagctcgtgaagcgcttgaccgacgcagatgcgatgaaatacaccatcgtcgtgtcggcaacagcatccgatgctgcgccacttcaataccttgcgccttactccggctgttccatgggtgagtattttcgcgacaatgggaagcatgccctgattatttatgacgatctttccaaacaagccgtggcctatcggcagatgagtttgctcttgcgccgaccccctggacgggaagcctacccaggtgacgtgttttacctgcacagcaggttgctcgagagggctgctaaaatgaacgacgctttcggcggaggttctttaaccgcgctcccggtgatcgagacgcaggctggcgacgtcagcgcttatatccctactaatgtgatctcgattaccgatgggcaaatttttctggagacggaactgttctataaaggcattcggccagccatcaatgttggcctgagcgttagtagagtaggcagcgctgcccagaccagggctatgaagcaggtggcaggtaccatgaagttggagctggcccagtatagggaggtggccgcttttgcacaatttggaagcgacttagatgccgcaacacaacagctgcttagccgtggggtgcgcctgacggaactgctgaagcaggggcagtatagccctatggccatcgaggagcaagtggctgtgatctatgccggagtcagaggctatctggataaattagaaccctccaagatcacaaaattcgaaaacgcctttctgtctcacgtcgtttctcagcaccaggccctgctgggcactatacgtgcagacggcaagatctccgagcaaagtgacgctaaactgaaggaaatcgttacaaattttctggctggattcgaggcctag

SEQ ID NO: 27394 - DNA, 1512 bp, synthetic construct
  misc_feature 1..1512: note = Description of Artificial Sequence: Synthetic coding sequence
  source 1..1512: mol_type = other DNA
atgagctctatcttagaggagcggatattgggcgcagatacttctgtggatctggaggaaacaggccgagtcctttccatcggggatggtatcgcaagggtacacggcctgcgcaacgtccaagctgaagagatggtggagttctcaagcggtcttaaaggtatgagcttgaatctggagcccgataacgtgggagtggtcgtgttcggaaacgacaaacttattaaggaaggagacatcgtcaaaagaaccggggctatcgtggatgtgccagtgggtgaggagctcctaggcagggttgtggatgccttaggaaacgctatcgatgggaaaggccctatcgggagtaagacccggagaagggttggacttaaagcgcctgggatcattccgaggatttctgttcgtgaacctatgcagacgggcatcaaggctgtggattcacttgtgcctatcggaaggggacaaagggaactgattatcggggatagacaaaccgggaagacctctatcgctattgataccattatcaaccaaaaacggtttaacgatggaagcgacgaaaaaaaaaagctctattgcatatacgtggctattggacaaaaacgctcgacggtggcccagttggtcaaacgactgactgatgccgatgcaatgaagtacaccatcgtggtgagcgccaccgcctctgacgcagctcccttgcaatatttggcgccatatagcgggtgctcaatgggtgaatacttcagagataacgggaaacacgccctcataatctacgacgatctgagcaaacaggcagttgcttatcggcaaatgtcactcctgctgcggagaccccctggcagagaggcttacccaggcgacgtcttttatctccattcacgccttctggaaagggctgccaaaatgaacgatgcctttggagggggttccttgacagcgttgcctgtgatcgagacccaggcaggagatgtgtctgcgtatatcccaacaaacgtcatctctattactgacggtcagatatttcttgagaccgagctattctacaaaggcatcaggccagctattaatgtaggcctctccgtatcacgcgtaggttctgctgcccagacacgcgctatgaagcaggtcgccggaactatgaaactggaactggctcaataccgtgaggtagccgcattcgcacaattcgggagcgatttggacgcagcaacgcagcagctgctcagtcggggtgtgcgtctcactgagctgctgaaacaaggtcagtatagtccaatggctatagaggaacaagtggcggtgatctacgccggtgtgcgaggctatctggacaaattggagcccagtaaaatcacaaagttcgagaatgcttttctgtcgcatgttgtgtcccagcaccaggctctattgggcacaatccgagcggacgggaagatctccgagcagagcgatgcaaagctcaaagaaattgttactaacttccttgcaggtttcgaagcatag

SEQ ID NO: 27395 - DNA, 3843 bp, synthetic construct
  misc_feature 1..3843: note = Description of Artificial Sequence: Synthetic coding sequence
  source 1..3843: mol_type = other DNA
atggacctcgagggcgatcgaaatgggggagcgaagaagaagaatttcttcaaactaaataataagtcagagaaagacaaaaaggaaaagaagcccactgtgtccgtgttctcgatgttcagatattctaactggctggacaagctgtatatggtcgtgggaaccctggcggcaattatacacggagccggactgccactgatgatgctcgtcttcggcgaaatgactgacatcttcgccaatgctgggaatttggaagacttaatgtcaaacattacaaataggtccgacatcaatgatactgggttctttatgaacttggaagaggacatgacacgttacgcctactactactctggaattggagccggtgtgctcgttgctgcctacattcaggtgagtttttggtgcctcgccgctgggcgtcagattcacaagatacgcaaacaatttttccacgcaattatgcgtcaggagattgggtggttcgacgtgcatgacgtgggtgagctgaacaccaggctgactgatgacgtttcaaaaatcaacgaagggataggcgacaagattggcatgttcttccaaagtatggccaccttttttacaggattcatagtgggatttacccgtggctggaaactgaccctggtaatcctcgccattagtccagtgctggggctgagcgccgctgtgtgggccaagatcctgagtagtttcaccgataaagaactgctagcctatgctaaagccggtgcagtcgctgaggaggtcttggctgcgattcgcacagtgatcgcattcgggggtcagaaaaaagaacttgaacgctacaacaaaaatctggaggaagccaaacggatcggaatcaagaaggccatcaccgccaacatcagcattggcgcagcatttctgctcatttatgccagttatgcccttgcattttggtatggaacaaccctggtcctcagcggtgagtattctataggccaggtgctgacagtgtttttctctgttctgattggcgcttttagcgtcggccaggcatcccctagtatagaggcattcgccaatgccagaggagctgcctacgagatattcaagataattgataacaagcccagtatcgactcgtattcaaaatctggacacaaacccgacaatatcaaggggaatcttgagttccgcaatgtccacttttcttaccccagcaggaaagaagtgaagatcctgaaagggctaaacctgaaagtccagtccggccagaccgtggctctggttggcaactccggctgtggcaagagtactacagtacaactcatgcagaggctctatgatcctacagagggaatggtctccgtcgacggacaagacatccgcacaattaacgtgaggttcctgcgcgaaattatcggtgtggtgagtcaggagccagtgctcttcgctactaccatcgccgaaaacatcagatacggaagggagaacgtcacgatggatgagattgagaaggccgtgaaggaggctaatgcttacgatttcatcatgaaattgccacataagttcgataccctcgtgggagagcgcggtgcccagctgtctgggggacagaaacagcgcatcgctattgccagagccctggtgcgaaacccaaagatcctgctgcttgacgaagctacctcagcactggacaccgaatctgaggccgtcgtccaggttgctctggataaagcgcgaaagggtagaaccaccatcgtgattgcccataggctgagcactgtcagaaacgctgatgtcattgccggtttcgacgatggggtgattgtggagaaaggaaaccacgacgagctaatgaaagagaagggaatttatttcaagctggtgacgatgcagaccgcaggtaatgaagtagagctcgagaacgcagccgatgagtccaaaagcgaaattgacgcccttgagatgtccagtaatgatagccgttcatccttaattaggaagaggagcaccaggcggtctgtccgcggaagccaggcccaggaccgcaaactgtcaaccaaggaggccctggacgagtctattccaccagtgtctttctggagaattatgaagctcaatctgactgagtggccgtactttgtagtgggagtattttgcgctatcatcaatggtgggctgcagcccgcttttgcgatcatcttttctaagataatcggcgtgttcacacggattgatgatccggagaccaagaggcaaaattccaacttgttttctctgctcttcctggccctgggaatcatcagcttcatcacatttttcctgcagggattcacgtttgggaaggccggagagattctaacgaaaagattacggtacatggtgttcaggtccatgttacgtcaggacgtatcctggttcgacgatcccaagaacacgaccggcgctctcacgactaggcttgctaatgatgcagcgcaggtgaaaggggcaataggtagtaggcttgccgtgatcacccagaacatcgctaaccttgggaccgggataatcattagcttcatttacggctggcaactgaccctcctgttattggcaatcgtgcccatcatcgctatagctggcgtagtcgaaatgaagatgctgagtggtcaggctcttaaggataaaaaagagctggagggcagcggaaaaatagcaactgaggctattgaaaatttccggacggtggtgagcttgactcaggagcagaagttcgagcatatgtacgctcagtccttacaggtgccctacaggaattccctgagaaaagcccacatttttggcatcacattttccttcacccaggccatgatgtacttcagctatgcagggtgttttaggtttggggcttacctggtcgcccacaagctcatgagtttcgaggacgtgttactcgtcttctctgcagtagtatttggcgctatggcagtcgggcaggtatcttccttcgctccagactacgctaaagccaaaatctccgcagcccacattatcatgattattgaaaaaactcccctcatcgattcttacagtaccgagggcttgatgccgaatacgcttgaaggcaacgtgacctttggcgaagttgtctttaattaccccacccgccctgatatacctgtccttcagggtctgtcccttgaagtaaagaaaggccagaccctcgccctcgttggctcgtccggctgtggtaagtcaaccgtggtgcagctattagagcgcttctatgatccactcgcaggaaaggtactcctggatggcaaggagatcaagcgcttgaacgtgcaatggttaagagcccacctggggattgtgagccaggagccaattctcttcgattgttctattgctgaaaacatcgcttatggggataacagtcgggtggtcagtcaggaagaaatcgtgcgagctgccaaggaggctaatatccatgcttttatcgaaagcttgcccaacaaatacagcacaaaggtgggcgacaaaggaacgcagctctcaggaggacagaagcagaggatagcaatagcaagggcactcgttaggcagccccacatcttgctgctggacgaagccaccagtgcccttgacactgaaagcgagaaggtagttcaggaggctctcgacaaggcgagagaaggacggacttgcattgtcattgcacacaggttatccaccatacaaaacgcggatctaatagttgtgtttcagaatggtcgcgtgaaagagcatggtactcatcagcagctgctcgcccaaaagggaatctacttctccatggtgtcagtgcaggccggaacaaagcgccagtag

SEQ ID NO: 27396 - DNA, 69 bp, synthetic construct
  misc_feature 1..69: note = Description of Artificial Sequence: Synthetic coding sequence
  source 1..69: mol_type = other DNA
atggacctggagggcgaccgtaacgggggtgcaaaaaaaaagaacttcttcaaacttaacaataaatag

SEQ ID NO: 27397 - DNA, 147 bp, synthetic construct
  misc_feature 1..147: note = Description of Artificial Sequence: Synthetic coding sequence
  source 1..147: mol_type = other DNA
atggacttagaaggagatcgaaacgggggagctaagaaaaaaaacttctttaagcttaacaacaaatccgagaaggataagaaggagaagaaaccaaccgtctctgtgttctctatgtttaggtactccaattggttagacaaatag

SEQ ID NO: 27398 - DNA, 3186 bp, synthetic construct
  misc_feature 1..3186: note = Description of Artificial Sequence: Synthetic coding sequence
  source 1..3186: mol_type = other DNA
gccctgagcccagtgatgggcgtgtcggctggttactggcctaagatcctatccagtttcacagacaaggaactgctcgcttacgccaaggccggagctgtcgccgaagaggttctggcagcaatccgcacagttatcgcctttggcggacaaaagaaagaactggagcgatacaacaagaatcttgaagaggctaaacgaattgggataaagaaagccattactgccaatatatcaattggggcagcttttctcttaatctatgcctcctacgctctcgcgttttggtacggaactacacttgtgctttctggcgagtactcaatcggccaagtcttgaccgtgttcttttccgtgctcatcggcgctttctccgtaggacaagctagccccagtatcgaagcatttgccaatgcaagaggtgccgcttacgagatcttcaaaattatcgataataaaccatcaattgatagctattcgaagtccggacacaaaccagataacattaaaggtaacctcgaattccggaacgtccatttctcctatccctcgagaaaggaggtgaagatactgaagggtctgaatctcaaggttcagtccggccagacagtagcactcgtaggtaacagcgggtgcggcaaatcaacaaccgtgcagctcatgcagagactttacgacccgacagagggcatggtctcagtggacggacaggacattcgcaccattaatgtccgattcctgcgtgagatcatcggagtggtgtcacaagaaccggtgctttttgccactacaatagcagagaatattcgatatggcagagagaatgtaaccatggatgaaattgagaaggccgtgaaggaagccaacgcatatgatttcatcatgaaactccctcacaaattcgataccctggtaggagagcggggtgcccaactgagcggcggtcaaaagcagaggatcgccatcgcaagggctctggtgcggaatcctaagatcctcttgctcgacgaggccaccagtgcactggatacggaatcagaagcagtagttcaagttgccctcgacaaggccagaaaaggaagaacgacgatcgtgattgcccaccgccttagtacagtccgtaatgctgacgttatcgctgggtttgatgacggagtaatcgtcgaaaagggaaatcacgacgaacttatgaaagagaaggggatctattttaagctggttacaatgcagacggccggtaacgaagttgagttagaaaacgccgcagacgaatccaaaagtgaaatcgacgctctggaaatgtcatctaacgatagcagaagttcactcatcagaaagcgtagtaccaggagatccgttcgaggatcccaggcccaggaccgcaagctgtcaacaaaagaagcactggatgaaagtattcctcccgtctcattctggcgaataatgaagctcaatcttacagaatggccttactttgtagtgggtgttttctgtgcgataattaatggagggcttcagccggcattcgccataattttttctaaaattatcggggtatttactcggattgatgatccggagacaaagagacaaaattccaatttatttagccttctatttctagccctgggcattatttcttttattacttttttcctgcagggcttcactttcggtaaggcaggggagattctgactaagagactgcgctacatggtgtttcgcagcatgctgaggcaggacgtcagctggttcgacgatcctaaaaatacgactggcgctctgactacaaggctcgccaacgacgcggctcaggtcaagggggctatcggtagccgtctcgccgtaattactcagaatatcgcgaacctgggcaccggtatcatcatctcttttatttacggttggcagctgaccctgctccttctggccatcgtccccataatcgctatagctggcgttgtagagatgaagatgctgtccgggcaggccctgaaagacaaaaaggagcttgaagggtccggaaagattgccacagaagcgatcgaaaattttcgcacagtggtgtctctgacacaagagcagaaattcgaacacatgtatgcgcagtctctgcaggtgccctacagaaacagcctgcggaaagctcacatctttggcattacgttttccttcacccaagctatgatgtactttagttacgcaggttgcttccgtttcggggcttatctggtagcgcacaaactgatgtcttttgaggatgtgttgctcgtcttctctgcagttgtgttcggggctatggcagtgggacaggtttcttcattcgcacctgactatgctaaggccaagatcagtgccgcacatatcatcatgatcatcgagaagacccctctgattgattcctactctactgaaggtcttatgcctaacactttagaggggaacgttacatttggtgaagtggtcttcaattaccccacaaggcctgatattccagttctgcagggcctgtctctggaagttaaaaagggccaaaccctggccctagtcggaagctctggttgcggcaagtcgacagtggtgcagctcctcgagaggttctacgacccgttggcagggaaggtcttgttggacggcaaagaaatcaagagactgaacgtccagtggctccgagcccacctcgggattgtgtctcaagagccaattttgttcgactgcagcatcgcagaaaacatagcctacggtgacaacagtcgggtcgtctcgcaagaggaaattgtaagagcagccaaggaggctaatatccacgcattcatcgaatccctgcctaacaaatactcaaccaaagtgggcgataaagggactcaactgtccggagggcagaagcagcgaatcgctattgcaagagcgctcgtaagacagccacacatcttactgctggacgaagccactagcgccttggatacagaatccgaaaaagtggtccaggaggccctcgacaaagccagggaaggtaggacgtgcatcgtgatagcccatcgtctaagcaccatccagaatgccgacctgatagtcgtgtttcaaaacggtagagttaaggagcacggcacacaccagcagctccttgcacagaagggcatttacttctccatggtctcagtgcaagcgggtaccaagaggcagtag

SEQ ID NO: 27399 - DNA, 3651 bp, synthetic construct
  misc_feature 1..3651: note = Description of Artificial Sequence: Synthetic coding sequence
  source 1..3651: mol_type = other DNA
atggatctggaaggagatcgcaatggcggtgcgaaaaagaaaaattttttcaagttaaacaataagtcggaaaaggacaaaaaggaaaaaaagcctaccgtctcagtcttcagcatgttcagatactctaattggctcgacaaattgtacatggtcgtgggtactctggccgctatcatccatggagccggtctccctcttatgatgcttgtgtttggagagatgaccgacatattcgccaatgccggaaacctcgaagacctgatgagcaacatcacaaatcgaagcgatatcaacgacacaggcttctttatgaatttggaagaagacatgacatccgatgtcagcaagataaatgagggaatcggcgataaaattggtatgttctttcagtctatggccaccttttttaccggctttatagtagggttcaccaggggctggaaactgaccctcgtgatattggccatctctcccgtgctagggctatctgctgccgtgtgggctaaaatactgtccagtttcaccgacaaggagcttctcgcttatgctaaggcaggagctgtggctgaggaagtactggccgctattcgaaccgtcatagcttttggcggacaaaagaaggagctggaacggtacaataagaatctggaagaagccaagcgtatcggaattaaaaaggccattacagccaacatctctattggtgccgctttccttcttatttacgcatcctacgccttagcattttggtatggaacaacccttgtattgagtggtgaatactctatcggccaagtcctcaccgttttcttttctgtgctgatcggcgcattctcagtcgggcaggcttccccaagtattgaggccttcgctaatgcccgaggcgctgcgtacgaaatcttcaagataattgataacaagcccagtattgactcttattctaaatccggacacaagcctgacaatatcaagggcaatctggagtttcgaaatgtgcatttcagttacccaagtaggaaagaagtgaaaattctgaaaggacttaaccttaaagtccaatcagggcagactgtggctttagtcggaaactctggttgcggcaagagcaccacagttcagcttatgcaaagattatatgaccctaccgagggaatggtctcggtcgatggtcaagacatccgcaccatcaatgtgaggttcctgagggaaatcattggcgtggtttcacaggagcccgttctgtttgccactaccatcgccgagaatatccgctacggaagggagaatgtcactatggacgagatagaaaaggcagtgaaagaggctaacgcgtatgattttatcatgaagctgccccacaaatttgacacacttgtgggggagcgaggtgcccagctctccgggggacagaaacagcggattgctattgccagggcactcgttcgcaaccctaagatactcctgctggatgaggctacctcagctttggacaccgagagtgaagctgtggttcaagtggctctggataaggctcgtaaaggcagaactacaattgtgatagctcatagactgtcaactgttaggaatgccgacgtgatcgctgggttcgatgatggggtgatagtggaaaaaggtaaccatgatgagcttatgaaagaaaagggtatttacttcaaactggtgaccatgcagacggcgggaaatgaggttgagctagaaaacgccgctgacgagtccaaaagtgagatcgacgccttggagatgagctcaaacgatagcagatcctctctgataaggaagagatctacaagaaggagcgtgaggggcagccaggcacaggatcgtaagttgtccactaaggaggccctggacgaaagtatcccaccagtgtcattctggagaattatgaaattgaatctaacagagtggccttatttcgttgttggcgtcttctgtgctattattaacggaggtctacagcccgcattcgctatcatatttagcaaaattatcggtgtgtttacccggattgatgaccctgaaaccaaaagacagaacagtaacctatttagtttgctgttcttggcactaggcataataagttttatcacgtttttcctccagggcttcacctttggaaaggctggcgagatactgactaagaggttacgctacatggtttttagaagcatgctgcggcaggatgtctcctggtttgacgatcctaaaaacacaaccggggctctcacaacgaggttggctaatgatgccgctcaggttaagggggctatcggatctaggctggccgtgatcacacaaaatattgccaatctgggtaccggcattatcatctctttcatctacgggtggcagctgaccctgctgctactggccatcgtccctataatcgccatcgctggtgtggtcgagatgaagatgctgtcaggccaggcgctcaaggacaagaaggaactcgagggaagcggcaagatagccaccgaggccatcgaaaatttccggaccgtggtttcactgactcaggagcaaaaattcgagcatatgtacgctcagtcgctgcaggtcccttatcgcaattcccttcggaaagcacacatttttggtatcacattttcattcacccaagctatgatgtatttcagctatgccggttgtttcagattcggggcatatcttgttgctcacaagctgatgagctttgaggatgtcctccttgtcttttcagctgtggtattcggagccatggccgtcgggcaggtatcgagtttcgcaccagactatgctaaagcgaaaatcagcgccgcacatattatcatgataatagagaagacccccttgattgacagttattctacagaaggccttatgcctaataccctcgaaggcaacgtaaccttcggggaagtggtattcaactaccctactagacccgatatccccgtgctgcagggattgtctctagaagttaagaaaggccagacgctcgccttggtgggctcctccgggtgtggtaaaagcaccgtggtgcagctgctggagaggttctatgatccacttgccggaaaggtgttgctcgatggaaaggagattaagaggctgaatgtgcagtggttacgggctcatctgggcattgtcagccaagagcccatactgttcgactgtagtatagccgaaaatattgcatacggcgacaactctagggtggttagccaggaagagattgtacgggcagctaaggaggctaatatacacgcctttatagagtcactgccaaacaagtactcaacgaaggtgggagataaaggaactcagctatccggtggacaaaaacagagaattgcaatagctagggcgttggtccgacaaccccacattctccttctggacgaggcaacgagcgcccttgacactgaatccgagaaagtagtccaggaagctctggacaaggccagagaagggcgtacttgcatcgttatcgcccaccgcctgagtacaatccaaaacgccgatctcatcgtcgttttccagaacggccgagtaaaagaacacgggacccaccaacagctgctggcccagaagggcatctacttttccatggtgtctgtgcaggccggaacgaagaggcaatag

SEQ ID NO: 27400 - DNA, 4401 bp, synthetic construct
  misc_feature 1..4401: note = Description of Artificial Sequence: Synthetic coding sequence
  source 1..4401: mol_type = other DNA
atggctctccgcggattctgctccgccgacggaagtgatccgctgtgggactggaacgtgacttggaacaccagcaatcctgacttcaccaagtgttttcaaaacactgtgctggtctgggtgccctgcttttatctgtgggcttgtttcccgttctactttctatacctttcccgccacgacagaggctatatccagatgactcctcttaataaaaccaagaccgcattgggattcctgctgtggatcgtgtgctgggccgacctgttttacagcttttgggaaagaagccgtggcatcttcctcgctcctgtctttctggtttcgccaacgctactggggattaccatgctcctcgcaacattcttaattcaactcgagcggaggaagggggtgcagagtagcgggatcatgctaactttttggctggtggccctcgtgtgtgcacttgccatcttacgttccaagattatgaccgccctcaaggaggacgcgcaggtggatttgtttcgagacatcacattttatgtatacttctctcttctccttatccaacttgtgctgagttgcttctccgaccggtcccctctcttctctgagacgattcatgaccctaatccgtgcccggagtcaagcgcctccttcctctcacgaattaccttttggtggataaccgggcttatagtacggggttacagacagccactggagggcagtgacctttggagcctgaacaaggaggacacgtccgagcaggtcgtgccagtgcttgttaaaaactggaagaaggagtgcgcgaaaacaaggaaacagcccgtcaaagtggtgtactctagcaaggacccagcacagcctaaagaaagctcaaaagtggacgcaaatgaagaagtggaagccctaatagtcaagtctcctcagaaagagtggaatccatcactattcaaagttctttataagacttttggtccttacttccttatgtcgtttttttttaaagccattcacgacctcatgatgttttcagggcctcagattctgaagctgctgataaagttcgtcaacgataccaaagctcctgactggcaaggctacttttatacagtgctgctctttgtcaccgcatgcctgcaaacattagttctgcatcagtatttccacatatgttttgtgtcgggcatgcgaatcaagaccgccgttataggcgcagtgtaccggaaggcactcgtgatcacgaattctgctagaaaaagtagcacagtgggggaaatagtgaatctcatgtcagtggacgcccagagattcatggatctggccacttacatcaatatgatttggagcgcaccactgcaggtaatcctagccctttatctattgtggctgaacctcgggccttccgtgctcgctggtgttgccgtcatggtccttatggtgcctgtcaatgccgtgatggccatgaaaactaagacttatcaggtggcgcacatgaagtcaaaggataaccgtatcaagctgatgaacgagattcttaatgggattaaagtccttaagctgtacgcttgggagctggccttcaaggataaggtcctcgcgatcaggcaagaagaactgaaggtgctgaaaaagagcgcgtatctgagcgctgtgggcacctttacatgggtgtgtacccctttccttgtggccctttgtaccttcgcagtgtacgtcacaatagacgagaataacattctggacgcacaaactgcattcgtgtctctagccctcttcaatatcttgagattccctctaaacatcctccccatggtgattagctccatcgtgcaggcgagcgtgtccttgaagcgccttcgcattttcttgtcacacgaagagctcgagccggactcgattgaaagaagacctgtgaaagatggtggcggaacaaattcaattactgttcggaatgccacattcacatgggcacgatcagacccaccaacattgaacggcatcaccttctccattcccgaaggagccctggtggctgtcgtaggacaagtcggatgtgggaagtcttccctcctgtctgccctgctggctgagatggacaaggtcgagggccacgtcgccataaaggggtccgtggcctacgtgccccaacaggcctggattcaaaacgattcactgagggagaacattctattcggttgtcagctcgaggaaccctactaccggtccgtgatccaggcctgcgcgctactgccggatttggagatcctgccatctggagatcgaactgaaataggagaaaagggcgtaaacctcagcgggggacaaaagcagagagtgtctctagctcgggcagtctattcaaacgcagacatctatctgttcgacgaccctctgtcagccgtcgacgcccacgtgggcaaacacatattcgagaatgttatcggaccaaagggcatgttaaagaacaagactcggattctcgttacacattctatgtcatacttaccacaggtggacgttatcatcgtgatgtcgggcggaaaaattagtgaaatgggaagttatcaagagttattggctagagatggcgctttcgctgagtttctgcgaacctacgcatctacagagcaggaacaggatgcggaggagaacggcgtcactggggtgtcgggcccagggaaagaggctaagcagatggagaacgggatgctagtcacagactcagccggaaaacagctccagcggcagttgagctcttcttcctcatattccggcgacattagtcgtcaccataacagtacagccgagctgcaaaaggcggaagccaaaaaagaagaaacctggaaacttatggaagccgataaagcgcaaacaggacaagtgaagctgtccgtgtattgggactatatgaaggccattgggcttttcatcagtttcctgtccatattcctattcatgtgtaaccatgtgtcggctctggcctccaattattggttaagtctgtggaccgatgatcctatcgttaacgggacccaggagcataccaaagtgaggctgagcgtgtacggggcactgggtatctcgcagggaatcgcagtattcgggtatagcatggccgtgagcatcggtggcatcctagcaagccggtgccttcacgtagacctgctacactccattctgcggagtccaatgtcctttttcgaaagaacccccagcggcaaccttgtgaaccggtttagcaaggagttggatactgtggactcgatgatcccggaggtgatcaaaatgttcatgggtagcctgtttaacgtgatcggggcatgtatcgtaatcctgctcgccacaccaatagcggctataataattcccccattgggcctgatttatttcttcgttcagcgtttctacgtcgcctctagtcgacagctgaaacgtcttgaaagtgtctctcgctcacccgtgtatagccactttaacgaaacactcctcggtgtatctgttatacgagctttcgaggagcaagaacgcttcatccatcaaagcgatctgaaggtcgatgagaatcagaaggcctattatcccagcatcgtggctaatcgttggctggctgtgaggctcgaatgcgtcggtaattgtattgttcttttcgctgcactctttgcagtgatctcccgccattctctgtcggccggacttgttggcctcagcgtgtcttactccctacaagtgaccacatacttgaattggctcgtcaggatgtcctctgagatggagaccaacatcgtcgcggtcgaaagacttaaggaatatagcgaaaccgagaaggaggctccgtggcagatccaggagacagccccacccagttcctggcctcaggtcgggagagttgagtttcggaactattgccttagatacagggaggaccttgattttgtgctgagacatattaatgtaaccattaatggcggtgagaaagtgggtattgtaggcaggaccggtgcagggaaaagctcccttaccctgggattgttcaggattaatgagagcgcggaaggagagatcatcatcgatggcatcaacatagccaaaataggactgcacgatcttaggtttaaaattaccatcattccacaggaccccgttctgttcagcggcagcctgcgcatgaatctcgatccttttagccaatattccgatgaggaagtatggacttctctggagttagcccacctgaaggacttcgtctccgccctgcctgataaactggatcacgaatgtgccgagggtggggagaacctcagagtgattgtgctggataagggcgagatccaggagtacggagcaccttccgacctcttgcaacaaaggggattgttctacagcatggccaaagatgcaggtttggtgtag

SEQ ID NO: 27401 - DNA, 4428 bp, synthetic construct
  misc_feature 1..4428: note = Description of Artificial Sequence: Synthetic coding sequence
  source 1..4428: mol_type = other DNA
atggccctgagaggtttctgctctgccgatggtagcgatcccctctgggactggaatgttacttggaacacatcgaatcctgattttaccaagtgctttcagaatactgtgctggtttgggtcccctgcttctatctgtgggcttgctttccattctattttttgtaccttagcagacatgaccgcggttacatccagatgacccccttaaataaaacaaaaacagccctgggatttctcctgtggatcgtctgttgggccgacttattctacagcttttgggagagaagccgcggaatctttctggcgcctgtcttccttgtatcgccaaccctccttggaattactatgctcctggccaccttcctgatacaactggaacgccgtaaaggcgtacagagttccggaatcatgctgactttctggcttgtggccttggtgtgcgcgctagctatactgcgctccaaaatcatgacagctctgaaagaagatgcgcaggtcgatttgtttcgagatattacgttctacgtgtacttcagtctcctgctgattcagctggtgctgtcctgtttctccgaccgatcccccttgttttccgaaaccatacacgaccctaacccttgccccgagagcagtgccagcttcctgtcaaggatcaccttttggtggatcactggactgatcgtccggggttataggcaacccctggagggctccgacctgtggtcgctgaacaaggaggatacgtcggaacaggtagttccagtgctcgttaaaaactggaagaaagaatgtgccaagacacgcaagcagcctgtgaaggtggtgtactcttcgaaggatccggctcagcctaaggagtcatctaaggttgacgcaaacgaggaagtggaagcgctcatcgtgaagtccccccagaaggagtggaatccatccttgttcaaggtcttatacaagacatttggaccatatttcctgatgtctttcttctttaaggctatacacgatctgatgatgttctctggccctcaaattcttaaactgcttattaagtttgtgaatgataccaaggccccagactggcagggctacttttacactgtcctattatttgtgactgcttgccttcagacattagtgttgcatcagtacttccacatatgctttgtgtcgggaatgcgcataaagacagcagtaatcggtgccgtgtatcgaaaggcgttagtgatcacgaacagcgccaggaaaagcagcacagtgggcgagatcgtcaacttaatgtccgtggatgcccagcgcttcatggatctagcaacctacatcaatatgatctggtccgcacccctacaggtaatccttgccctgtacctcctctggctaaatctggggccttctgtgcttgcaggtgtggctgtcatggtgttaatggtgcccgtcaacgctgtcatggccatgaaaacaaagacttaccaggtcgcgcatatgaagtcaaaagacaatagaatcaaacttatgaacgaaatacttaacggcattaaagtcctcaaactttacgcctgggaactcgccttcaaggacaaggtgttagcaatccgccaggaagagctgaaagtcctgaagaagagtgcttatctgagtgcagttggaacgttcacttgggtgtgtaccccgtttctagtggccctgtgcactttcgccgtgtacgtaacaattgacgagaataatattttggatgcacagactgccttcgtgtctttggctctctttaacatcctgcggtttcctctcaatatcctgccaatggtgatttctagcatcgtgcaggcgagcgtgtctctcaagcgcctgcggatttttctctctcatgaggaacttgagcctgacagtattgaaaggagaccagtcaaggacggaggcggtaccaacagtatcactgttcgaaatgcaacgttcacctgggctcgatcagacccccctacactgaacggcattacttttagcattccagagggcgctctggtggccgtcgttggtcaagtagggtgcggaaagtcctccctcctatccgcgcttctggcagaaatggacaaggtggaggggcatgtagccatcaagggtagtgttgcttacgtcccacagcaagcatggatacagaatgactccctgcgggaaaatattctattcgggtgccagcttgaagagccctattaccggtccgtcattcaggcatgcgctctcctgcctgatctcgaaatcctcccttcgggagatcgcacagaaattggagagaaaacccgtatccttgtgactcatagtatgagttacctgccacaggtggacgtaattattgttatgagcggtggtaagattagcgaaatgggcagctaccaagagcttctagctagagatggagcctttgccgaattccttaggacctacgccagcaccgagcaggagcaggacgcagaagagaacggagtcaccggggtgtccggtccaggcaaggaagcaaaacagatggagaatggaatgttagtgaccgactcagctggtaagcagctccagcgccagcttagcagctcctcttcgtatagcggcgatatctccagacaccataattccaccgccgagttgcaaaaagctgaggccaagaaagaggaaacctggaaattaatggaggcagacaaggctcagaccggccaggttaaattatctgtgtattgggactacatgaaagccattggactctttattagcttcctgagtatctttctgtttatgtgcaatcatgtgtccgcactcgcctccaactactggctgtctctttggactgatgatcccatcgttaacgggacacaggagcataccaaagtacgcttatctgtatacggcgcattgggcatcagccagggcatagctgtgtttggatattctatggcggtgtccattggcggtatactagcgtctagatgcttgcatgtggacctcctgcactctattttgaggagcccaatgagctttttcgaaaggacccctagtggtaaccttgtgaaccggttcagtaaagaactcgacacggtcgacagtatgatccctgaggtaattaaaatgttcatggggtccctttttaacgtcatcggggcatgcatagtgattctgctcgccacccctatcgctgccattattataccgcctctcggattaatttacttcttcgtccaacgattttatgttgcgtcaagtcgacagctgaagaggctggaatctgtgagtcgcagcccagtctatagccatttcaatgagactctcctaggggtttcggtgatcagggcttttgaagagcaggagcggttcattcatcagtctgacttgaaggtggacgagaaccagaaggcgtattacccctccatcgtggctaacagatggttagctgtccggctggaatgcgtcgggaattgcatcgtgctctttgccgcactgtttgctgtaatatcacgccattctttatctgccggtctcgtgggtctgagcgtctcttacagcctccaggtgacaacttaccttaactggcttgtccgaatgtcctcagagatggaaacaaacatcgtggcggtcgaaagactgaaggagtattctgagaccgagaaggaggcaccctggcagatacaagagacggcccctccatcttcttggccacaagtcgggcgtgtggagttcagaaactactgtttacgttaccgcgaagatcttgactttgtgctcaggcacatcaatgtcaccatcaatgggggtgagaaggtgggcatcgtgggtagaactggtgcaggcaagtcctctctgactctgggtctgttccggatcaatgagtccgcagagggtgaaatcattatcgatggaattaacatagcgaagatcggacttcatgacctcaggttcaagattaccatcattccccaagaccccgtactgttttccggttcgctgcgaatgaatttagacccatttagtcagtattccgacgaagaagtgtggacgtccctggaactagcacatcttaaggactttgtctccgctctccccgataagttggaccatgaatgtgccgaggggggtgagaacttgagcgtggggcaacgccagcttgtatgtttagctcgagctttgctgcgtaagactaaaatactggtgctcgatgaggccaccgcggcagtggacctggagactgatgaccttattcagagcacaatacgtacccagttcgaagactgcacagtgctgacaatagcccaccgattgaataccatcatggattatacacgagtcatcgtgcttgacaaaggagagatacaggaatacggcgcacccagtgacctgcttcagcagcgaggactgttctattccatggctaaggacgctggactggtctag

SEQ ID NO: 27402 - DNA, 4251 bp, synthetic construct
  misc_feature 1..4251: note = Description of Artificial Sequence: Synthetic coding sequence
  source 1..4251: mol_type = other DNA
atggctcttcgcggtttttgctctgccgacggatcagacccgctgtgggactggaacgtcacttggaacacatctaatcctgactttactaagtgctttcagaatactgtcctcgtgtgggtgccctgtttctacctatgggcctgtttccctttctactttctgtacctgtcaaggcatgacagagggtatatacagatgacccctctgaataagacaaagactgccttgggattcctgctctggatcgtatgctgggcggatctgttctattccttctgggaacgttcaagaggcatctttctggccccagtgttcttggtgtcgccaaccttgctcggcattactatgctgctggccacctttctgattcagttggaaaggcggaaaggggtgcagtcaagcggaatcatgttgacattctggttggtggctctggtctgtgccctggcaatactgcgatctaagatcatgactgcattaaaggaggatgcccaggtcgatttgtttcgggatattacattttatgtctacttttcactgttactgatccagctggtgctgtcatgtttcagcgaccgttccccattgttcagtgagacaatacacgatcccaatccctgtccagagtcctccgctagttttctaagcagaattactttctggtggatcactggtctgatcgtgaggggctatcggcaacccctcgaaggaagcgacctgtggtccttaaataaagaagatacctctgaacaagtggtacctgtgctggttaagaattggaagaaagagtgcgctaaaacacgtaaacagccagtgaaagtcgtctattcgagcaaggatcccgctcaacctaaggagagcagtaaagtggatgccaatgaagaggtggaggcgctgatcgtgaagtcacctcaaaaggagtggaacccttccttatttaaggtgctctataaaactttcggaccatactttctcatgagcttctttttcaaggcaatccacgacctcatgatgttctccggtccccagatcttgaagttactgataaaatttgtcaatgatactaaggcccctgactggcaggggtacttctacacggtgcttctgtttgtgaccgcatgtttgcaaacgctggttctgcaccagtactttcatatctgctttgtgtctggtatgcgcattaagactgccgtgatcggcgcagtctaccgaaaggcactggtcataaccaattctgctcgaaagagttcaactgtgggtgagatcgtgaacctgatgtctgtcgatgctcagcggtttatggatctggccacctatatcaacatgatttggtcagctccactgcaggtgatcctggcgttatatctgctgtggctgaacctgggaccttctgtattagccggagtcgccgtgatggtgctaatggtgccggttaacgcagttatggccatgaaaactaagacctatcaggttgcacatatgaagtccaaggacaaccgtattaagcttatgaacgaaatcctgaacggaatcaaagtattgaagctgtacgcctgggagctggcattcaaggacaaagtcctggctatccggcaggaagagctgaaggttctgaagaagtccgcctacctgagtgctgtggggactttcacctgggtctgtacaccgtttctggtcgctctgtgcactttcgctgtgtacgtgaccatcgatgagaacaacatcctcgatgcacagactgcttttgtgagtctggcactgttcaacatactgcgctttcctctgaacatcctacccatggtgatctcatcaatcgtgcaggcctccgtctcactgaaacgcctcagaatctttctgtctcatgaggaactcgagccagacagcatcgaacgtagacctgtgaaagatggcggtggaacgaacagcataaccgtacgaaacgccacgtttacatgggcacgaagtgaccctccaacactaaacggcattacatttagtatcccagaaggggctttggtggcagtcgtgggacaggtgggatgtggtaagtctagcctcctttccgcgctgttggcagaaatggataaagttgagggacacgtcgccattaagactaggatacttgtgacccattcaatgtcttacttgcctcaagtggatgttattattgtgatgagcggtggcaagatctctgaaatgggctcctaccaggagctgctggccagggatggagcctttgccgaatttctccggacctacgcctctactgagcaagaacaagacgccgaagaaaacggggtgaccggcgtgagcggtccaggcaaagaagcgaaacagatggagaatggaatgctcgtcaccgatagtgcaggaaaacagctgcagcggcaactaagttcatcttcatcatattcaggggacatttcccgccaccacaattctacggcagagctgcaaaaggcagaagctaagaaggaggagacctggaagcttatggaagccgataaagctcagacaggtcaggtcaaactctctgtgtactgggattacatgaaagcaatagggttattcatcagcttcctgagtatttttctgtttatgtgtaatcatgtctccgctctggcctcgaactactggctgagtctttggacagacgatcctatcgtgaacggcacccaagaacacacgaaggtaaggctgtctgtgtatggtgccttgggtatctcacagggcatcgccgtgttcggctactctatggcagttagcattggtgggatccttgcctctcgatgtctgcacgtggatcttcttcatagcatactgaggtcgccgatgagtttcttcgagcgcacacccagtggcaacctggttaataggttttccaaagaactggataccgtggattccatgataccggaggttataaagatgttcatggggtcgctgttcaacgttatcggagcttgtatagtgattttgttggctaccccgatcgcagcgatcatcatcccccctttaggcctgatatactttttcgtgcagcgcttttacgtggcatcttcccgtcagctcaaacgcctggagtcagtgtcacgatctccagtgtactcacactttaacgaaacgctgctcggtgtttctgtgattagagctttcgaagagcaagaacgctttatacatcagtcagaccttaaggtggatgaaaatcaaaaggcctattatccgtcaattgtcgccaaccggtggcttgccgttcgccttgaatgcgtggggaattgtatagtgttgttcgccgctctgtttgctgtgatttccaggcatagcctgtccgctggcctggttggattgtcagtgagctactctctacaggtaacgacgtacctgaactggctggtgcgtatgtccagtgagatggaaacgaatattgtcgcagtcgagcgcttgaaagagtacagtgaaacagagaaggaagcgccttggcagatccaggagactgcccctccgagctcttggccccaggtgggccgagtggaattccggaattactgtctgcggtatagagaggacttggatttcgtgctgcgccacattaacgtcaccatcaacggcggagagaaggtcggaattgtcggcagaacaggagcaggaaagagtagcctgactctcggattatttcgcataaacgagtccgccgaaggggaaattatcattgacgggatcaacattgcaaagatagggcttcacgacctgcggttcaagattacaatcatcccacaggatcccgtgttgttctccggaagcctgagaatgaaccttgaccccttctcccagtacagtgacgaggaggtttggaccagtctggaactggctcacctcaaagacttcgtgagcgccttaccggataaactcgatcacgagtgcgcggagggaggcgagaacctatcagtgggacaacgacagttagtgtgcctcgctcgcgctctgctgaggaagaccaagatcctggtgctggacgaagcaaccgccgcagtggatctggagacagatgatcttatacaaagcacaataaggacccagttcgaagactgcacagtgctgaccatcgctcacagacttaacaccatcatggattatactcgagttattgtgctcgataagggcgaaatccaggaatacggcgctcctagcgacttgctgcagcagcgaggcctgttctacagcatggctaaagatgccggactggtgtag

SEQ ID NO: 27403 - DNA, 4419 bp, synthetic construct
  misc_feature 1..4419: note = Description of Artificial Sequence: Synthetic coding sequence
  source 1..4419: mol_type = other DNA
atggctctgcggggattttgttccgcagacgggagtgatcctttgtgggactggaacgtgacctggaatacctcaaatcccgactttacgaaatgctttcagaacaccgtcctggtctgggtgccatgtttttacctgtgggcctgtttccccttttattttttatacctgagtcggcacgaccggggatacattcagatgaccccactgaacaagaccaagaccgctttgggtttcctgttgtggattgtttgttgggccgacctgttttacagcttttgggaacgaagccgtggcatattcctagcccctgtgttcctggtgtccccaaccttactgggtataacaatgttgctggcaactttccttatacagctcgaacggagaaagggggtgcagtcctccggaatcatgctcacgttctggttggtagctttggtgtgcgctctggcgatcctgcggtctaaaatcatgacggctttgaaggaggacgcacaggtggatctcttccgtgacataactttttacgtgtactttagccttcttctgatccagttagtactatcatgtttttcagaccggtctcccttatttagcgagacaattcatgatccaaatccctgtcctgagtcctctgcttcctttctgagcagaatcaccttttggtggataacgggcctgattgtgcgtggctatcggcagccactggaaggcagtgacctgtggagccttaacaaagaagatacgtccgagcaggttgttcctgtcctggtaaagaactggaaaaaagaatgtgcgaaaactcgaaagcaacctgttaaggttgtgtattcttcaaaggatcctgcgcagccaaaggaatccagtaaagtggatgctaatgaagaagtcgaagccctcatcgtcaagagtccccagaaggaatggaatccgtctctgtttaaagtgttgtataaaacttttggaccatatttcttaatgtccttcttctttaaggccattcacgatctaatgatgttttcaggcccacagattctgaagctgctgataaagtttgtgaacgacacaaaggctccggattggcagggatatttctacacagtcttactgttcgtcaccgcctgcctccagaccctggtacttcatcagtatttccacatctgcttcgtgtctgggatgagaattaagacagccgtgatcggggcagtgtaccgtaaggctctggtgatcacaaatagtgctcgaaagtcttctactgtcggggagatcgtcaatctgatgagtgtggatgcccagaggtttatggatctggccacttatattaatatgatttggtcagcccctctccaggttatcctggccctatacctgctgtggctgaaccttggaccttccgtgctggccggagttgccgtgatggtcttaatggtgccagttaacgccgtcatggctatgaaaaccaagacataccaagtggcccatatgaagtcaaaggataaccggatcaagctcatgaacgaaatcctgaacggtatcaaggttctgaagctgtatgcctgggaactggcatttaaggataaagtgcttgctattcggcaggaggaactcaaggtcctgaagaagtccgcatacctgagtgctgttggcactttcacttgggtgtgcacccctttcctggttgcactctgcaccttcgccgtatatgtgactatagacgaaaacaacatcctggacgctcagacagcattcgtgtccttagccctcttcaacatactccgtttccccctgaatatactgccgatggtaataagttctatcgtgcaggcttcagtgtctctaaagcgacttcggattttcctctcccacgaggagctggagcccgactctattgaacggagaccagtgaaagatggaggcggaactaatagcattacagtgagaaacgctacatttacatgggccagaagcgacccaccgacgctaaacgggatcaccttttccattcctgagggcgctttagtcgcagtggtcgggcaagtcggctgcggcaaaagcagtctcctgagtgcgctgttggccgagatggacaaagttgaaggtcacgtcgccatcaagggcgtaaatctgtccggtgggcagaagcagagagtgtcccttgccagggcagtgtacagcaatgctgacatctacctgttcgatgaccccctgtcagctgttgacgcccatgtcggtaagcacatcttcgaaaacgtcatcggtcccaaaggtatgctgaaaaacaagacccgaatcctggtgacacacagcatgtcctatctgccacaagtcgacgtgattattgtaatgtctggtggcaagattagcgaaatggggtcgtaccaagaattattagccagagacggagcgttcgcggaatttctgaggacttacgcatccacggaacaggaacaggatgcagaagaaaacggcgtgactggtgtctccggccctggcaaggaggcaaaacagatggagaatggcatgctagtgaccgacagcgccggtaagcaactgcaaaggcagttgagttctagtagcagctactctggagacatttccaggcaccataatagtacagcggaactgcagaaagcagaagcaaagaaagaagagacgtggaaactgatggaggcagacaaggcgcagaccggccaggtgaagttaagtgtttattgggactacatgaaagccattggcctgttcatctcctttctgagcattttcctcttcatgtgcaatcacgtctcggctctggcatcaaactattggctctcactgtggacagacgaccctatcgtgaacgggacacaggagcacaccaaggtgagacttagcgtgtatggcgctcttggaattagccaggggatcgctgtgtttgggtacagcatggctgtctctattggcggtatcctggcttctcgctgtctgcatgtggatctgttacacagcattcttcgctcccctatgtcattctttgaaagaacaccctccgggaatcttgtaaatcgtttcagtaaggagctcgacactgttgattccatgattcctgaagtgatcaagatgttcatgggctccttattcaatgtgatcggcgcatgcattgtcatcctactggctacacctatcgcggcaattatcattcctcctttgggactcatttattttttcgttcagcgtttctacgtggcttcttctagacagttgaaacgccttgagagtgtctcccgcagtcctgtgtactcccatttcaatgagactttactcggcgtttcggttatacgggcattcgaagaacaagaaaggttcatacatcagagcgacctcaaggtggacgagaaccaaaaagcatactatcccagcattgtggcgaaccggtggttggctgtcaggctggagtgcgtgggcaactgcatagtgctctttgccgctttgtttgctgtaatctcgcgacactcgctgagtgcaggattggttgggctgtccgtgtcttattcattgcaggtaacaacatatctaaattggcttgttcggatgagctccgaaatggaaaccaacattgtagcggtcgaacgtctcaaagagtacagcgagaccgagaaggaggccccttggcaaatccaagaaactgcgcctcccagcagttggcctcaggtcggccgagtggaattccgaaattattgtctcagatatcgagaggatctagactttgtgctgagacatatcaatgttactattaatggcggagagaaggtcggaatcgtgggtcgcacaggagccggtaagagttccctcacgcttggactgttccgtatcaatgagagtgccgagggagaaattattatcgatgggatcaacatcgcgaagattggactccacgacctgagatttaaaattaccatcatcccacaggaccccgtcctgttctctggatctctgaggatgaaccttgacccgttttctcagtacagtgacgaggaggtgtggacttctctggaactggcccacctgaaggactttgtttcagcccttcccgataagctcgaccacgagtgcgccgagggcggagaaaacctgtcagtcggccagagacagcttgtttgcctggcacgggcactgttgcgcaaaaccaagattctcgttctggacgaggctacagctgctgtggacctggaaacagacgatcttatccaaagcacgatcaggacccagtttgaggactgtacagtcttgaccattgcccatcgccttaataccattatggactatactagagtgatcgtgcttgacaagggggagatccaggaatacggcgctcccagtgatctgcttcagcaaagagggctgttctactccatggccaaggatgccggtctcgtttag

SEQ ID NO: 27404 - DNA, 4626 bp, synthetic construct
  misc_feature 1..4626: note = Description of Artificial Sequence: Synthetic coding sequence
  source 1..4626: mol_type = other DNA
atggccctaagaggattctgttcagcggacgggagcgatcctctctgggattggaacgttacctggaacacttctaaccctgatttcaccaaatgttttcagaacaccgtcctggtttgggtgccgtgtttctatctctgggcctgcttcccattttatttcctttatctgtcaagacacgacagaggttacattcagatgaccccgctcaataaaacgaagactgcgctgggttttctactatggatcgtctgttgggcagatttgttctatagcttctgggagagatctcgcggaatatttctcgcaccagtatttctggtctcacccacgctgttgggcattacgatgctgttggctacctttttgatccaactggagcgacgaaagggcgtccaatcctcgggtattatgctgacattttggctagtagccttggtgtgcgcactcgccatattgaggtctaagattatgaccgccctgaaggaagacgcccaggttgacttgtttagggatattaccttctacgtttatttcagtctgctgctgatccagttggttttgtcctgttttagcgaccgctcccccttattctctgagacgatccacgacccaaatccctgtcccgaatcttcggcttccttcttgagtcgtattactttctggtggatcaccggcctgatcgtgcgtggatatcggcaaccgctggagggctcagatctatggagcctgaacaaagaggatactagcgagcaagtagtccctgtgttggtgaagaactggaaaaaggagtgcgctaagacaagaaaacagcccgtcaaggttgtgtattcgtccaaagaccccgctcaacctaaggagtccagcaaggtagacgcaaatgaagaagtggaagccctgattgtgaagagcccgcagaaggagtggaatccttcattgtttaaggtattgtacaaaactttcggtccatacttcctgatgagctttttctttaaggccattcacgacctgatgatgttttctgggccacagattctgaaactccttatcaaatttgtcaatgacacaaaagcacctgactggcaagggtacttttacacagtgctcctgtttgtgaccgcctgtctccagacactcgtgttacatcagtacttccacatttgctttgtgtctggcatgaggattaagactgcagttatcggggctgtgtatcgtaaggcacttgtgataaccaacagcgctaggaaatcgtccaccgtaggcgagatagtgaacctcatgagcgtggatgcccagagatttatggacctcgcaacctatatcaatatgatttggagtgctcccctccaagtaatactcgccctttatttgctgtggctgaacctcggcccatccgttcttgccggtgtggctgtgatggtgttaatggttcccgtgaacgccgtcatggctatgaagacgaaaacttatcaggtcgctcacatgaaaagcaaagacaacaggatcaaacttatgaatgagatcctgaatgggataaaagtactgaaactatatgcctgggagctggccttcaaagacaaggtcctcgccatccgtcaggaagagctgaaggtgcttaagaaatccgcttatctgagcgctgtggggacgttcacctgggtctgcacacctttcttagtagcactatgcaccttcgcagtctatgtgactattgatgaaaacaacattctagacgctcagaccgcttttgtaagtttggcactgttcaacattcttcgctttcctctgaatattcttccaatggtaattagcagcatcgtacaagccagcgtaagtctgaagcgattaaggattttcctaagtcatgaggaactggaacctgacagcattgagcgacgtcccgtgaaggacggcggtgggactaactctatcacagtcagaaatgcaactttcacctgggcacgttctgaccccccaacactcaatgggatcaccttctcgatccccgaaggtgccctggtcgccgtggtaggccaggtggggtgtggaaaatctagcttgctttccgcgctccttgctgaaatggacaaggtcgagggacatgtggcgattaagggctcggttgcatacgtcccccagcaagcctggatccaaaatgattccctcagggagaatatcctgttcggatgccagctagaagaaccttattatcgaagtgtcatccaggcctgtgctctgctccccgaccttgaaattctaccgagtggtgaccgcacggagatcggggaaaagggagtaaacctttccgggggtcagaagcagcgggtgagtcttgctagagcagtgtacagcaatgcagacatctatctgttcgatgatcctttgagtgctgttgatgcacacgtgggcaaacatatctttgaaaatgtgattggtcctaagggaatgctgaaaaacaagaccaggatcctggtcactcattccatgagctacctccctcaggtggatgtgataatcgtgatgtctggcggaaaaataagtgagatggggagctaccaggagttgctcgcccgagatggggcatttgcagagtttttgcggacatacgcctcaactgaacaagaacaagatgctgaggagaacggatccaccgtaatggatgaggaggaggctggtgtgacaggtgtgtccggccctggcaaagaggccaaacagatggaaaacggaatgcttgtgaccgactccgcagggaagcagctccaaaggcagctgtcatcttcctccagctattcgggagatatctccaggcatcacaacagcaccgccgagttacagaaagccgaagccaagaaggaagaaacctggaagctgatggaggccgacaaggcgcaaactggccaagtgaagctttcggtttactgggactacatgaaagccatcggtctttttatctcttttttatccatattcctttttatgtgtaaccacgttagcgctctggccagcaactactggctgagcttgtggactgacgacccaattgtcaatggtactcaggagcatacgaaggtccggctgagcgtgtatggtgccctgggaatcagccagggaatcgctgtctttggatattcaatggcagtgtctataggaggcatcctggccagtagatgccttcatgtggacctgctgcactctatactcagatcgccgatgtcgttctttgagaggacacctagtggcaacctcgtaaataggttcagcaaggaactagatacagtggatagcatgatacctgaagtgattaaaatgttcatgggaagtctgttcaacgtgatcggcgcttgcatcgtcattctgcttgctacaccaatcgcggcaattatcattccaccgcttgggctaatttactttttcgtacagcgattttatgtggcctccagccgtcaactgaagcgtttagagagtgtgtccaggtcccccgtctacagccatttcaacgaaacactgctgggagtgagcgtcattcgagcttttgaagagcaagagcgttttatccaccagtcagacttgaaagtggacgagaatcagaaagcatactacccatctatcgtggctaataggtggctggcagtcaggctggagtgtgtgggtaactgtatcgtactgttcgctgccctgtttgcagtgatcagtcggcacagcctgtccgccggattggttggcctcagcgtctcgtattctctacaggttacaacatatcttaattggctggtccgaatgagctcggagatggaaaccaatatcgtggccgtcgagagactgaaggaatacagcgaaaccgaaaaagaggccccttggcagatacaggaaactgcgccaccatcttcctggccgcaggtgggcagagtcgagttcaggaattactgcctgcgttatcgggaagacttagacttcgtgctcagacacattaatgtgacgataaatggcggagagaaggtgggtatcgttgggaggaccggtgcaggtaaaagtagccttacactgggactctttaggatcaacgaatctgctgagggagaaatcattatcgacggaatcaatatcgctaaaattggccttcatgaccttaggtttaagatcacaatcattccacaagatcctgtattattttcaggatccctaaggatgaacctcgatccctttagtcagtactcggatgaggaggtgtggacgtcactggagcttgctcacttgaaggattttgtaagtgctctgccagacaaactcgaccacgagtgcgccgaaggaggcgagaacttgagcgtgggtcagagacagctggtctgcctggccagggccctgctcaggaaaacgaagatcctcgtgttggatgaggctaccgctgcagtagatctggaaaccgacgacctcatccagtcaaccatcaggacacaattcgaggattgtactgttctgacgattgcacacagactcaacacaataatggattatacaagggtgatcgtgctggataaaggggagattcaagaatatggagccccaagcgatcttttgcagcagcgcggattattctattccatggctaaagacgcgggtcttgtctag

SEQ ID NO: 27405 - DNA, 4596 bp, synthetic construct
  misc_feature 1..4596: note = Description of Artificial Sequence: Synthetic coding sequence
  source 1..4596: mol_type = other DNA
atggctctgcgcggtttctgcagcgctgatggcagcgacccactgtgggactggaatgttacctggaacactagtaatcctgattttaccaaatgcttccagaatacagtgttggtatgggtaccatgtttttacttgtgggcctgtttcccgttctacttcctctacttgtcccggcatgatcgaggctacattcagatgacccctctgaacaaaacaaagaccgccttgggcttcctactctggatagtttgctgggcagatctgttctattcgttctgggagaggtccagaggaatctttcttgccccagtctttcttgtgagccctacgctcctgggcatcaccatgctattagccaccttcctaatccaactcgaacggaggaaaggagtccagagctccggaataatgctgacgttctggctcgtggctttggtgtgcgccctggcaattctacgatccaagattatgactgcccttaaggaagatgcccaggttgacctttttcgtgatattacgttttacgtgtacttctcccttcttttgattcagctggtcctttcctgcttttccgacagatctcctttattctctgagaccatccatgatcccaatccgtgtccagaatctagcgcaagcttcttgtcccgaatcacattctggtggatcacagggctcattgtccggggatacaggcagcccctggagggcagcgatctctggtctctgaataaagaggatacctcagagcaagtcgttccagttctggtgaaaaactggaaaaaggagtgtgctaagaccagaaaacagccggtgaaagtggtttactcatccaaggatcccgctcagcctaaggagagctctaaggtggacgccaacgaagaggtggaagccttaattgttaagagtcctcagaaggagtggaatcctagcctttttaaagttctgtacaagacatttgggccttatttcttaatgtccttcttctttaaagcgatccacgacttgatgatgttttctggtccacagatactgaagctgctgattaaatttgtgaacgacacaaaggcccctgactggcaggggtacttctacaccgttctgcttttcgtaacggcctgcctgcagactctcgtgctgcatcagtactttcacatttgtttcgtatcgggtatgcgcatcaaaactgctgtcattggtgccgtgtaccgaaaggctttggtcattacgaatagcgcgaggaagtcatccaccgttggtgagatcgtcaacctcatgtctgtggacgcccagagattcatggacctggcgacctacataaacatgatctggtcagcccctttacaggtgatcctagccctgtatctgctgtggctgaacctcggaccttccgttttagcaggcgtggctgtcatggtgctgatggttcctgtgaatgcagtaatggcaatgaaaactaaaacctatcaggtggcacatatgaaatctaaagacaatcgcataaagctcatgaatgaaatccttaacgggatcaaagtgttaaaactctatgcctgggaactagcttttaaggataaggtcctcgcgataagacaggaggagctgaaagtgttgaagaagagtgcctacctgtctgctgtaggcaccttcacctgggtgtgtaccccttttttggtggccctttgcactttcgcagtgtatgttactatcgacgagaacaacatattggacgcacagaccgccttcgtttccttagcactcttcaatatcttgagatttcccctcaacatcttacccatggttatcagtagcatcgttcaggcttctgtcagcctgaaaagacttcggatcttcctttctcatgaggagctcgagccagacagcattgagcgccgacccgtcaaggatgggggtggcactaattccattacagtccgcaatgctactttcacttgggccagatccgatcccccaaccctaaacggtataacattctccatccctgaaggggctctagtcgccgtcgtgggccaggtgggctgtggcaagtcaagcttgctgtcggcgctgctggccgaaatggataaagttgaagggcacgtggcaataaagggaagtgtggcgtacgtaccccagcaagcttggatccagaacgacagcctgcgtgagaatatcctttttggctgtcagttagaggagccttactaccgttccgttatccaagcctgcgcattactgccagatctggaaatcctacccagcggggacagaaccgagattggagagaagggggtgaatctctcaggcggtcagaaacaacgggtaagtctcgcaagggccgtttacagcaacgcggacatctatctgtttgacgatcccctgtctgcagtcgacgcacatgtggggaaacatattttcgagaacgttattggccctaagggtatgctcaaaaataagacccggatcctcgttacccactctatgtcttacttaccacaagttgatgtgattatcgtgatgtccgggggtaagatctcagagatgggatcataccaggaactgctagcacgggacggggctttcgctgaattcctgcggacatatgcttccactgaacaggagcaggatgcagaggaaaatggcgtcactggggtgagcgggcctgggaaggaggctaaacagatggaaaatggcatgctcgtgacggatagcgcaggaaagcagctgcagcgccagctgtctagttctagtagttattccggggatatttccagacatcacaactcaacagccgagttgcagaaagccgaggctaaaaaagaggaaacctggaaactaatggaagctgacaaggctcaaaccggacaggtaaagttatctgtgtattgggattatatgaaggcaatagggcttttcatcagttttctatccatcttcttgttcatgtgtaaccatgtgtccgccctggcctctaactactggctgtctctgtggacagacgaccctattgtgaatggaacacaggaacatacaaaagtgaggctgtccgtgtacggtgccctcggcatctcccagggcatcgccgtgtttgggtactctatggcagtctccatcggcggaatcctagccagtcgctgcctgcacgtggacctactgcatagtattttacggtcacccatgagctttttcgaaaggacacctagcgggaaccttgttaatcggttctctaaggagctcgatacagtcgacagcatgatcccagaggttatcaagatgtttatggggagcctcttcaacgtgataggcgcttgtatcgtcattttattggccacaccaattgctgcgatcatcatcccacctctcggattgatctacttctttgtacagaggttttatgtggccagctctagacagctgaagcggctcgagagcgtctcacgctcacccgtctattcacatttcaatgagaccttgctcggggtgagtgtcattagggctttcgaggagcaggaaagatttattcaccagtccgacctcaaggtggatgaaaatcaaaaggcttactaccctagcatcgtggccaacaggtggcttgccgtgcgcctggaatgtgtcggaaattgcatcgttctcttcgccgctttatttgccgtgatatcacgtcattccctgtctgccggactggtgggactttccgtatcctactccctgcaagtgacaacctatcttaactggctggtccgaatgtcttcagagatggagacgaatatcgtcgccgtcgaaaggttaaaagagtattctgagactgagaaggaagccccatggcagattcaggaaactgcgcctccctctagctggccccaggtgggtcgggtagagtttagaaattactgcctccgttatagggaagacttggattttgttctgagacatattaatgttaccattaacggaggcgagaaggtcggcatcgttggtaggacaggggcaggaaaatcgtccctgaccctgggccttttccgtatcaatgaaagcgcggagggcgaaataattatagatggtatcaatattgcaaagatcgggttgcacgacctcaggttcaaaattaccattatcccacaggatcccgtattgttctccggatctctgcggatgaacctggacccattctctcagtacagtgacgaggaagtgtggactagcctggaactggcccacctcaaagattttgtgtcagccctgccagataaacttgaccacgagtgcgctgagggaggtgaaaatctcagcgtgggacagcggcaactggtatgtcttgccagagcgctgctgcgcaagaccaagatcctggtgctcgatgaggcaacagccgctgtggacctcgaaacagacgatctcatccaaagcaccatacggacacagttcgaggactgtaccgttctgacaattgcacataggttgaatactattatggattatacccgggtcatcgtgctcgataaaggcgagatacaggaatatggagccccatctgacctgcttcagcagcggggtctgttctacagcatggcaaaagacgctgggctggtgtag

SEQ ID NO: 27406 - DNA, 3648 bp, synthetic construct
  misc_feature 1..3648: note = Description of Artificial Sequence: Synthetic coding sequence
  source 1..3648: mol_type = other DNA
atgagctttttctttaaggccattcacgacctgatgatgttttctgggcctcagatcctcaaacttctgatcaaatttgtgaatgacactaaagcccctgattggcaggggtacttttatacagttttgctgttcgtgacagcttgcttgcaaaccctggttcttcatcagtacttccacatctgctttgtttctggaatgcgaatcaagactgcggtgattggggcagtataccgaaaagccctggtgatcacaaattcagcaagaaaaagctccaccgtgggggaaatagtgaacttaatgagcgtggacgcccagcgttttatggatctggccacgtacatcaatatgatttggagcgccccactgcaggtgatactcgccctatatttgctttggctaaatcttgggccaagcgtacttgcaggcgtcgctgtcatggtgctcatggttccagtgaatgccgtgatggcaatgaagacaaaaacctaccaggtcgctcatatgaagtctaaggataacagaattaaattaatgaacgaaatcctcaacggcattaaggttctcaagctgtatgcctgggagttggcatttaaagataaggtactcgccattcggcaagaggaactgaaagtgctgaagaaatctgcctatctatcagcagtgggaacctttacatgggtctgcacgccttttctcgtcgccctgtgcactttcgcagtctatgtcaccatcgacgagaacaatatcctcgacgctcagaccgcttttgtgagtctagctctcttcaatattttgaggtttcccctcaacatacttcccatggtgatttctagcattgtccaggcttcggtttcactgaagagactgagaattttcctgagccatgaggaattggagcccgacagcatcgaaaggcgtcccgtaaaggacggtggtggaactaatagtattacagttcgcaatgccacgtttacctgggctcgtagcgatccacccacccttaacgggataaccttctccatccctgagggggctctggtcgccgtcgtcggccaggttggctgtggaaagtccagtctgctctctgcacttttggccgagatggataaagtcgagggtcatgtggctatcaaaggttctgtggcctacgtgcctcagcaagcctggatacagaacgacagcctgcgagagaacatactttttggctgtcagttggaagaaccgtactatcgaagcgttatccaggcctgcgccctgttacctgatctggaaattctgccaagcggcgaccgaacagagatcggcgagaagggcgttaatctcagtggcggtcagaagcagagggttagcctcgcccgagccgtgtatagcaatgcggatatctatcttttcgatgaccccctaagcgccgtagacgcccacgtgggaaaacatatcttcgagaatgtgatcggacctaaaggtatgttgaaaaataagacccgcattctggtgacacactcaatgagctaccttcctcaagtagacgtgattattgtaatgtctggcggaaagatctctgagatgggaagctaccaggaacttttggctcgcgacggcgcattcgcggaatttttgaggacatacgcctctactgagcaggaacaggacgctgaggagaatggcagcactgtgatggatgaggaggaggctggagtgaccggtgtcagtggcccaggcaaagaggccaaacagatggaaaatggaatgctggtgactgactccgccggaaagcagctgcagcgccagctaagctcttctagttcatacagcggcgatataagccgccaccacaatagtacggccgagctacagaaggcagaggccaaaaaagaggaaacatggaagcttatggaagcagataaagctcagactggtcaagtcaagttgagtgtctactgggactacatgaaggcaattggtctgttcattagttttctgagcatctttctctttatgtgcaaccacgtctcagcgttagcaagcaactactggctgagtctctggaccgacgaccccatcgttaacggaactcaagaacacactaaggtgcgcttgtccgtgtacggcgcattgggcatcagtcagggtatcgctgtcttcggttacagtatggcggtctctatcggtgggatccttgccagccggtgtctgcacgtggatctgctgcattcaatactgaggtcacctatgtccttctttgaacgcaccccgagcggtaacctcgtgaacaggttctcaaaggaactcgacaccgtggacagtatgattcccgaggttatcaaaatgtttatgggctctctattcaacgttattggcgcatgtatcgtgatactgctggctacgccaatagccgctatcatcattcccccactcggcctcatttacttctttgttcaacgcttttacgtagcttcttccagacagctcaaaagactggaaagtgtttcacgatcccctgtgtatagccatttcaatgaaaccctgctgggggtgagtgtgattagggcattcgaggagcaggagaggtttattcaccagtcggacctaaaagtggacgagaatcaaaaggcgtattatccttctatcgtggccaataggtggctggccgtgaggcttgaatgtgtgggaaattgtatagtgctctttgcggcactgtttgcggtgatcagcagacatagcctttccgccggactggtcggtctgtccgtctcctactcgctgcaggtgaccacgtatctcaattggctggttagaatgtcttcagaaatggaaaccaacattgtcgccgtggaacggctgaaagagtacagcgagactgagaaggaggctccatggcagatccaggaaaccgctccgccatcgtcttggccccaagtggggcgagtggagttccgaaactactgtctgcgctaccgagaggatcttgactttgtacttaggcacataaacgtcacaataaatggtggtgagaaagtgggtatcgtggggaggacaggcgctggaaagagtagtttaacactcggcctttttagaatcaatgagtctgctgagggggaaatcatcatcgatggaatcaatatagccaagattggactgcatgacctacgattcaagatcactataatacctcaggaccccgtcctgtttagtggatcgctgcggatgaatctggatccatttagccagtattcggatgaagaggtgtggacctccctggagttggcccatctcaaagattttgtgtctgcactccctgacaaacttgaccatgagtgtgccgaggggggagaaaacctgagcgtcggtcagcggcaattggtatgtcttgcaagggctttactgcgcaaaactaaaatcctcgtattggatgaagccaccgctgctgtggacctcgaaacagacgatctgatccaatcaaccatccggacgcagtttgaggattgcaccgtgttgacgatagctcatcgtctgaacaccatcatggactacactcgggtcattgtgttagacaaaggggaaatccaggagtatggcgctccgtctgacctcctccaacagcgagggctgttctattccatggccaaggacgctggactggtttag

SEQ ID NO: 27407 - DNA, 1968 bp, synthetic construct
  misc_feature 1..1968: note = Description of Artificial Sequence: Synthetic coding sequence
  source 1..1968: mol_type = other DNA
atgagtagttcaaatgtagaagttttcataccagtgagccagggaaacacaaacggttttccggctacagccagtaacgacctgaaggcatttacagaaggggcagtattatccttccataatatctgctatagggtcaagttaaaatccggctttctaccctgtcggaagccagtcgagaaggagattcttagcaatatcaacggaatcatgaagcccggtctgaatgctatactggggcctacaggcggagggaaatcctcactgttggacgtactggccgctcgaaaggatcctagcggtttgtcgggggacgtgctgataaacggggctccaagaccagctaatttcaaatgcaattctggttatgtcgtccaggacgacgtggttatgggcactctgacagtccgcgaaaatcttcagttctcggccgctctgcgcctggccaccaccatgacaaaccacgagaaaaacgaacgcatcaaccgagtcattcaggaactgggtctggataaggtagccgattcaaaggtgggtacccaattcattcgaggcgtatcgggcggagagagaaaaaggacctcaatcggaatggagctgattaccgatccctccatcctgtttctggatgaacccactacggggttagattcatctacagccaatgctgtcctgctacttctgaaacggatgagcaagcagggacggaccataatctttagcattcaccagccgcgatattctatttttaaattgtttgacagcctcaccctcctggccagcggcaggcttatgttccacggccctgcgcaggaagcacttggttacttcgaatcagctgggtaccattgcgaggcctacaacaacccggcagatttctttctggacatcattaacggagactcaaccgctgtggccttgaaccgggaagaggactttaaagccacagagataatcgaaccgtctaaacaggacaagcctcttatcgaaaagctggcggagatttacgtcaacagctccttttataaggagaccaaggcagagctgcatcagctaagcgggggagagaagaagaaaaagattactgtcttcaaggagatttcatatacaacttcattctgtcaccaactcaggtgggtatccaagcgatcgtttaagaacctcttgggaaatccgcaggcatctattgcgcagattattgttaccgtggtgctgggtcttgtgattggggctatctattttgggctcaagaatgactcgactggcattcagaatcgggctggggtcttgttttttttgactacaaatcagtgctttagctccgtgtccgcagtggagctgttcgtggtggagaagaagttgtttatacacgagtacatctccggctactatcgggtgtccagctattttctaggcaagctgttgtctgatctactccccatgagaatgctgccctcgatcatattcacatgtattgtgtatttcatgctgggcctgaagcctaaagccgacgcctttttcgtcatgatgttcactcttatgatggtagcttatagcgcttcaagcatggccctggcaattgccgctggccaatcggtggttagcgtggccacattactgatgaccatatgtttcgtgtttatgatgattttctcaggcttgctggtgaacctcactactatcgcctcgtggcttagctggctgcaatacttcagtattccacgctacggttttaccgcactccagcacaatgagttcctgggacagaacttctgccctggcctcaacgctacagggaacaacccgtgcaactacgccacatgcaccggagaggagtacctggtgaagcaggggatcgacctgtctccttggggcctgtggaagaaccacgtggcactcgcttgcatgattgtcatcttcttgacgatcgcctacctcaaactgctgttcctaaagaagtactcctag

SEQ ID NO: 27408 - DNA, 1836 bp, synthetic construct
  misc_feature 1..1836: note = Description of Artificial Sequence: Synthetic coding sequence
  source 1..1836: mol_type = other DNA
atgtcttcctctaatgtggaggtttttattcccgttagtcaaggaaatacaaatggattcccggctaccgctagcaacgacctcaaggctttcaccgaaggagccgttctgagttttcataacatctgctacagggtcaagctgaaatcgggttttttaccttgccgcaagccggtggaaaaggagattctgtccaacattaatgggataatgaagcctggtctaaatgccatactcgggcctacaggcggtggaaaatccagtctgctggacgtcctcgcagctagaaaggatccctccggattgtctggcgatgtgctcatcaatggggctccccgtcctgcaaacttcaagtgcaattccgggtacgttgtgcaggatgacgtggttatggggacattaacagtgagagaaaatctccagttcagtgctgctctgaggctggctaccaccatgactaatcatgagaaaaatgaacggataaatcgcgttattcaggaattggggctggataaggtggccgacagtaaagtagggacacaatttatccgcggtgtgtccgggggagagaggaagcgcacctccatcggaatggagctcattaccgatccgtcgattcttttcctggatgagcctaccacagggctcgactcctccaccgctaacgctgtgctcctcttgctgaagcgcatgtcgaagcagggacggaccatcattttttccatacaccaacctagatattctatttttaaactgttcgattctttaacattgttggctagcggaagactgatgtttcacgggcctgcacaagaggctttggggtattttgaaagtgccggataccactgtgaagcctacaacaatccggctgattttttcctcgacattattaacggggatagcacagctgtggctctcaaccgggaggaggactttaaggctaccgaaatcatagaaccttctaagcaggataaacccctcattgagaagcttgccgagatctacgttaacagcagcttctacaaggaaaccaaggctgagctccaccagctctccggcggtgaaaagaaaaaaaaaatcacggtttttaaagagattagctacacaaccagcttttgccatcagctgagatgggtgtctaaacgcagttttaaaaacctgctaggtaaccctcaggcgagcatcgctcagatcatcgtcaccgtcgtattaggcttggttatcggagctatctatttcgggctgaagaatgacagcacaggaattcaaaacagagccggtgtgttattttttctcacaaccaatcagtgtttctcttctgtttcagcagtagagctgtttgtagtggaaaaaaagctgtttatccatgagtatattagcggatactatagggtgtcttcctattttctcggaaagctcctgagcgacctgctccccatgagaatgctcccctccattatctttacatgtatcgtctacttcatgctggggctcaagccaaaagcagacgcctttttcgtgatgatgtttacgctgatgatggtagcctacagtgcatccagcatggcactcgctattgctgctggacaaagcgtagtttcagtggccaccttgctcatgacaatttgcttcgtattcatgatggtctgctggtcgatttcgcaaccactgcacttaggctgtcacgggttctctacttctgcctttcacgacatggatttgaggttgtgctctatcatgaatttctgggacaagacttccgcccaagactctatgcagcaagaaactatccttgtgacaatgcaacacgttctggccaaaaacatctggtag

SEQ ID NO: 27409 - DNA, 1212 bp, synthetic construct
  misc_feature 1..1212: note = Description of Artificial Sequence: Synthetic coding sequence
  source 1..1212: mol_type = other DNA
atggatcggagcaaagagaactgtatttccgggcctgtaaaggccactgccccagtcggtggcccaaagagagtgctggtgactcagcagtttccctgtcagaacccacttccagtgaattcgggccaagctcagcgagtgctatgtcccagcaatagctctcagaggatccctctccaggcccagaaactggtttcatcgcataagccagtgcaaaaccagaagcaaaaacaattgcaggcaacctccgttccacatcccgtatccaggcctctgaataacactcagaagtccaaacagccacttccgtctgccccagagaacaatcccgaagaagagctggcatccaaacagaagaacgaggagagtaagaaaaggcagtgggcgctggaagacttcgagattggacgaccactgggcaaaggcaagttcgggaatgtgtacttagcgagagaaaaacagagtaaattcatattggcccttaaagtgctattcaaggctcagttggagaaggcgggagtggagcaccagttgaggcgagaggtcgagatccaaagccacctccgccaccctaacattctgcggctctatggatactttcacgacgctacaagggtatatctcattcttgaatacgcccctctagggacagtgtatagggaactccagaagctgagcaaatttgatgaacagcggactgccacctacatcacagagttggctaatgcgctctcctactgtcattctaagcgcgtcatacaccgcgatatcaagcccgaaaatctgttgttgggctcagctggcgagctcaaaattgctgacttcgggtggtccgtgcacgctcctagctctcgcaggactacgctgtgtggaacccttgattatctccctccagagatgatagaaggtcggatgcacgacgaaaaagttgatttatggtcactgggcgtgctttgctatgagtttttggtgggtaagcctcccttcgaggcaaacacttaccaagagacatataagaggatcagccgagtggagtttacttttccagattttgtcacggagggagcccgagatctcattagccggcttctgaagcacaatccaagtcaaagacccatgctgagagaggttctggaacacccctggattacagcaaatagcagcaagccatctaactgtcagaacaaagaatccgcaagcaaacagtcctag

SEQ ID NO: 27410 - DNA, 1212 bp, synthetic construct
  misc_feature 1..1212: note = Description of Artificial Sequence: Synthetic coding sequence
  source 1..1212: mol_type = other DNA
atggataggtctaaagagaactgcataagtggccctgtgaaagctaccgcccctgtcggcggaccaaaacgcgtgctggttactcagcagttcccatgccagaatccgctacccgtgaattccggccaggctcaaagggtgttgtgtcccagcaactccagtcagcgtattccactccaggctcagaagctcgtcagttcccacaaaccagttcaaaatcagaaacagaagcagcttcaggccactagcgtgcctcacccggtgtcacgcccactaaacaatacgcagaaatctaagcagcctctcccatccgcccctgaaaacaaccccgaggaggagttggcctctaagcagaaaaacgaagaatctaagaagcggcagtgggcgcttgaagacttcgagatcggtcgcccactgggcaaggggaagttcgggaacgtatacctggccagagagaaacagtccaagttcattctcgcactgaaggtgctgtttaaagcccagttggaaaaagcaggtgtagaacaccaactccggcgagaggtcgagattcaatcccacttacgccacccaaatattttacgactctacggttatttccatgacgcgacacgagtttacctgatcctggagtatgctccactggggacggtctacagagaactccagaagctgagcaagtttgacgagcaaagaaccgccacgtacatcacggaactggccaacgccctgagttattgccattccaagcgggtcatccaccgagacatcaagccagaaaatttacttctggggagtgctggggagctcaagattgccgatttcgggtggagtgtgcatgccccttcgtctcgtcggactaccttgtgcggaacgttagattatcttccgcctgaaatgattgaggggaggatgcacgatgagaaggtggatctctggagcctgggtgttctatgttatgagtttttggtgggcaaaccccctttcgaagccaatacataccaggaaacttataaaaggatctccagggttgagtttaccttccctgacttcgtgaccgagggggctcgggacctcatcagccgcctgctgaagcacaatccctcacaacgcccaatgctccgcgaggtgctagagcatccttggataaccgctaactcaagcaagcctagcaattgtcaaaataaggaatccgctagtaaacagtcttag

SEQ ID NO: 27411 - DNA, 1212 bp, synthetic construct
  misc_feature 1..1212: note = Description of Artificial Sequence: Synthetic coding sequence
  source 1..1212: mol_type = other DNA
atggacagatccaaggaaaattgcatcagcggccctgtgaaggccactgcccctgtgggtggtccaaaacgtgtgctggttacacaacagtttccgtgccagaatcccctccctgttaactcgggccaagcacagagagtcctttgcccctctaactcctcgcagagaatacctttacaagctcagaaactggtttcttcgcacaaaccagtgcagaatcagaagcagaagcagctccaggccacctctgtccctcatcctgtgtcccgccctctcaataacacacaaaagtccaaacagcctctcccatcagcccctgagaataaccccgaggaggaactcgccagtaagcagaaaaacgaggaatcgaagaagagacagtgggctttagaggactttgagattggacggccactggggaagggcaaatttgggaatgtttacttagctagagagaagcagtcaaaatttatactcgccctcaaggttctattcaaggctcagctggaaaaggccggagtcgagcatcagcttcgacgagaggtcgagattcagagccatctgcggcatccaaatatactgaggctgtatggatacttccacgacgccacgagggtctacttaatattggagtatgctccactcggaaccgtgtaccgcgagctccagaaactttctaagttcgatgagcagaggactgccacctatattaccgagttggccaatgctctgtcttattgccattccaaacgagtcatacacagggacattaaacccgaaaacctcctgcttggttccgccggagaactgaagatcgcggattttggatggtccgtgcacgcgccatcgtcccgcaggaccaccctgtgcggtaccttagactacctgccccctgagatgatcgagggcaggatgcacgacgagaaggtggacctgtggagcttaggcgtgctctgttacgagttcttggtgggcaaaccacctttcgaggccaatacgtatcaagagacatacaagcgcatctcccgtgtggagttcactttccccgatttcgttaccgagggtgcacgggatctgataagtaggctgctaaagcacaatccctctcagcgcccaatgctgcgtgaagtcttggaacacccgtggattacagctaacagcagcaagcccagcaattgtcagaataaagagagtgccagcaagcagagctag

SEQ ID NO: 27412 - DNA, 1044 bp, synthetic construct
  misc_feature 1..1044: note = Description of Artificial Sequence: Synthetic coding sequence
  source 1..1044: mol_type = other DNA
atggaccggtctaaggaaaactgcattagcggcccagtaaaggcgactgctcccgtcggtggtcccaagcgggtgctagtgacacagcagtttccctgtcaaaacccactcccagtgaactcgggacaggcccagagggtgttgtgtccctctaattcttcccagagaatccctctgcaggcccagaagctggtttcatctcacaaacccgtgcagaaccagaagcagaaacagctgcaggccactagcgtgccacacccagtgagccgacccctgaataatactcagaagtccaagcagcctctgcccagcgccccagagaataaccctgaagaagagctggcttctaagcaaaagaacgaggagagcaaaaagaggcaatgggcactcgaagacttcgagattggacggcctttgggaaagggcaaattcgggaacgtgtacctggccagggaaaagcagtccaagtttatacttgccttgaaagtgctgtttaaggcgcagctagagaaagccggtgttgaacaccagctccgacgcgaagtcgagatccagtctcaccttcggcatccgaatatcttgcgattatacgggtactttcacgacgccacacgggtctatctcattctggaatatgcacctttgggtaccgtgtatagagagctgcagaagttgtccaagtttgacgaacagcggactgccacgtacatcactgagctggccaacgcgttgagttattgccactcaaaaagggtaatacatagagatattaaaccagagaacctcctcctcggcagcgcgggtgaactaaaaattgctgatttcggctggagtgtgcacgcccctagttcacgcaggacgacactctgcggcaccctggattacctgcccccagaaatgatcgaggggaggatgcatgacgagaaagtggatctctggtctctcggcgtgctgtgttacgaattcctcgttggcaagccaccctttgaagccaatacctaccaggaaacatacaaacggataagtagagtgcgcagaaattag

SEQ ID NO: 27413 - DNA, 1212 bp, synthetic construct
  misc_feature 1..1212: note = Description of Artificial Sequence: Synthetic coding sequence
  source 1..1212: mol_type = other DNA
atggatcgcagcaaggagaactgcatctccggccctgtgaaggctacagctccagtggggggaccgaagcgggtgctcgtaacccaacagtttccctgtcagaatccattgcccgtaaattcagggcaggcacagagagtcctgtgcccatcaaattctagtcaacgcattcctctgcaggcccagaaactggtgtctagccataaacctgtccaaaaccaaaagcagaaacagctgcaggccaccagcgtgcctcatcctgtgtcacgtccattaaacaacactcagaagtcgaagcagccactaccatcagcccctgagaataaccctgaggaggaattggcatctaaacagaaaaatgaggaatccaagaagcggcagtgggctctcgaagattttgagatcggtcgtccgctcgggaaggggaaatttgggaacgtgtacctggccagggagaagcagtccaagtttatcttagcccttaaggtcctcttcaaggcccagctcgagaaggccggagtggagcatcagctaagacgtgaagtggagatccagtctcacctcagacaccctaacattcttagactgtacggctacttccatgacgccaccagggtgtacctgatcttagagtacgcacctctcggaacagtatatagggaactgcagaagctaagtaaattcgacgaacagcgcactgcaacctatatcactgaactcgccaatgccctgtcttactgccattccaaacgggtcatccaccgagacatcaagcccgaaaatctgttactgggatcagcaggcgaacttaagatcgctgatttcggctggagcgtccacgccccttcatctcggagaaccactctctgcggtactctggactacctgcccccagaaatgatcgagggtcgcatgcatgacgagaaagtagatctgtggagcctgggggtcctatgctatgagtttctcgtcggcaaacctccctttgaagcgaatacttaccaggagacatacaaaagaatcagccgcgtcgagttcacattccccgactttgtgacagagggagccagggatttaatctcccgcctgctgaagcacaatccaagtcagaggcccatgctgcgggaggtgctcgagcatccatggataacagctaattcatccaagccttccaattgtcagaacaaggagtccgcatccaagcagagttag

SEQ ID NO: 27414 - DNA, 1212 bp, synthetic construct
  misc_feature 1..1212: note = Description of Artificial Sequence: Synthetic coding sequence
  source 1..1212: mol_type = other DNA
atggacaggtctaaggaaaattgcatctcagggcctgtgaaggctacggcaccggtgggcggtcccaaaagagtgctggtgacacagcagtttccatgtcagaatcccctgccagtcaacagtggtcaagcacagagggtactgtgcccgtctaattcctcacagcgcatacctctgcaggctcaaaagctggtatcctcacacaagccagtgcaaaatcagaagcagaagcagcttcaggctacttccgtgccccacccagtcagtcggcctctgaacaacacgcagaaatcaaagcagccgctgccttcagctccagagaataaccctgaagaggagctggctagcaagcagaaaaacgaagaaagcaaaaagcgccaatgggctctcgaggatttcgaaattggtcgtccgcttggaaaaggcaaattcgggaatgtctacctagccagggagaaacaatccaagttcatcctcgcccttaaagtcctattcaaagcccagctagaaaaggccggtgttgaacatcagctgcggagggaggtcgagatccagtcgcatcttagacaccccaatatcctccggctctatggctattttcacgatgccaccagggtgtacctgatacttgagtacgcgcctttgggaactgtgtatagggaactacagaaattgtctaaattcgacgaacaaaggacagccacttacatcacagagctggccaacgccctgtcctactgtcactccaagcgagtgatccatcgcgacattaagccggagaacctcctgctgggtagcgcgggagagctaaagatagccgacttcggatggagtgtgcacgccccatcctctcgcaggacgacattatgtggtaccttagactatcttcctcccgaaatgattgaaggcagaatgcatgacgaaaaggtcgatctctggtcgctcggtgtcctctgttacgaatttcttgtcggcaagccacccttcgaagccaatacttaccaagagacttataagcggatttcacgagtggaatttacctttcccgacttcgtgactgagggcgcacgggacctgatttccagactgctgaagcataatccatctcagcggccaatgctgagggaggtcctggagcacccgtggatcactgccaactcgtcaaagccctccaattgccagaataaggagtccgccagtaaacaatcgtag

SEQ ID NO: 27415 - DNA, 1212 bp, synthetic construct
  misc_feature 1..1212: note = Description of Artificial Sequence: Synthetic coding sequence
  source 1..1212: mol_type = other DNA
atggataggtcaaaggaaaactgtattagtggtcccgttaaagccacagcacctgttggcggaccaaagagagtgctcgtaactcagcagtttccttgtcagaacccacttccagtaaactctggacaagcccaaagggtgctgtgtcccagcaacagctcccagagaatccccctgcaggcgcagaagcttgtgtcaagtcacaagcctgtgcaaaaccagaagcagaaacaattacaagctacaagcgttcctcatcccgttagtcgtccacttaacaatactcagaaatcgaagcagcccttacctagtgcccctgagaataacccggaggaggaactcgcaagtaagcaaaaaaatgaggaaagcaagaagcggcaatgggctctcgaggatttcgagatcggtcggcctctcgggaaagggaaattcggcaacgtgtacctggccagggagaagcagtccaaattcattctagctttgaaagtactttttaaggctcaactggagaaagcaggagtggagcaccaactccgccgagaagtggagattcagtcccacttacggcatcctaacatcctgcgactttacggctacttccatgacgccaccagagtgtatttgattctcgagtatgccccactcgggaccgtctatcgtgagctccagaaactgtcaaagttcgacgagcagcgtacggccacctacatcaccgagctggccaatgcattatcttactgccactcgaagagggtgattcaccgggatatcaaaccagaaaacttgttattgggaagcgccggagagctgaaaatcgcagatttcgggtggtccgtccatgcaccctcatccaggcgcaccactctgtgtgggaccctggactaccttccacctgaaatgattgaagggagaatgcatgacgagaaggttgacctatggtctttgggagtgctgtgctatgaattcttggttgggaaaccacccttcgaggccaacacataccaggagacatacaagcggattagtcgcgtggagtttactttcccggattttgttaccgaaggtgcccgtgatctgatctcccgattactgaaacacaacccctcccagagaccaatgttgagagaagtcctcgagcatccctggatcacagccaatagtagcaaacctagtaattgtcagaacaaggaaagtgcctctaagcaatcttag

SEQ ID NO: 27416 - DNA, 1212 bp, synthetic construct
  misc_feature 1..1212: note = Description of Artificial Sequence: Synthetic coding sequence
  source 1..1212: mol_type = other DNA
atggatcgcagcaaggagaactgtataagcggtccggtaaaagccactgctccagtgggcggtccaaaacgagtgcttgtgacacagcagttcccttgtcagaatcccttgccagtgaattccggtcaagcccagcgggtcttgtgtcccagcaactccagccagcgcatccctttgcaggcacaaaagctggtgtctagccataagccagtgcagaatcagaaacagaagcagctccaagccacttctgtgccacacccggtgagtaggccactcaataacactcagaaatcaaagcaacctctgccgtctgcccctgagaataaccctgaagaggaactggcaagcaaacaaaaaaatgaagaatctaagaagagacaatgggctctggaggatttcgaaatcggtaggccccttggaaagggcaaatttggcaatgtctacctggcgagggagaaacagtccaaatttattctagcccttaaagtgctgtttaaggcacagcttgagaaagccggagttgagcaccaactacgacgagaggtggagatccaaagccacttaagacatcccaacattctgaggctctacgggtactttcacgatgctaccagggtttacttaatcctcgagtacgccccactgggcacagtataccgggaactccagaagttgagtaaatttgacgagcagcgcaccgcaacatatataaccgaattagccaatgctctgagttattgtcattccaaacgcgtaattcacagggatattaagccagagaatttactccttgggtctgccggagaactgaagatcgccgacttcgggtggtctgtgcatgcaccctcttccagacgtactacactttgtgggacgttggactacctcccgccagagatgatcgagggcaggatgcacgacgagaaagtcgatctgtggagtctgggcgtgctgtgttacgaattcttagtgggaaagcccccttttgaagccaatacctaccaggagacttataagcggatctctcgggttgagttcactttccccgactttgtgacagagggtgctcgcgacttaatctcccgactccttaagcacaacccttcccagaggcccatgctgcgagaagtactggagcacccctggatcacagccaattcttccaaaccatccaattgtcagaataaggaatctgcctcaaagcagtcatag

SEQ ID NO: 27417 - DNA, 1212 bp, synthetic construct
  misc_feature 1..1212: note = Description of Artificial Sequence: Synthetic coding sequence
  source 1..1212: mol_type = other DNA
atggatcgttccaaagagaattgtatttcaggccctgtgaaagccaccgcgcctgtgggtggccctaagcgcgtgctcgtaacccagcagttcccctgccagaatccgttaccagtgaactccgggcaagcacagcgggttctctgcccttccaactcttcacaaagaattcctctgcaagcccagaaactggtgagcagtcataaacctgtgcagaaccaaaaacagaaacagctccaggccacatcggtgcctcacccggtgtctagacccctgaataacacacagaagtctaaacagcccttaccgagtgccccagagaataaccccgaggaagaattagcctccaagcaaaaaaatgaggagtctaaaaagagacagtgggcacttgaggacttcgaaataggcagaccactgggaaagggcaagttcggcaacgtgtacctggcacgggaaaagcagtccaaattcatcctcgctctgaaggtgctcttcaaggcccagcttgaaaaggcgggtgtcgagcatcagttgcgtcgggaggtggaaatccagtcccacctgcgccatcctaacatactgagactgtatggttatttccatgatgcaactcgtgtgtatctcattttggagtacgctccgctggggacagtctatcgggagctgcaaaagctaagtaagttcgacgaacaaaggacggccacttacatcacagagttagccaatgccctgtcttactgccacagcaagagagtcatccaccgcgacatcaagccggagaacttgctactgggctctgccggagagctgaagattgctgatttcgggtggtctgtacatgctccatcctccagacggaccactctgtgcggcaccctagattacctgccgcctgagatgattgaaggccgaatgcacgacgagaaagtggacctctggagcttgggagtgctctgctatgagttcttggtcgggaaacctccctttgaagctaacacataccaggaaacatacaagagaattagtagggtcgagttcacattcccagacttcgttacggagggcgctcgcgatctgataagcaggcttctcaagcacaacccgagccagcggccaatgctgcgggaagtgctagagcacccatggatcacagctaactcctccaagccctctaattgccagaataaagagtcagcctctaagcagtcatag

SEQ ID NO: 27418 - DNA, 570 bp, synthetic construct
  misc_feature 1..570: note = Description of Artificial Sequence: Synthetic coding sequence
  source 1..570: mol_type = other DNA
atggacaggtccaaggagaattgcatctcaggaccagtcaaagccacagcccctgtcggcggacccaaacgagtactggtgacacagcagtttccttgccagaatcctctgccagttaactccggccaggctcagcgagtgctatgtccctccaactccagtcagcgtatacctctgcaggctcagaaactggtctcaagccacaagcccgtgcaaaatcagaaacaaaagcagttgcaggccactagtgtgccacaccccgtgagcaggcctctgaataatacccagaagagcaagcagcctttgcctagtgcccctgaaaacaaccctgaggaggagcttgcttcgaaacagaaaaatgaagagtcgaagaagcgacaatgggctctggaggatttcgagatcggcaggcccctaggcaaagggaagttcgggaacgtgtacctggccagagagaagcagtccaaattcatcttggctttaaaggttctctttaaagcgcagctggaaaaggcaggcgttgaacatcagctgaggcgggaagtcgagatccagtctcatctgagatag

SEQ ID NO: 27419 - DNA, 444 bp, synthetic construct
  misc_feature 1..444: note = Description of Artificial Sequence: Synthetic coding sequence
  source 1..444: mol_type = other DNA
atggaccggtcgaaggaaaactgcatctccggcccagtgaaagccaccgcaccagtgggcggtccaaaacgggtcttggtgacacagcagttcccgtgtcagaatccgttacccgtcaattccggccaggcccaaagggtcctgtgcccgtccaactcgtcgcaacggattcctctccaggctcagaagctggtctcctcacataaacccgtccagaatcagaagcagaagcagttgcaggccacttccgtaccccaccctgtgtcaaggccccttaacaacacccagaagtctaagcagcctttgccatccgcaccggagaataatccagaagaggaattagcatcaaagcagaaaaatgaggagtctaaaaaacggcagtgggccctcgaagactttgagattggccgtcctttgggaaaggggaagtttggaaacgtgtag

SEQ ID NO: 27420 - DNA, 816 bp, synthetic construct
  misc_feature 1..816: note = Description of Artificial Sequence: Synthetic coding sequence
  source 1..816: mol_type = other DNA
atggacagaagcaaggaaaattgcataagtgggcctgtgaaggccaccgcaccagtgggaggccctaagcgagtcctggttactcagcagttcccctgtcaaaacccccttcccgtcaattccggccaagcgcaaagagtcttgtgccccagcaactcatcccaacgcattcctcttcaagctcagaaactggtctctagtcacaaaccagtgcagaatcagaagcaaaaacagctgcaagccacatcagtgccccatcccgttagtaggcctctaaataatacacagaagagcaaacaacctttgcccagtgcaccagagaacaatccagaagaggagctcgcatctaagcaaaagaatgaagagagtaagaagcggcaatgggctctcgaagattttgagataggcagacccctagggaagggaaagttcgggaatgtctatctcgctcgcgagaagcagagcaaattcattctcgcgctgaaagttcttttcaaggcccagctggagaaggcaggcgtggagcaccaacttcggagagaggtcgagattcagtctcatctgcgacatccaaacatccttcgtctgtatgggtacttccacgacgcgactcgcgtatacctaattcttgaatacgctcctctgggcaccgtttatcgtgaacttcagaagctgtcaaaattcgacgaacaacgcaccgccacatacatcaccgagttagctaatgctctgtcttactgccattccaaaagggtaattcaccgtgacataaaaccagagaacctgctgctgggctcagccggagagctcaagtag

SEQ ID NO: 27421 - DNA, 240 bp, synthetic construct
  misc_feature 1..240: note = Description of Artificial Sequence: Synthetic coding sequence
  source 1..240: mol_type = other DNA
atggatcgaagtaaagagaattgcatttccggtcccgtgaaggccacagcacccgtaggaggaccaaaaagagtgctggttactcagcaatttccatgtcagaaccctcttcccgtgaacagcggtcaggcgcagagggtgctttgtcccagcaatagtagtcagcggatccctttacaggcccagaaactcgtcagcagccataagcccgtgcagaaccagaaacagaagcagttgtag

SEQ ID NO: 27422 - DNA, 321 bp, synthetic construct
  misc_feature 1..321: note = Description of Artificial Sequence: Synthetic coding sequence
  source 1..321: mol_type = other DNA
atggataggtctaaggagaactgcatttctggacccgtcaaagccacggccccagtcggaggtcctaaaagggttctcgttactcagcaattcccatgccagaaccctctgcccgtgaactcgggtcaggctcagcgcgtgttgtgcccaagcaactccagccaacgtatccctctgcaggcccagaaattagtatcatcacacaagccagtccagaatcaaaagcagaagcagttgcaggccacaagcgtgcctcatcctgtgtccaggcctctgaataacactcaaaagtcaaagcaaccactcccctctgcaccttag

SEQ ID NO: 27423 - DNA, 1035 bp, synthetic construct
  misc_feature 1..1035: note = Description of Artificial Sequence: Synthetic coding sequence
  source 1..1035: mol_type = other DNA
atggcacagaaggaaaacagctatccctggccctacggaaggcaaacagctccgtctgggctttcgacactcccacaaagagtcctgcggaaggaacctgtgaccccctccgcccttgttctcatgagcaggtctaacgtgcagcccacggcagctcccggtcagaaggttatggaaaacagcagcggtacacccgatatcctgaccagacatttcactatcgatgatttcgagattggacgccctctggggaaagggaaattcggtaacgtgtacctggcccgtgaaaaaaagtctcactttattgtggccctgaaggtactcttcaagtctcagatcgagaaggagggcgtggagcaccaactgcgccgagagatagaaatacaagcccacctgcaccaccctaatatcttgcggctttataactatttttacgatagaaggcgcatttatctgatcctggaatacgcccctcgcggtgagttatataaggagcttcaaaaatcctgcacgttcgatgaacagcgcacagctactattatggaggaattggccgacgcactgatgtactgtcacgggaagaaggttatccacagggacatcaaacctgagaatctgctgcttggactgaagggcgaactgaagatcgccgacttcgggtggtctgtgcatgcccctagtttgcggagaaaaactatgtgtggcaccctggactatctgccaccagagatgatcgagggtaggatgcataatgagaaggttgatctatggtgcataggtgtgctctgttacgagttactggtcggcaaccccccattcgaatctgctagccataacgaaacttacagacggatcgtgaaggttgacctcaagttcccagcttccgttcccatgggcgctcaagacctgatctcgaaactgcttcgtcacaaccctagcgagcggttgccactagctcaggtctcagcccatccatgggtgagagcaaatagccgccgtgttctgccaccaagcgctctgcagtccgtggcttag

SEQ ID NO: 27424 - DNA, 912 bp, synthetic construct
  misc_feature 1..912: note = Description of Artificial Sequence: Synthetic coding sequence
  source 1..912: mol_type = other DNA
atgtcgcggagcaacgtacaacccactgctgcaccagggcagaaagttatggagaacagtagtggtactcctgatatcttaacccggcattttacaatagatgattttgagatcgggcgaccactgggcaagggtaagtttggcaacgtgtacctcgcccgagaaaaaaagagccattttatcgtggctctcaaagttttgtttaagtcgcagatagagaaggagggagttgagcaccagctaagacgtgagatcgaaattcaggctcacttacaccaccccaatatactgagactgtacaactacttttatgatcgcaggcgaatctacctaatcttggagtacgcgccaaggggagagctctacaaggagctgcagaagagctgtaccttcgatgagcagcgaaccgctacaatcatggaggaactggctgatgctcttatgtactgtcacgggaaaaaggttatccatcgcgacatcaagcctgaaaatctcctcctggggttaaaaggagagctgaaaatcgccgactttggttggtccgtccacgccccttcgctgagaaggaaaactatgtgcggtaccctcgattacctcccaccagagatgatcgaggggcgaatgcacaatgagaaagttgatctgtggtgcattggcgtcctatgctatgaactcctagtgggcaatccgccattcgaatcggccagccacaacgaaacctacaggcgaattgttaaagtagatttaaagtttcccgcatctgtgccaatgggggctcaggatctcatcagcaaacttttacgccacaatcccagcgaaagactgcccctggctcaggtttccgcgcacccctgggtccgggctaattccaggagggtgctgccgccttcagcgctgcagagtgtggcctag

SEQ ID NO: 27425 - DNA, 1035 bp, synthetic construct
  misc_feature 1..1035: note = Description of Artificial Sequence: Synthetic coding sequence
  source 1..1035: mol_type = other DNA
atggctcagaaagaaaactcctatccatggccttacggtcgccagacggccccttccggcctttccacattaccacagcgtgtactacggaaggagccagtgacccctagcgccctggttctcatgtcccggtccaatgtgcagcccaccgccgctcccggacagaaagtgatggaaaatagctctggtacccccgatattctcaccaggcattttacgatagacgatttcgagattgggcgacctctcgggaaagggaaattcggtaacgtgtacttggctagggaaaagaagtcccactttattgtcgcgctaaaggtcctatttaagtcccagattgaaaaggagggggtggaacaccaattgcggagggaaatcgaaatacaagcacacctgcaccatcccaatatcctgcgactatacaactacttctacgatcgaagaaggatttatctgatattggagtacgcaccccgtggcgaactctacaaagagcttcagaagtcttgcactttcgacgaacagcgtaccgccacaatcatggaggagttggcggatgccctgatgtactgccatggaaagaaagtcatccacagggacatcaaaccggaaaacttattgctgggcctcaagggcgagctgaaaattgccgatttcggctggtcagttcacgctccttcgctgcggagaaagactatgtgcgggaccctagactacctgccaccagagatgatcgagggcagaatgcacaatgaaaaagttgacttgtggtgcatcggtgtgctctgctatgagctcctagtcggtaaccccccattcgaaagtgcgagccacaacgagacatacaggcggatcgttaaagtggatctgaagttccccgcatccgttcccatgggtgcgcaggacctgatttccaagctgctccgacataatccttctgagaggctccctttagcacaggtgagcgcccatccgtgggtccgagccaacagtagacgcgttcttccccctagcgccttacagtccgtcgcctag

SEQ ID NO: 27426 - DNA, 930 bp, synthetic construct
  misc_feature 1..930: note = Description of Artificial Sequence: Synthetic coding sequence
  source 1..930: mol_type = other DNA
atgtcatcccccagggcggtggtacagttgggaaaggcccagccagccggagaagaacttgctacagccaatcagaccgctcagcagccaagctcacctgcaatgcgtaggttgaccgtcgatgacttcgaaataggcaggcccttggggaaagggaaatttggcaacgtgtatttggcccgtttaaaggagagccatttcattgttgcgctgaaggtgctctttaaatcccagatcgagaaggaggggttggaacaccagcttcggagggaaatcgaaatccaggcacacttacagcatccgaatatcttgcgcctttacaactatttccatgacgcgcgacgcgtctatctcattcttgaatacgctcctaggggagagttgtataaggagctgcagaagtctgagaagcttgatgagcagagaacagcaaccatcatcgaggaacttgcagatgctctcacttactgtcatgacaagaaagtcatccaccgcgatatcaaaccggaaaacctgctgctgggatttcggggtgaggtgaagatagccgacttcggatggtctgttcacactccatctctgcggcgaaagacaatgtgcgggaccctggattatctaccccctgagatgatcgaaggtcgcacttatgacgagaaggtggacctttggtgtataggagtcctgtgttatgaactcctcgttggctacccaccgttcgagtcggcttcccactctgaaacctacagacgcattttaaaagtggatgtgaggttcccattatccatgccccttggcgcaagggatcttatttcccgtctcctgcgatatcagccccttgagcggttgccccttgcacagatcttgaaacatccatgggtccaggcacattctaggagagtcctgcctccatgtgcccagatggccagctag

SEQ ID NO: 27427 - DNA, 873 bp, synthetic construct
  misc_feature 1..873: note = Description of Artificial Sequence: Synthetic coding sequence
  source 1..873: mol_type = other DNA
atggccacagcgaaccaaaccgcccagcagccatcaagccctgccatgcggaggctgacagtcgacgactttgagatagggagacctctcggcaaaggcaaattcgggaacgtgtatctcgctagactgaaggagagtcactttatcgtggccctgaaagtgctgttcaaatcgcaaatcgagaaagaaggcctggagcaccaactgcggcgagaaatcgagatccaggcgcatctgcagcacccaaatattctgcgcctgtacaactacttccatgatgctcgccgagtctatttgattctggaatacgcgccacgtggagagttatataaggaactgcagaagagcgaaaagctggatgagcagaggacagccacgatcatagaggagctggcagatgccctgacttactgtcacgacaaaaaagtgatccaccgtgatattaaacctgagaacttgctgctgggcttcagaggggaagtgaagatcgccgatttcggctggtccgtgcacacaccctcgctgcgcagaaagactatgtgcggcaccctcgactatctccctccagaaatgattgaggggcgtacttatgatgagaaagtagacttatggtgcattggcgtgttatgctatgagctgctggttggctaccctccttttgaatcagcaagtcattctgaaacgtaccgacgcatattgaaggtggatgtgcgctttcctttgtcaatgccactcggagcgagagacctgatcagccgcttgttaaggtatcaaccactggaacggctgcccttagcacagattctgaagcatccctgggtgcaggcacacagtagacgggtcctgcctccatgtgcccaaatggcctcatag

SEQ ID NO: 27428 - DNA, 828 bp, synthetic construct
  misc_feature 1..828: note = Description of Artificial Sequence: Synthetic coding sequence
  source 1..828: mol_type = other DNA
atgagacgacttacagttgatgatttcgagatcggcagacccctcgggaagggcaaatttggcaacgtgtatcttgcccgattgaaagagtcccacttcatcgtagccctgaaggtgcttttcaaatcccaaatcgaaaaagaaggattggaacaccaattgcgcagagagatagaaatacaggcacacctacagcatcccaatatcctgagactgtacaactacttccacgatgctcgcagggtatacctgattctggagtacgctcctaggggggaactctacaaggaactccagaagtccgagaagttagatgagcaacgtacagcgacaattattgaagaactggcagatgctttaacctactgccacgacaagaaagtcattcaccgcgatattaagccagagaatttgctcctcggcttcaggggagaggtgaaaattgctgacttcggttggtcggttcacacccccagtctgcggcgaaaaacaatgtgtggcacattggattacttgcctccagagatgatcgaggggcgtacttacgacgaaaaagtcgacctctggtgtattggggttctctgctatgagctgctggtgggctatcccccttttgagagcgcttctcactcggaaacttataggcgcatactgaaagtggatgttaggtttccattatcaatgcctctgggcgctcgggatcttatcagcaggttacttaggtaccagccattagaaagactccctctggctcagatccttaaacacccatgggtccaggctcacagccggagagtcctgcctccctgtgcgcaaatggccagttag

SEQ ID NO: 27429 - DNA, 2589 bp, synthetic construct
  misc_feature 1..2589: note = Description of Artificial Sequence: Synthetic coding sequence
  source 1..2589: mol_type = other DNA
atgaacattcaagagcagggctttcccctcgacctgggggctagttttacagaggacgctcctcgtccaccagtgcccggtgaggaaggagagctggttagcaccgacccgcgtcctgcaagctattcattctgcagcggaaagggggtgggcatcaaaggcgagacatccaccgccactccgaggcgatcagacctggacttgggatacgagccagaaggttccgcatctcccacaccgccttatctgaaatgggcagagtcgcttcacagcttgttagatgaccaggacggaattagcctttttcgaacctttctgaaacaggaaggttgcgccgatctcctcgatttctggttcgcctgtacgggcttccgcaagctggagccttgcgatagcaacgaagagaagcgcctgaagctggctcgagctatttacagaaaatacatccttgataacaacgggattgtgagcagacaaaccaagcccgctacaaagtcctttatcaaggggtgtatcatgaagcagctgatcgatcccgcaatgttcgatcaagcacagacggaaatacaggcaactatggaagaaaacacttacccctccttcctcaaatcagacatctacttggaatatacccgcactgggagtgaaagtccaaaggtgtgttcagatcagtcctcaggttctggaactggtaaaggcataagcgggtacttgccgacactgaacgaggatgaagagtggaaatgcgatcaggacatggacgaagacgacggcagagacgccgcaccacccggacggctgccccagaagctgttgttggagacggccgctcctcgagtcagtagttcacggaggtactctgaaggtagagaattcaggtatggctcatggagggaaccagtaaatccatactacgtcaatgctggctacgcactggccccagctacgtcagccaatgattccgagcagcagagcttaagcagtgatgctgatacactaagtctcaccgatagtagcgtggacgggattccaccatatcggatacgcaaacagcatcgcagggagatgcaggagtccgtgcaggtgaatggcagagtcccgctgccacacatcccaagaacgtacagagtgcctaaagaagtgagggttgagcctcagaagtttgctgaggagctgatacaccggctggaggccgtccagcggacacgggaggcggaagagaagctggaagagcgtctcaaaagggtgaggatggaagaagagggggaagatggggaccccagcagcggcccacccggtccctgccacaagctcccacccgcacccgcttggcaccatttcccaccacgatgcgtcgatatgggttgcgcaggcttgagggacgcacatgaggaaaatccggaatccatcttagatgaacacgtgcagagggtgcttaggacccctggccgacagtcacctgggccaggtcaccgcagtcctgacagcgggcatgttgctaaaatgcctgtggcgctaggcggtgccgcaagcgggcacggaaaacacgtcccaaagagtggtgcaaagctggacgcagccggactgcaccaccaccgtcatgttcaccatcacgtccaccactccacggccagaccgaaggaacaggtagaagccgaagcaactagacgagcgcagtcgagcttcgcttgggggctggaacctcacagtcacggcgcacgctcccggggatactctgaatcagtcggagcagcaccaaatgccagtgatggtctggcacacagtggcaaggtgggtgtggcctgcaaacgcaatgcgaagaaggccgaatccggtaaatccgcgagcaccgaggtgcccggagcatctgaggatgctgagaagaaccaaaagatcatgcaatggatcatcgagggggaaaaggaaatcagtagacacagacgcaccggtcatgggtcttccggtactcgaaagcctcagccacacgagaattcaagacccctctcactggaacacccctgggccggaccgcagctaagaacgtcggtgcagcccagtcatctgtttatccaggatccaacaatgccaccgcaccccgcacccaatccacttacccaactcgaggaggcaagacggcgtctggaagaagaggagaagagggcatcgcgtgcgccatccaagcagcgatacgtacaggaagtgatgcggagaggacgcgcttgtgttcggcctgcctgtgctcccgtcctccatgtggtaccagccgtgtcagacatggagctatccgagaccgagaccagaagccagcggaaagtcggcggaggctccgcccagccttgcgacagcatcgttgtggcctactatttctgtggagagcctattccgtataggactttggtgcgaggcagggctgtgacactggggcagtttaaagaacttctcactaaaaaaggatcctaccgatactacttcaagaaagtctctgatgaatttgactgtggggtggtctttgaggaagtgagagaagacgaagctgttctgcctgttttcgaggaaaaaatcattggcaaagtggagaaagttgattag

SEQ ID NO: 27430 - DNA, 2481 bp, synthetic construct
  misc_feature 1..2481: note = Description of Artificial Sequence: Synthetic coding sequence
  source 1..2481: mol_type = other DNA
atgaatattcaggaacagggatttcctctggacctgggagcatcattcaccgaagacgcgccacgacctcccgtgccgggagaagagggagagctggtaagtactgaccccagaccagccagctattccttctgtagcggcaagggcgttggcatcaaaggggaaacttcaaccgcaacccccagacgctctgatctggatttgggctacgagccggaaggcagcgcatcgcccacacctccatatctcaaatgggctgaatccctccattcactgctcgacgatcaggatggaatctccctcttccggacgtttctcaagcaggagggctgtgctgacctgctcgacttctggttcgcctgtactggttttaggaagttagagccctgcgacagtaatgaggaaaagaggctcaagctggcccgagctatctatcgaaaatatatactggataataacggcattgtgtctaggcaaacaaagccagcgaccaagtctttcatcaaaggctgcattatgaagcagttaattgatcctgccatgtttgaccaagcccaaactgagatccaggccacaatggaggagaatacctaccccagctttctgaaatccgacatatacctggagtacacaaggactggcagcgagagtccgaaggtgtgcagtgaccagtcgtccggctctggaacaggaaaaggtatctcaggatatctgcctacattgaatgaggatgaagaatggaaatgcgaccaggacatggacgaggatgacgggagggatgcagcccctcccggacggctaccccagaaactactgctggagaccgcagctcctagagtttccagctcgcgacggtattctgaggggcgagagtttaggtatggaagttggcgggaaccagtgaatccctactacgtaaacgccggttatgctctggctcctgctaccagcgctaatgatagtgagcaacagagcctttccagtgacgcagacacactgagtctcacagatagttccgtggacggcatccctccctatcggatcagaaaacagcaccgacgggaaatgcaggagagcgtgcaggtgaatggcagagttcctctgccccatatacctcgtacctaccgggtccctaaggaggtgagagtggagccccagaagttcgccgaggagctgattcaccgactggaggccgtgcagcgaacacgcgaggccgaggaaaagttggaagagcgtctgaaacgtgtacggatggaggaagagggcgaagacggggatccttcgagtggacctcccggtccgtgccacaaactccctcctgctcccgcttggcaccacttcccaccacgctgtgtggatatgggatgtgcgggattgcgcgacgcccatgaggaaaaccccgagtccattctggacgagcatgtgcaaagagttctgcgaactccgggtcgccagtctcctggtccaggccataggtcccccgattcagggcacgttgccaagatgccagtcgcactgggtggcgcagctagcggccacgggaaacacgtccctaaatcgggggctaaactggacgccgcaggattgcaccaccaccgccacgttcatcatcacgttcaccatagtaccgcccgtcccaaagagcaggtagaagcagaagccacccgtcgagcacagagcagtttcgcttggggattggagccccatagccatggagcccgaagccggggatacagtgagtcagttggagccgcaccaaatgcgtccgacgggttggcccattccggtaaagtgggcgtcgcctgtaaacgcaatgctaaaaaggccgaatccgggaaatcagcttccaccgaagttccaggcgcatctgaggatgccgagaaaaaccagaagattatgcagtggatcatcgaaggcgaaaaagaaattagccgccatcggcgaaccgggcatggatcctctggaaccagaaagccccagccccatgagaactccagacccctgtcgctggaacatccttgggcaggccctcaactcaggacaagtgtgcaaccatcccacctgttcatccaggatcctactatgccgccacatccggctcccaaccccctgacacagttagaagaggcccgtagaagactcgaggaggaggaaaaacgtgcatcacgcgctcccagcaagcagcggactagaagccagcggaaagtcgggggaggttctgcccagccctgcgacagtatcgtcgttgcctactacttttgcggcgaaccaatcccgtaccgcaccctggtccgtggcagagccgttaccctggggcagttcaaggagctgctaacgaagaaggggtcttatagatactactttaagaaggtctcagacgaatttgattgcggagtcgtctttgaagaagtaagggaagacgaagcagtactcccagtgtttgaggagaagataattgggaaagtagagaaagtggactag

SEQ ID NO: 27431 - DNA, 309 bp, synthetic construct
  misc_feature 1..309: note = Description of Artificial Sequence: Synthetic coding sequence
  source 1..309: mol_type = other DNA
tagttggaggaggaggaaaaaagggcctctcgcgcaccctcaaagcaacgaaccaggagccagaggaaggtgggcggaggatccgcacagccttgcgattccatcgtcgtcgcctactacttctgcggcgagcctataccctatagaactttggtcaggggcagagcggtgacactgggccagttcaaggaactcctgacaaagaagggtagctatagacctcctagtcacctaaggtgttgtctgctaactgcgcttctgacatccgtccttcaaattcttctgcaggaaagcgagcgaagggtttag

SEQ ID NO: 27432 - DNA, 1824 bp, synthetic construct
  misc_feature 1..1824: note = Description of Artificial Sequence: Synthetic coding sequence
  source 1..1824: mol_type = other DNA
atggtgtgcacccgcaaaactaaaacactcgtgagcacttgtgtcatcttgagcggtatgacaaacattatttgtctcctgtatgtcggatgggttaccaactatattgcatccgtctatgttcggggacaagaaccagcgcctgataagaagctcgaagaagataagggagacactctgaagataattgagaggctcgatcatctcgagaatgttatcaaacaacatatacaagaagcaccggctaagcccgaggaggccgaagctgagcccttcactgacagctccctgttcgctcactggggccaggaactcagcccagaggggagacgggtggccctcaaacagtttcagtactatggttacaatgcatatttgagtgacagacttcccctggacagacccctgccagatctacgacccagtggctgtcggaaccttagtttccctgatagcctgcccgaagtgtctatagtttttatattcgtgaacgaagccctttcagtgctcctcaggagcattcattcagcaatggagcgtaccccccctcacctgttaaaggagatcatactggtggacgacaacagctcaaatgaggagctgaaggagaagctcactgagtacgtcgataaagtaaattcccagaagccaggatttattaaggtggtccggcactcaaagcaggaaggattgataagaagtagagtaagcggatggcgggctgccaccgcaccagtagtcgccctctttgatgcccacgtcgagttcaacgtcgggtgggccgagcctgttctgacccgaatcaaggaaaaccgtaagcgcataatctcaccaagctttgacaacataaaatacgacaatttcgagattgaggagtacccgctggccgctcaaggttttgactgggagctgtggtgccggtacctcaacccaccaaaggcatggtggaagcttgaaaattccacagcccctattagaagccccgcactgataggatgttttatcgtcgaccggcagtattttcaggagatcggtctcctggatgagggaatggaagtgtatggcggtgagaatgtggagctgggcatacgggtgtggcaatgtggtggatcggtggaggtgctgccctgctccaggatcgctcacattgaaagagcgcacaagccatacaccgaggatctgaccgcacacgtaaggagaaacgctctgagggtggccgaggtctggatggacgaatttaaatcccacgtgtacatggcgtggaatatacctcaagaggatagcggtattgatattggggacattactgctcgtaaggctctccggaagcagctccagtgcaaaacattcaggtggtatcttgtgtctgtctaccccgagatgcgtatgtattccgatataatcgcctatggcgtgctccagaacagcttgaaaacagatttgtgcctagatcagggaccagacacagagaacgtgcctattatgtatatctgtcacggtatgactccccagaacgtatattacacgtctagccagcaaatccatgtcggaattctgagtcctaccgtggatgatgacgataaccggtgcttggtggacgtcaactcacgccctcggttaattgagtgcagctatgcaaaagcaaagcgcatgaaactccactggcaattctcccaggggggacccatacagaacaggaagtccaaacgttgtctagagctgcaagaaaattcagaccttgaattcggattccagctggtgttacagaagtgcagcggacagcattggtctatcactaacgtgttgcgctctctggctagttag

SEQ ID NO: 27433 - DNA, 1710 bp, synthetic construct
  misc_feature 1..1710: note = Description of Artificial Sequence: Synthetic coding sequence
  source 1..1710: mol_type = other DNA
atgagtacctattccacattccctgccggagtgcctgtgtccgagcggtccttagcccgagcagggttctactacactggtgtcaacgataaggtcaaatgtttttgctgcggcctgatgctggacaactggaaactgggagactccccaatacagaagcataaacagctttacccctcttgctcattcattcagaatctcgtctctgctagtcttgggtcaacctccaagaacactagtcctatgcggaactcattcgctcattcattgtcacccacgctggagcactccagtttatttagcgggagctactcgagtctcagccctaatcccttaaactctagagccgtagaggatatctcttcaagcagaacaaacccatattcttatgccatgagtaccgaggaagcgagattcctgacctaccacatgtggcccttgacgtttctctctccatccgaactggcccgtgctggtttctactacataggcccaggcgatagggtggcttgctttgcctgcgggggtaagctgagcaattgggagccaaaagacgatgctatgagtgaacacagacgccatttcccaaactgccctttcctggagaacagccttgagacactgcgcttctctatatcaaatctctccatgcagacgcatgccgctcgaatgcgcacattcatgtattggcccagctccgtgccagtgcagcccgaacaactcgctagcgccggtttttactacgttggcagaaacgacgacgtaaaatgcttctgttgtgatgggggactcaggtgctgggaatccggggacgacccctgggtggagcatgccaaatggtttccgagatgcgagtttctgatccgcatgaaagggcaggaatttgtggatgagatccagggaaggtatccccatttactggagcagctgctgagcacatctgatacaactggagaagagaacgccgaccccccaattatacacttcgggcctggggagagctccagcgaagacgctgtgatgatgaataccccagtcgtgaagtcagctctggaaatgggttttaaccgggatctcgttaaacaaactgtgcagagcaaaatcttgaccactggcgagaattataaaacagtcaatgatattgtgtccgccctgctgaatgctgaggacgagaagcgggaggaggaaaaggaaaaacaggctgaagagatggcatccgatgatctgtcactgatccggaaaaatcgaatggcacttttccaacagcttacatgtgttctccctatactggacaatctgctgaaagccaatgtgataaacaaacaggaacacgatattatcaagcagaaaacgcagatccccctgcaagcccgagaactcatcgacacgatactcgtaaaggggaatgccgcagccaacatctttaagaattgcctaaaagagatcgactccacactgtataaaaacctgtttgtagataagaatatgaagtacattcccacagaagacgtctccggcctcagccttgaggagcagttgaggcggctgcaggaggagaggacctgtaaagtctgtatggataaggaagtctccgtggtttttatcccttgtgggcacctggtggtgtgtcaagagtgtgccccatccctcagaaagtgtccaatctgccggggaataattaaaggcacggtgagaacctttctttcttag

SEQ ID NO: 27434 - DNA, 1794 bp, synthetic construct
  misc_feature 1..1794: note = Description of Artificial Sequence: Synthetic coding sequence
  source 1..1794: mol_type = other DNA
atggaagacagtacaattctaagtgactggacaaatagcaacaaacaaaaaatgaagtacgatttctcgtgtgaactgtaccggatgtcgacctattccacttttcccgctggtgtgccagtgtctgaaagatctctggcacgcgcagggttttactatacaggggtgaatgataaagttaagtgcttttgctgtggtctgatgctggacaactggaaactgggggacagccctatccagaaacacaagcagctgtatcccagctgctctttcatacagaatttggtgtctgcgtccctagggtccacatctaagaatacctccccaatgagaaacagttttgcccattctctgtccccaactctcgaacactctagcctgttcagtggtagctatagtagcctgtctcccaatcctctcaattcgagggccgtggaggatatatcaagctcacggacaaatccatatagttacgccatgagcacagaagaggctcgcttcctaacttatcatatgtggccactgaccttcctctcccctagcgaactggccagagccggtttttattacatcggcccaggcgatcgagtggcttgttttgcctgtgggggaaaactttcaaattgggaacccaaagatgatgccatgagtgagcataggagacacttcccgaactgccccttcttggagaactccctggagaccctcagattcagcatatcaaacttatcaatgcagacacatgcggcaaggatgcgcacattcatgtactggccgtcaagtgtacctgttcaaccagaacagcttgcctctgcagggttttattatgtgggtaggaacgatgacgtgaaatgcttttgttgtgatgggggtttgaggtgctgggagtccggtgatgacccctgggttgagcacgcaaaatggtttcccaggtgtgagttcctgatcaggatgaaaggtcaggaatttgtggatgagatacagggccgttatccccacctactagagcagttattgagcacgagcgacacgacaggagaggagaatgctgatcctcccattatacacttcggcccaggagagagctcttcggaggacgctgtcatgatgaacacaccagtggtgaagagcgccctggaaatggggttcaatcgggatctagtcaaacagacagtgcaatcgaagattctgaccactggtgagaattacaaaacagtaaatgacatagtctccgctcttcttaacgccgaagatgaaaaacgcgaagaggaaaaagaaaagcaggccgaggagatggcctccgatgacctatccctgatccggaaaaatcgcatggcactgttccaacagctcacgtgcgtcttacccatactcgataacctgctgaaggccaacgtcattaataagcaagagcatgacatcatcaaacaaaagacccagattcctctccaggctcgggaactcattgatactatcctcgtgaaaggcaatgcagcagcaaacattttcaaaaattgccttaaagagattgatagtaccctctacaaaaatctcttcgtcgacaaaaatatgaagtatatccccaccgaagatgtatcaggcctgtcccttgaagaacagctgagacgcttgcaagaggagagaacatgtaaagtttgcatggacaaggaagtgtctgtcgtcttcattccatgtggtcatcttgtcgtgtgtcaggagtgcgctccaagcctgcggaagtgcccaatatgtagggggattatcaagggcaccgtgcgaacctttctgtcttag

SEQ ID NO: 27435 - DNA, 1605 bp, synthetic construct
  misc_feature 1..1605: note = Description of Artificial Sequence: Synthetic coding sequence
  source 1..1605: mol_type = other DNA
atgcacaaaacagccagtcaacggctgtttcccggtccgtcctatcaaaatattaagagcatcatggaggatagtacaattctcagcgattggactaacagcaataagcagaagatgaaatatgatttttcttgtgaactctaccgcatgtccacatactcaaccttccccgctggagtgcccgtctctgagaggtccctagcaagggctggtttctattatactggggtgaatgacaaagtaaaatgcttttgctgtggattaatgttggacaattggaaactaggcgattcccctattcaaaagcataagcagctgtatcctagttgtagcttcattcagaatctcgtctccgcatctctcggatccacttcaaagaacacttctccgatgaggaactcattcgcacactcccttagccccacactggaacattcctctctgttctcaggttcctattcatccctgtctccgaatcctctaaatagtagagcggtagaagatattagttctagccggaccaacccgtatagctacgccatgagcacagaagaagccagatttcttacttatcatatgtggccattgacattcctttctccttccgaactcgccagggctggcttctattacattggccctggtgaccgggtagcctgttttgcatgcgggggtaagctctctaactgggaaccaaaggatgacgctatgtctgaacatcggcgacatttccccaactgcccttttcttgaaaacagcctggagacgttgcggttctctatttcgaatctgtccatgcagacccacgccgctcgaatgcggacattcatgtactggccatctagcgtgcctgtgcagcctgaacaactggcttccgcaggcttctattatgtcggtcggaatgacgatgtgaagtgtttttgctgcgatggaggcctgagatgctgggagagtggggatgacccgtgggtggagcacgcaaagtggtttccacgctgcgaattcctcattaggatgaagggccaggagtttgtggatgaaatccagggccgatacccacatttgttagagcagctgctctccactagcgacactaccggggaggagaatgccgacccccctattattcacttcggccctggcgagtcttcgtctgaggacgctgttatgatgaatacaccagttgtaaagtccgctctggaaatgggctttaatcgggatctggtcaagcaaacagtgcagtccaagatcctaactaccggcgagaactataagacagtgaacgacatcgtgtcagctcttcttaatgcagaggatgagaaacgggaagaggaaaaggagaagcaggccgaggagatggcaagtgatgacctgtctctgatccggaaaaaccgtatggccctgtttcagcagcttacctgtgtgctgcccatcctggacaatttgctgaaggctaatgtgattaacaaacaggaacacgacattatcaagcaaaaaacgcagatccctctgcaggctcgggaacttattgatactatcctggtcaagggcaacgctgctgccaacattttcaagaactgtcttaaggttaagcagcggttctag

SEQ ID NO: 27436 - DNA, 1815 bp, synthetic construct
  misc_feature 1..1815: note = Description of Artificial Sequence: Synthetic coding sequence
  source 1..1815: mol_type = other DNA
atgaacatcgtcgagaatagcattttcctgtccaatctgatgaaatcagccaacacctttgagttgaaatacgacctgtcttgcgaactctacaggatgagcacatactctaccttcccagccggtgtgcctgtgagtgagcgaagtctggcacgagcaggattttattacactggggtcaatgataaagtgaaatgcttttgctgcggactgatgctcgacaactggaagagaggggattcacccacagagaagcacaaaaaattataccccagttgccggtttgtgcaaagcctgaatagcgtgaacaatcttgaagctacaagccagcccacatttccctccagcgtgacgaactccacccactcactccttccgggaacagagaacagcggatatttcagaggctcttacagtaacagcccctcgaatcccgttaatagtcgcgctaatcaggatttcagcgccctgatgcgtagcagttatcactgcgccatgaataacgagaacgctagactgctgaccttccagacatggccactgacttttctttctccaaccgatctcgccaaagcgggtttctactatataggaccaggcgaccgcgtggcctgttttgcctgcggtggcaagctttcaaactgggaacctaaggataatgcgatgtcggagcatcttcgacatttcccaaaatgtccatttattgagaaccagttgcaagacacctcacggtacactgtctcaaacctcagcatgcagactcacgccgcacggttcaagacgttcttcaattggccctccagcgtcttagtgaatccagaacagctggcttcagccggattctactacgtaggaaactcagatgatgttaaatgcttctgttgtgatggcggacttcggtgctgggagtccggcgacgacccgtgggtgcagcacgctaagtggtttccgagatgtgaatacttaatcagaataaagggacaggaatttatccggcaggtgcaggcctcttaccctcatttgctggaacagctgctgtccacttctgacagtccgggtgacgagaacgctgagtctagcattatccatttcgaacccggtgaggaccactctgaggatgctattatgatgaacacacctgtgattaatgctgcagtcgagatgggcttcagccggtctctagtcaaacagacagtacaaagaaagatcctggccacgggtgaaaactatagactggtcaacgacctggtgcttgacctgctgaatgctgaagacgagatcagagaagaagaaagggagagagccactgaagaaaaagaatcgaatgatctcctgctgatacggaaaaatcgaatggccttgttccaacaccttacttgtgtgatcccaatcctggactcccttctcaccgctggtatcattaatgagcaagagcatgacgtgattaagcagaaaacccagacatctcttcaagctagagaactgatagacacaatcctggttaaaggtaacatcgctgccactgtgtttaggaactccctgcaagaagcagaggcggtgctgtacgaacacctgtttgtgcaacaggacatcaagtacatacccacagaggatgtcagtgacttacccgtggaggagcagctgcggagactccaggaggaacgcacctgtaaagtttgtatggacaaagaggtgagcatagtttttattccctgtggccacctcgtcgtttgtaaagactgtgcaccgagcctccggaagtgtccaatctgtaggtcaacaataaagggaactgtcaggacatttctgagttag

SEQ ID NO: 27437 - DNA, 1815 bp, synthetic construct
  misc_feature 1..1815: note = Description of Artificial Sequence: Synthetic coding sequence
  source 1..1815: mol_type = other DNA
atgaacatcgtagagaactctatatttctaagcaatttgatgaaatccgcgaataccttcgaactaaagtacgatctgagttgcgagctctaccggatgtcaacctattcaaccttccccgcaggtgtacccgtttctgagaggtccttggcgcgtgccggattctattacacaggggtcaacgacaaggttaagtgtttttgctgcggtttgatgcttgacaattggaaaagaggtgattccccaacagagaagcataagaagctgtacccgtcctgccgattcgtccagtcccttaattctgttaacaacttagaagccacgagccagccaacttttccttcctcggtcaccaattctacgcactctctgctgccagggaccgaaaactctgggtatttccgtgggtcttattccaactctccttccaatcctgttaactcccgagctaatcaagatttcagcgccctgatgcgcagctcctaccactgcgctatgaacaacgaaaatgcacggctgctaactttccagacctggccccttacctttctttcaccgaccgacttggctaaagctggcttctattatatcggcccaggtgatcgggtcgcctgtttcgcatgcggcggaaaactctcgaattgggaacccaaggacaatgccatgtcagagcacttgcgccacttccccaaatgcccgtttattgaaaatcaacttcaggacacgagtaggtataccgtttccaacctttctatgcaaacccacgctgcccgtttcaagacttttttcaattggccttccagtgttctggttaaccctgagcaactggccagcgccggtttctattacgtcggcaactctgatgacgtgaaatgtttttgctgcgacggcggactacgttgctgggagagcggcgacgacccctgggttcagcatgccaagtggtttccccgatgtgagtacctgattcggattaagggtcaagaattcattcgccaggtgcaggcaagctacccgcacctgttggagcagctcttgtccacatccgattcgcctggcgacgagaatgccgaatcctctatcatccactttgaaccaggcgaggaccacagcgaggatgctatcatgatgaatacaccagtcattaatgccgctgtggagatgggatttagccgcagccttgtgaagcaaaccgtgcagcggaagatacttgcaacaggggaaaattacaggctggtgaacgacctggtactggatttgctaaacgctgaagatgagatccgtgaggaggagcgagagcgggcaacagaggagaaggaatccaacgacttgttgcttatcagaaagaacagaatggccttgttccagcacctcacatgtgtgattccaatcctcgactcactgctcaccgcaggtattataaacgagcaggaacacgacgtgatcaaacagaaaactcagacatccttgcaggccagagagcttatcgataccatacttgtgaaagggaatatcgccgctaccgtgttccgcaactcgttgcaggaggcagaggctgtgctgtatgagcatctattcgtgcagcaggatattaaatacatcccaaccgaggacgtgtcagacctcccagtcgaggagcagttgagaaggctgcaggaagagcggacctgcaaggtgtgcatggacaaggaggtgagcattgtgtttattccgtgcggacatctcgtagtctgtaaggattgcgcaccctcgctcaggaagtgccccatctgtaggtcaactattaaaggtaccgtccgaaccttcctctcttag

SEQ ID NO: 27438 - DNA, 498 bp, synthetic construct
  misc_feature 1..498: note = Description of Artificial Sequence: Synthetic coding sequence
  source 1..498: mol_type = other DNA
atgggcgctcccaccctccctcccgcatggcaaccatttttgaaggatcacagaattagtacattcaagaactggccattcttagaaggatgtgcatgtaccccagagaggatggccgaagctggcttcattcactgcccgaccgagaacgagccagacctggcacagtgtttcttttgcttcaaagaactagagggttgggagcccgatgacgaccccattggccctggaacagtcgcatacgcttgcaacaccagtaccctcggcggacggggtggcaggatcacacgagaagaacacaagaagcactcatctggctgtgcattcctctcagtgaagaagcaattcgaggagttaaccctgggcgaattccttaaactagacagagagagggctaagaacaagattgctaaggaaaccaacaataagaaaaaagagttcgaagagacagcagagaaggtgcgcagggcaatcgaacagctggctgccatggactag

SEQ ID NO: 27439 - DNA, 429 bp, synthetic construct
  misc_feature 1..429: note = Description of Artificial Sequence: Synthetic coding sequence
  source 1..429: mol_type = other DNA
atgggagccccaacactgccacccgcatggcagcctttcctgaaggaccacagaatatctacctttaagaactggccatttctggagggctgtgcctgtacccctgagagaatggccgaggcgggattcattcattgtccgacagagaacgaacctgatctggcacagtgcttcttctgcttcaaagaactggaaggttgggagcccgacgatgatccgatcgaggagcacaagaagcactcttccggttgcgcgttcctgtctgttaaaaaacaattcgaggaattaacgctgggggaatttctaaaattggaccgggagcgagctaagaacaagatcgctaaggagaccaataataagaagaaggagtttgaggaaacagctgagaaagtccgtagggcaatcgagcagttagccgctatggattag

SEQ ID NO: 27440 - DNA, 414 bp, synthetic construct
  misc_feature 1..414: note = Description of Artificial Sequence: Synthetic coding sequence
  source 1..414: mol_type = other DNA
atgggggctccaaccttgcccccagcatggcagcccttcctgaaagaccacaggatttcaactttcaaaaactggccgttcctcgaaggctgtgcatgtacccccgaacggatggctgaagccggattcattcattgtcccactgagaatgaacccgatcttgcacagtgtttcttctgttttaaggagctagaagggtgggaaccagatgatgatcctatgcaacgaaaacccacgatccggagaaaaaacctcaggaagcttagacgtaagtgcgctgttccttctagcagctggctaccctggattgaggcttctgggaggagctgtttggtgccagagtggttgcaccatttccaggggctctttcccggagctacatcactccctgtagggcctctggctatgtcctag

SEQ ID NO: 27441 - DNA, 432 bp, synthetic construct
  misc_feature 1..432: note = Description of Artificial Sequence: Synthetic coding sequence
  source 1..432: mol_type = other DNA
atgggcgctccaaccctccccccagcttggcaaccatttttgaaggaccatcgcattagcacattcaagaattggccattccttgaaggatgcgcctgtacacctgaacgcatggctgaagccggttttattcactgtcctacagaaaatgagcccgacttagcacagtgttttttttgcttcaaagagctcgagggctgggagcctgatgatgatcctattgggcctggtacggtggcctatgcgtgtaatacctccactctcgggggtcgtggaggacgtatcactcgggaagagcacaagaaacacagctccggatgcgcattcctcagcgttaagaaacaattcgaggagctgaccctcggagagtttctcaagctggaccgtgaaagggccaagaataagatcgagcgggcactgttggccgagtag

SEQ ID NO: 27442 - DNA, 14574 bp, synthetic construct
  misc_feature 1..14574: note = Description of Artificial Sequence: Synthetic coding sequence
  source 1..14574: mol_type = other DNA
atggtgactggcggaggtgcggcaccccctggtacagtcactgagcccctcccctcagtcatcgtcctgagcgctgggagaaaaatggctgcggcagccgctgccgctagcggcccaggatgcagttctgcagcaggagccggtgcggctggagtaagcgagtggctggtccttcgagatgggtgtatgcattgtgacgcggacggcctccacagcctaagctaccacccagcgttaaacgccattctggctgtaacatcccgaggcactatcaaagtgatcgatggcaccagtggagcgaccctgcaggctagtgcgcttagtgctaaacctgggggtcaggttaaatgtcaatatattagtgcagtcgacaaagtcattttcgttgacgattacgctgttggttgccgcaaggatttaaacggcatcttgctgttggataccgctctccagacccctgtatccaagcaggacgacgttgtccagctagaacttcccgttacagaggcccagcagctattgtccgcttgtctagagaaggtggatatctcttcaacagaaggctatgacctgttcattacacaacttaaggatggcctgaaaaacacttcacacgaaaccgccgcaaaccataaggtggccaaatgggcgactgtcacttttcacctgccccaccacgtcctaaagtccatcgccagtgctatagttaacgaactaaaaaaaattaatcagaatgtggcagcactgcccgttgcctcttccgtcatggaccgcctaagctacttgcttccttccgctaggccggagctaggcgtggggccaggtcgttcagtcgaccgttcgctgatgtactccgaggccaatcggagagagacatttacttcttggcctcacgtcgggtacaggtgggcacagccggaccccatggcccaggcaggattttaccatcaacccgcaagctcaggcgacgatcgcgctatgtgctttacttgttctgtttgtctcgtctgctgggaacccacagatgaaccatggtccgagcatgaacggcactcccctaactgtccgttcgtgaagggcgagcacacccaaaacgtgcctctgtccgtgactcttgccactagccctgcccagttcccctgcacagatggcacagacaggatcagttgttttggcagtggctcctgtccccacttcttagctgccgctactaagcgtgggaaaatctgcatctgggacgtttctaagctgatgaaagtgcaccttaagtttgaaattaacgcttatgaccctgcaatagtgcaacagctgattttgtctggagatccctccagcggcgtcgactctcgcaggcctaccctagcttggctggaggattctagctcctgctcagacatccctaaactggagggagacagtgatgatttgctcgaggatagcgacagcgaagagcattccagaagcgattcagtgacagggcacacctcccagaaagaagccatggaggtaagtcttgatataaccgccctgtctatcctacagcagcctgaaaaactccagtgggaaatcgtggcaaacgtgctggaggacacggtgaaggacctggaagaactgggcgctaacccttgcctcacgaatagcaagagtgagaagactaaagagaagcatcaagaacagcataacatcccatttccctgtcttttggccggaggtctgctgacatacaagtcaccagcaacctcaccaatttcttcaaacagccaccgcagtctggacgggctcagccgaacacagggcgagagcatttccgaacaaggatctacagacaacgaaagttgtaccaatagcgagctgaatagcccattagtacggcgaacccttccagttctactcttatattccattaaggagtctgacgagaaagccggaaaaattttcagtcaaatgaacaacatcatgagcaaatctctgcacgacgacggattcacggtgccccagataattgaaatggagctggattctcaggaacagctgttgctgcaggatccacctgtaacatatattcaacagttcgctgacgctgccgctaaccttacctctccagattctgagaaatggaactctgtgttcccaaaaccaggcacccttgtccagtgcctccgactgcccaaattcgcagaagaggagaacttgtgcattgactccatcaccccctgcgccgatggcatccacttactcgtggggctgaggacttgtcctgtggagtccctgtcagcgatcaatcaagtggaggcactgaacaacctgaacaagctgaactccgctctttgtaaccggcgtaagggtgagctggagtctaatcttgctgtagttaatggtgcaaatatctctgtgatccagcacgagagtcccgctgatgttcagacacccctcatcatccagccagagcaaaggaatgtctccggaggctatcttgtcctgtacaagatgaactacgcaaccagaatagtcactttggaagaggagcctattaaaatccagcacatcaaagacccacaggatactattactagtctgattctccttccgccagacatcctggacaaccgcgaggacgactgtgaggagcccattgaagatatgcagcttacctccaaaaatggcttcgaacgggaaaagacaagcgacatttctactctcggtcaccttgttatcactacccagggcggatatgtcaaaattctggaccttagtaattttgagattcttgccaaggtcgagccccctaaaaaagaggggaccgaggaacaggatacgtttgtgtctgtgatctactgttccggtacagacagactgtgcgcttgcacaaagggcggagagcttcattttcttcagataggaggcacttgtgatgacatcgacgaggccgacattctagtggacggaagccttagtaaaggtatcgaaccatcctctgaaggttctaagccattaagcaaccctagtagccccggtataagcggggtggacctgctggttgaccagccctttacgttagagatcctgactagtctcgtggaacttacccggtttgagaccctgacccctagattttctgccaccgtacccccttgttgggttgaggtccagcaggaacagcagcagcgtaggcatccccagcacctgcaccaacagcaccacggagatgccgcacagcacacccggacctggaagctgcagaccgactctaactcctgggatgagcatgtgttcgagttagtcctgccaaaggcttgcatggtgggacacgtggacttcaaatttgtattgaactctaacattacgaacattccccagatacaggtgacactacttaagaacaaagcaccgggtctgggcaaggtgaatgctttaaatatagaggtagagcagaatggcaaaccatctctcgtggatctcaatgaggagatgcagcatatggacgtggaagaaagtcagtgtttgaggttatgtccctttctggaggatcataaggaggatatactttgcggccctgtctggctggcgtcaggtctcgatctgagcgggcatgcaggcatgctgactctgacgtcccctaagctggtgaaaggtatggccggtggaaaatataggtctttcctgatacacgtgaaggccgtaaatgagaggggtacagaagagatctgcaatggtggtatgcggccagtcgtcaggctgccatcactgaagcaccagagtaataagggctacagcctcgccagccttctggccaaagtagccgcaggcaaggagaagtcttccaatgtgaagaacgaaaatacctccggaacccgcaagtccgagaacctccggggatgcgatctgcttcaggaggtctcagtgaccatccgccgatttaagaaaacttcaatctctaaagagcgggttcaaagatgcgctatgctgcagttttctgagttccacgagaagcttgtcaatacactgtgtcggaaaacagacgacggccagattacggagcacgctcagtcccttgtgttagacacactgtgctggttagctggcgtgcattcgaacggaccgggtagctcaaaagagggcaacgagaacctgctgtctaagacccgaaagtttttatctgatattgttcgcgtgtgcttttttgaagcaggtcggtcaattgcccataagtgtgcacgcttcttggctctctgtatcagcaacggtaaatgtgatccttgtcagcctgcttttggcccagtgctgttaaaggccctgcttgataacatgtctttcctgcccgcagctactaccggcggatccgtgtattggtacttcgttcttcttaactatgtaaaagacgaggacctcgctggatgctctacagcatgcgcctccctgttaaccgccgtgtctaggcagctacaagaccgcttgactcctatggaggcactgttacagactcggtatgggctctactccagcccattcgatcctgtcctttttgatctggagatgagtggctcttcttgtaaaaacgtgtacaacagttctatcggcgtgcagagtgacgagattgatttgagtgatgtcctctccggtaatggaaaggtatcctcctgtactgctgcagagggctctttcacctcgctgaccggtcttctcgaagtggaaccccttcatttcacatgcgtgagcacctccgatggcacccgcattgagagagacgatgcgatgtcctcttttggggtgacaccagcagttgggggtttatcttctgggacagtcggtgaagcctcaacagctctgagttctgccgcacaggttgcattacaatcactgtctcatgcaatggccagtgccgagcagcagctccaagtgttgcaggagaaacagcagcaactcctgaaattacagcagcagaaggctaagctcgaggccaagcttcaccagacaacagccgctgcagccgcagccgcaagtgccgtaggccctgtgcataatagcgtcccatctaacccagtggcggcacccggtttcttcatccatccttccgacgtgatccctcctacaccaaagaccactcccttgttcatgactccacccctgacaccaccgaatgaggctgtctccgtcgtgatcaacgccgaattagctcagctgtttccgggttctgtcatcgatccaccagccgtgaacttagctgcacataacaagaattctaacaaatcaaggatgaacccattgggatccggcctcgccctcgccatctcccatgccagccactttttgcaaccaccccctcaccagagtatcatcatagagaggatgcattctggcgcaagaagatttgtgactctggacttcggacggccaatcctgttaaccgacgtgttgatcccgacatgtggagatctggctagtctgtcgattgatatctggacactgggagaagaagtggacggtagaaggctcgtggtagcaaccgacatatccacccactccttgatcctccacgaccttattccaccccctgtttgcagatttatgaagatcacagtgataggacggtatggctccaccaatgcccgagctaagatccctctcggattctattatggtcacacctacattctaccatgggagagtgaactgaaattaatgcacgaccccctcaaaggggagggagagagcgccaaccagcccgagatagaccagcatctggcaatgatggtggccctgcaggaggacatccaatgtaggtacaacctggcgtgccatcgccttgaaaccctgctccaaagcatcgatctcccaccccttaactccgcaaacaacgcccagtattttctgcgcaaaccagacaaggccgttgaagaggatagccgggtgttcagcgcataccaggactgtattcagctccagctgcagctgaacctggctcacaacgccgtccagcgtttgaaggtagccctcggggcaagtcgcaagatgctctctgaaacgagcaaccctgaggatctgattcagacctcttctacagaacagctgaggaccataatccggtatttactggacaccctgctgagccttcttcacgcaagcaacggccattccgtccccgcagttctgcagtctacgttccacgcacaagcctgcgaggagctgttcaagcacctgtgtatcagtggtacgcccaaaattcgacttcataccggcctgctgctcgtacagctgtgcggcggagaaagatggtgggggcagtttctgagcaacgtgttgcaggaactctataatagtgagcagctccttatatttccccaagatcgggtattcatgttactgtcctgcatcgggcagaggtccctgagcaattctggtgtgctcgagtcattgttgaatctcctggacaatttgctcagcccgttgcagccacagctccctatgcataggcgcacagagggggtccttgacatccctatgatcagctgggttgtgatgttagtaagcaggttgcttgattacgtcgctactgtggaggatgaagctgcagcagcgaagaaaccgctcaatggcaatcagtggagtttcatcaacaacaaccttcacactcagtctctgaacagatcaagcaagggttcttctagcctggaccggctgtacagccggaaaattcgcaaacagctggtgcaccacaaacaacagttgaatctgcttaaggcaaaacagaaggccttggtggagcaaatggagaaggaaaaaatacaaagcaacaagggcagcagctacaagttacttgttgagcaagccaaactgaagcaagctactagcaaacactttaaggatctgatacgtttacggagaaccgctgagtggagtagatccaaccttgacactgaagtgaccacggccaaagagagccccgagatagagccccttccctttaccctagcacatgaacgctgtatctccgtggtgcagaagcttgtactgttccttctttcaatggattttacatgtcatgcagaccttttgctcttcgtgtgtaaagtactggcccgaattgcaaatgctacccgacccactatacatctttgcgaaatcgtcaacgagccgcaattggagagattgctacttctgctggtcgggacggacttcaaccgcggagatatcagctggggaggagcctgggcacagtatagtctgacatgtatgctgcaagatatcttggccggtgagctgcttgcacctgttgccgctgaggctatggaggaagggaccgtcggcgacgatgttggtgccaccgccggagactctgatgactctcttcagcagagttcagtgcagctgctcgagaccattgacgagccacttacacacgatattactggtgcaccgcctctcagctctttggagaaagataaagagatcgatctggagctcttgcaggatctgatggaggtcgatattgatcccttggacatcgatctggagaaggacccattggctgccaaggtatttaagcccatctcttccacttggtatgattattggggggctgactatgggacgtacaactacaacccctatattggaggactcggaatccccgtcgcgaagcccccagcgaacacagaaaaaaatggaagtcagacagtgtcagtctcggtttcccaagctctcgacgctcggttggaagtggggctggagcagcaggccgaactgatgctgaaaatgatgagtacactggaggcagactcaattttacaggccctgacaaataccagtccgactctctctcagagccccacaggaaccgacgatagcctgctgggcggactccaggcagccaaccagacatcacaactcatcatccaattgagtagtgtgccgatgctgaatgtctgcttcaataaattatttagcatgctgcaagtgcaccacgttcaacttgaaagccttctgcaactgtggctgacattaagcctcaattccagcagcacagggaacaaagagaatggagcagatatattcctgtacaatgccaatcggataccagtgatctccctgaatcaggcctccatcacatcattccttacggtgctggcatggtaccctaatactcttcttaggacctggtgcctcgtactgcattccctgaccctcatgacgaacatgcagctgaactcgggcagttcatccgctattggtacccaggagtcgacggcacacctgttagtctccgatccaaatttaatacacgttctcgttaaattcctcagtggcacaagtccccacggtacaaaccagcatagcccgcaggtcggacccacagccacgcaggccatgcaggaatttctgaccagattgcaggtacatctgagctccacttgcccacaaatatttagcgagtttctgctgaagctgattcatattctcagtactgaaagaggggcattccaaacaggccaaggccctctggatgcccaagtgaagctcctggagtttacccttgagcagaattttgaggtggtgagcgtgagcacgatcagcgcagtgattgagagcgtgacctttctagtgcaccattatataacctgctctgacaaggtgatgagccgttcagggtcagattcgtcggttggggctcgcgcatgcttcggcggtctgttcgcaaacctgataagaccaggcgacgctaaagctgtatgcggcgagatgacccgcgaccagctcatgtttgatctgttaaaactggtgaatatcctggtacagctacccttgtctgggaaccgcgagtatagcgcacgagtgtcggttactaccaacactacggatagtgtgagtgacgaggagaaagtgtccggcggaaaggacggtaatggcagctccacgtcagttcagggcagcccggcatatgtggcagatcttgtcctggccaatcagcagatcatgtcccaaatcctctctgccttgggcctgtgcaatagctccgccatggccatgattattggggcttccggtctgcatctgaccaagcatgagaacttccacggtggcctggatgccattagcgtcggagatggcttgttcaccatactcacaacactgagcaagaaagccagcacagttcacatgatgctccagccgattctgacctatatggcctgtgggtacatgggacgccagggttccctggctacatgtcagctctccgaacctctcctctggtttattcttcgggtgctcgacacatcagacgctctaaaagctttccacgatatgggaggggtgcagctgatttgcaacaacatggtgacttccactagggcaattgtgaacacggcccgaagtatggtgtcaacaatcatgaagtttctggatagcgggcctaataaagcagtggactccaccctgaagacgcggattctggcttcagagccagacaatgcggagggaattcataacttcgcgcctctggggacgatcacatcgagtagcccaaccgcccagccagccgaagtattattgcaagccacccccccacatcggagagctagatctgcagcatggagttacattttcctaccagaggaggcctggtgcgacctgacaattcatctgccagcggctgtccttctcaaagagatccacatccagccacatttggccagcctggctacctgcccatcctcagtatcggtggaggtgagcgccgatggggtgaatatgttaccactttctacacctgtcgttacgtccggcctcacatatataaagattcagctcgtgaaggccgaagttgctagcgctgtttgtttgcggctgcaccggcctagagacgcaagcacactgggtttatcacagatcaaactcctcggcctgacagccttcgggacgacatcatccgcaactgtgaataacccatttctgccttccgaagatcaggtgtccaagactagtatcggctggctccgcttacttcaccattgtctcacccacattagtgatctcgaaggcatgatggctagcgcggctgcccctactgctaatttgctccagacttgtgccgctctcttgatgagtccctactgtggcatgcacagcccaaacatcgaggttgtgttggtcaagatcggtctccagtccacacggatcggactgaagcttatcgacatcttgttgcgaaattgtgctgcaagtgggagtgaccccacagatttgaacagccctctcctttttgggcgtctgaatgggctttcatccgacagtacaatcgacattctgtatcagctggggactacccaggaccccggaaccaaggataggatacaggccttactgaagtgggtcagcgatagtgcgagagttgccgcaatgaagcgctctgggaggatgaactacatgtgccctaactcgtccacggtagagtacgggttgctcatgccatcaccatctcacctgcactgtgttgccgcaatactatggcattcttacgagctgttagtagagtacgatcttcctgcgctactcgaccaggaactgttcgaactgctgttcaactggtccatgagcctgccctgtaatatggtgctcaagaaggcggtggattcactgctctgttctatgtgccacgtccaccccaactatttctctctgttaatgggctggatggggatcacccctcctccagtccagtgtcaccacaggctatcaatgacggacgattccaagaagcaggatttgtcgagctctctcactgatgacagcaagaacgctcaggctccgttagccctgacagagtcacatctcgcaactcttgcgtcttcgagccagagtcccgaggcaataaagcagctcctggactccgggctcccaagcctgctggtcagaagccttgcatcattctgtttctcccacatatctagttccgaatcaatcgctcagtcaattgacatttcccaggataagctgaggaggcaccatgtgcctcaacagtgtaataagatgcccatcacagcagacctcgtggctcccatcctccgcttcctgaccgaggtgggcaactcccatataatgaaagactggctgggcggaagcgaggtgaatccattatggaccgcactcctgttcctcctctgtcacagcggttccactagtggcagccacaatttgggcgctcaacaaactagtgctagatccgccagcctcagcagcgccgctacgaccgggctgaccacccaacagcgaaccgccatcgagaatgccactgtggcatttttcctccagtgcattagttgccaccctaataatcagaaactcatggcacaggttctgtgtgaattgtttcagacttcccctcaaaggggaaaccttcccacatcaggcaacatatctggatttattcgtcgcctgtttctgcagctgatgcttgaagatgagaaagttaccatgtttctccagagtccttgtccgctctataaaggcaggattaacgccaccagccatgtgattcagcaccctatgtatggggctgggcataagtttaggacactccatcttcctgtgtcaaccacattgagcgacgtgctcgacagggtatctgacaccccgagcattactgccaagctcatcagcgaacagaaggacgataaggagaagaagaaccacgaggagaaagagaaagtgaaggctgagaatgggtttcaggataactactctgtggtggtggcctcgggcctgaagtcccaatcaaaacgggctgtatccgctactcccccacggcctccgtcccgacgtgggcgtactatcccggataaaatcggatccacgtccggtgccgaggcggcaaacaaaattataacagtgcccgtgttccacctatttcataagctcttagccggacagcctttacccgcagaaatgaccctggctcagctgctgacattgctctacgatcgtaagctgcctcaggggtacaggtcgatcgacctgacagttaagctcggcagtagggtcattacagacccgagcttgtctaaaaccgactcttacaaaagactgcacccagagaaggaccacggcgatcttctggcatcctgcccggaagatgaggcccttacccccggtgacgagtgcatggacggaatactggatgagtcgctgctggagacttgcccaatccagagtcccctccaggtttttgctggcatgggcggtctggcattaatcgctgagcgcctgcccatgctgtatcctgaagtgattcagcaggtttctgcgcctgtggttacctctacaacacaggaaaaaccaaaagattcagaccagttcgagtgggttacaattgaacagtcaggcgagttagtgtatgaagctcccgagactgtcgccgctgagccgcctcccatcaagtcagcagtgcagactatgtcaccaattccagctcactctctggccgctttcggtctgttcctgcggttacctgggtatgcggaagtactgcttaaagaaaggaagcacgcccaatgcctgcttcgtttggtgttaggtgtgactgacgatggtgaaggttcacacattttgcagagcccctcagccaacgtgctgcctactttaccgtttcatgtactgcgcagtctgttctccacaacgccgctgactacagatgatggcgtgctcctgcgaaggatggctttggaaatcggggcattgcacctgatcctggtctgtctctccgcactgagccaccacagtcctcgagtaccaaattccagtgtgaatcagacagaaccccaagtgtcttcatctcataatccaacgtcgaccgaggaacaacagctgtactgggccaagggtaccggatttggcactggctctaccgcgagtggctgggatgttgagcaggccctcaccaagcagaggctggaggaagagcacgttacctgcttgctccaagtgttggcctcatacattaatcccgtgtcttccgcagtgaacggcgaagcccagtcaagtcatgaaacccgaggccagaacagtaatgcattacccagcgtactcttggaactgctctctcagagttgtttaatcccagccatgtcctcatacctcagaaatgacagcgttcttgacatggccaggcatgtccctctgtatcgagcactgctggaactgttacgtgcgattgcatcatgcgccgctatggttccactgttgcttccactgtccactgagaacggcgaagaggaggaagaacagagtgaatgccaaaccagcgtggggacgctgctggcaaaaatgaagacctgtgtggatacctataccaacagattgaggtccaaaagggaaaacgtgaaaaccggggttaaacctgatgcatccgaccaggagcccgaggggctgacgctactggtgcccgacatacaaaagacagcggagatcgtatacgccgctaccacatctttacggcaagccaaccaggagaaaaagctgggcgaatactccaaaaaagccgcaatgaagcctaaacccttgagtgtgctgaagtcactcgaggaaaaatatgtggctgtaatgaagaagttgcagtttgacacatttgaaatggtgtcggaggacgaggacggaaaactgggctttaaggtcaactaccactatatgagccaggtgaaaaacgcaaatgacgctaatagcgccgctcgagccaggcggctggcccaggaggcagttacactcagtacaagcctccctctctcctcatcgagttcagtgttcgtgagatgcgatgaagagaggttggatattatgaaggttctgatcactggcccagccgacacaccctacgcgaatggctgtttcgagtttgacgtctacttcccccaagactacccctcctcaccgccactggttaaccttgagactaccggcggacattcagtgcgtttcaaccccaacctgtataatgacggcaaagtgtgtctgagtatcctcaacacctggcacgggcgtccagaagaaaaatggaatccacagaccagttctttcttgcaggtactggtcagcgtgcagtcccttattcttgtcgcagagccctatttcaacgaacccggttacgagcggtcccggggaactcctagcggtacccaatcatcacgcgagtatgatggcaacataagacaggcaacggtcaaatgggcaatgcttgagcagatccgcaaccctagcccgtgcttcaaagaggtgattcacaaacacttttacctcaagcgagtggaaattatggctcagtgcgaagaatggatcgccgacatccagcagtatagttctgacaagagagtgggccgaaccatgagtcatcacgcagccgcattgaagcggcacactgcacagctgcgggaggagctattaaaactgccttgtcctgaaggactcgaccccgatacagatgatgcacctgaggtgtgtcgggcaaccaccggtgcggaggagacactgatgcacgaccaagtcaaaccgtctagcagcaaggaactgccttcagattttcagctttag

SEQ ID NO: 27443 - DNA, 1566 bp, synthetic construct
  misc_feature 1..1566: note = Description of Artificial Sequence: Synthetic coding sequence
  source 1..1566: mol_type = other DNA
atgagcttaagcagatctgaggaaatgcaccgcttgacagaaaatgtgtacaagacgatcatggagcagttcaatccatccctccgcaattttattgcgatgggaaaaaattacgagaaggccctcgcaggcgttacctatgcggcaaaaggttacttcgacgccctcgtcaaaatgggtgaactcgcctcagaaagccaggggtccaaggagctgggtgacgtgttgttccagatggctgaggtgcatagacagatccagaaccagcttgaggaaatgctcaagtctttccataacgaattactgacacaattggaacaaaaagttgagctggactccagatacctcagcgccgcactgaagaagtaccagaccgagcagcgctctaaaggagacgcactggacaaatgtcaggctgaattaaaaaaacttcgcaaaaaatcacagggctccaaaaatcctcagaaatactctgacaaagaactgcagtacatcgacgccatatctaataagcagggagagcttgagaattatgtaagcgacggctataaaaccgccctaacagaagagcgtaggagattttgttttctggtggaaaaacagtgcgctgtggccaagaacagcgctgcctatcattccaagggtaaagagcttctcgcccagaagctgcccctgtggcagcaagcctgtgccgatcccagcaagatccccgaacgggctgtgcagttgatgcagcaggttgcatccaacggagctaccctaccatccgcactgagtgcctctaagtccaacctggtcatctctgatcctatcccgggagcaaaaccactgcccgtccccccagaactcgcaccgtttgtgggacgcatgtcagctcaagagagtacaccgatcatgaatggcgtgaccgggcctgacggggaagattatagcccatgggctgacaggaaagccgctcagcccaagagcctaagcccgcctcagagccaaagtaaattgtccgatagctactctaacacactgccagttcgaaaaagcgttacacccaagaatagttatgctaccactgaaaacaaaacccttcccagaagttccagcatggcggctgggctagagagaaatggcaggatgcgagtgaaagccatcttctcacacgccgcaggcgataacagcacactgctgagctttaaggagggggatctgattactctgctggtccccgaggcaagggatgggtggcactatggcgagtctgaaaagactaaaatgcgcggatggtttccattttcatatacgagggtgctcgattcagatggcagcgacagattacatatgtcactccagcagggaaaatcctccagcacaggtaatctgttggataaagacgacctggcaataccacctccggattacggagccgcatcaagggcctttcctgcccagactgctagtggcttcaaacaacgcccatacagcgtagcggtccccgctttctctcaaggcctggacgactacggggctcgctcaatgtcatcaggaagcgggactctggtatccactgtctag

SEQ ID NO: 27444 - DNA, 1659 bp, synthetic construct
  misc_feature 1..1659: note = Description of Artificial Sequence: Synthetic coding sequence
  source 1..1659: mol_type = other DNA
atgagcttgagtcggagcgaagagatgcatcgtctcactgaaaacgtgtacaagaccatcatggagcagtttaacccatctctgagaaactttattgctatgggtaagaactacgagaaagcgttggccggagtgacctacgccgcaaaaggctacttcgatgccctggtaaaaatgggagaactggcctcagaatctcagggtagcaaagaattgggggatgtgctgttccagatggcggaggtacaccggcaaatccagaatcagttggaggagatgctgaagagctttcacaatgagctgctgacccagctcgaacaaaaggtggagctggattcgcggtacctttcggctgctctgaaaaagtatcagaccgaacagcgttctaaaggggatgcgttggacaagtgccaggctgagctgaaaaagttaagaaagaagtctcaaggctccaagaacccccagaaatattcagataaggaactccagtatatagacgcgatctccaacaagcaaggcgaactcgagaattacgtttccgatggttacaaaaccgcgctgaccgaggaacgcagaaggttttgctttcttgttgagaagcagtgtgctgtggctaagaactcagctgcctaccattcaaaaggcaaagagctcctcgcacaaaagctgcctctgtggcaacaggcttgtgccgacccgtccaagatccccgagcgcgcagtccaactgatgcagcaggtggctagcaatggcgctacactcccctcagctctcagtgcctcaaagtccaacctcgtgatctcagaccctatacccggagcaaaaccactccctgttccacctgagctcgcccctttcgttggcagaatgtccgcacaggaaagcaccccaattatgaatggagtgaccggacccgacggggaggattatagcccttgggccgaccgcaaagccgctcagcctaagagcttgtctcctcctcaaagtcagagtaagctgtcagactcttatagtaacacactaccagtgcggaagtctgttaccccaaaaaactcctacgctacaacggaaaacaagactttgccccgttcgtcttctatggctgcaggactagaacgaaacggtcgaatgcgagtcaaagctatcttttcgcatgccgctggtgacaactcaaccttgttaagctttaaagagggcgaccttattacactcctggtccccgaggccagagacgggtggcactacggcgagagcgagaagacaaaaatgcggggatggtttcccttttcatacacgagagtgcttgattcagatggcagtgataggcttcacatgagcctccagcaaggtaagtcaagctccacgggcaatctgcttgataaagacgacctcgccatccctcccccagattacggcgcagccagccgtgcgtttccagctcagaccgcttccggattcaagcagaggccatacagtgttgccgtccccgcattcagccaaggcctggacgactacggtgcacggtccatgagtcggaacccattcgcccatgtgcagttaaagcccacggtgactaatgacagatgcgatctttcagcccaaggtcctgagggcagagaacatggggatggtagcgctagaaccctggccggaagatag

SEQ ID NO: 27445 - DNA, 1371 bp, synthetic construct
  misc_feature 1..1371: note = Description of Artificial Sequence: Synthetic coding sequence
  source 1..1371: mol_type = other DNA
atggccgaagtgcaccggcaaatccaaaatcagctggaggaaatgctgaagagctttcataatgaactcctgactcaattggaacaaaaggtggaattggattcacgttacctgtccgccgcactgaagaagtaccagacagagcagagaagtaagggagatgctctcgataaatgccaggccgaactgaaaaagctccgaaagaagtcacagggatcaaagaacccgcaaaagtactcagataaagagctccaatacattgatgccatatcaaacaagcagggagaactggaaaactacgtgagtgatggctataagaccgccctgacagaagaaaggcgccgtttctgctttttggtggaaaagcagtgtgcagtggcaaaaaatagtgccgcataccactcgaaaggcaaggagctgctggcccagaaactgcccctgtggcagcaggcttgcgctgatcctagcaaaattcccgagcgcgcagtgcagctcatgcaacaggtggcctccaatggggcaacactgccaagtgccctgtctgctagcaagagcaatctagtgatcagcgatcctatacccggagcaaagccattacctgtcccacctgagctggcgccatttgttggcaggatgtccgcccaagagagtacccccatcatgaatggcgtgaccggcccagacggcgaggattacagtccttgggcagacaggaaggcggcacaaccaaaaagtctgtccccccctcagagtcagtctaaactcagcgacagctatagcaacacactccccgtccgaaaaagcgtgaccccaaagaactcatacgctacaactgagaacaaaaccttaccgagatcgtctagtatggctgccggtttagagcgcaacgggcgaatgagggtcaaagccattttcagccacgccgcaggtgataacagtaccctgttgtccttcaaagagggtgaccttattaccctgctggttcctgaggcacgagacggttggcactacggcgagtctgaaaaaaccaaaatgcgcggatggtttcctttcagctatacccgcgttctcgactcagatgggtcagatcgcctccatatgtctcttcagcaggggaaaagttcatctaccgggaacctgctcgacaaagacgatctagccatccctccccctgattacggggctgcatcccgggcattccctgcccagacagcctcaggcttcaaacagcgcccatactctgttgctgtacccgctttttctcagggtctcgacgactacggagcgcgatctatgtcgagaaatccctttgctcatgtacagctgaagccaaccgtcacaaatgacaggtcagccccattgctgtcctag

SEQ ID NO: 27446 - DNA, 1128 bp, synthetic construct
  misc_feature 1..1128: note = Description of Artificial Sequence: Synthetic coding sequence
  source 1..1128: mol_type = other DNA
atgttacttcctgagggacagcggcagagggccctgggttttgggaccgtgacatcgacttattctcccgtggggcagtatattgacgccatctcgaacaagcagggcgagctggaaaactacgtgagtgacgggtacaagactgcccttaccgaggagcgtaggcggttttgcttcctggtggagaagcagtgcgcagtcgcaaagaattccgccgcttatcactcaaagggaaaagaattactcgcccagaaattgccactctggcagcaggcctgcgcagaccccagtaagattcctgagcgtgcagtgcagttgatgcaacaggtggcctccaatggcgctaccctaccttccgcgctcagtgccagcaaatccaaccttgtcatcagtgatccaattccaggcgctaagccgctgcccgttccacccgaacttgcacctttcgtgggaagaatgagtgcacaggaaagcacacctatcatgaatggagtcacaggccctgacggcgaggattactcaccgtgggcggatagaaaggcagcccagcctaagtcgctgtcaccgcctcaaagtcagtccaagctgtcagacagctattccaacactctgcctgtccgcaagtcagtgacgcccaagaactcttatgccactaccgaaaataaaacgctcccaaggtcttcctctatggcagctggtcttgagaggaacggacgcatgcgggtcaaagcaattttttctcatgctgctggcgataatagcaccctgttaagttttaaggaaggggacttgatcacccttcttgtccccgaggccagggacgggtggcactacggggagagcgaaaaaacaaagatgagaggctggtttcccttcagctacactagagtgcttgacagcgatggaagcgatcgcttgcatatgagcctgcagcaaggtaaatccagttcaactggcaacctcctcgacaaagacgacttggccatccctcctcccgactacggggcagcttcgcgcgcatttcctgcccagaccgcctccggctttaagcaacgaccatactccgtggccgttcctgcattttcccagggcctggacgactacggcgctcgatcaatgagtcggtag

SEQ ID NO: 27447 - DNA, 1605 bp, synthetic construct
  misc_feature 1..1605: note = Description of Artificial Sequence: Synthetic coding sequence
  source 1..1605: mol_type = other DNA
atgtccctctccaggagcgaagaaatgcacagactgacagagaatgtatataaaaccataatggaacagtttaatccttcactgagaaattttatcgccatgggaaaaaactatgaaaaggcactggctggagttacatacgccgctaagggatatttcgatgcgctcgtcaagatgggagagctggcctccgagagtcaggggagcaaggaactcggtgatgtgctgtttcagatggctgaggtgcacagacagattcagaaccagctggaagagatgcttaaatccttccacaatgagcttctgactcagctcgagcagaaggtagagcttgattctaggtatctgtccgcagcgcttaagaaatatcagacagaacagagatccaaaggtgacgcactcgataagtgtcaagctgagcttaaaaaactacgcaagaagagtcaaggcagtaaaaacccacagaagtattctgataaagagctgcagtatatcgacgccatcagcaacaagcagggagagctggaaaattatgtatcagatggttacaagaccgccctgacagaggaaagaagacgattctgttttctcgtcgaaaagcagtgcgccgtcgccaagaattcagccgcataccactctaagggtaaggagctgctggcccagaagctcccactgtggcagcaggcttgtgccgaccctagcaagatacccgagcgggctgttcaactgatgcagcaagtggcaagcaatggggctacattaccaagcgcgctctccgcctctaagagcaacctcgttatttcagaccccatccccggagctaagccactcccagtgccgcctgagctcgcccctttcgtcggtcgcatgtctgctcaggagagtacacctatcatgaatggtgttaccggcccagacggcgaggactactctccgtgggccgatcgcaaggccgctcagccaaagtcactgagcccaccccagtcccagtccaaactgtcagattcctattccaatacactgcctgtgcgaaaatcagtgacccctaagaacagctatgctactacagagaacaagacactgcctaggtcatctagcatggctgccggtttggaacggaacggtcgcatgcgcgtcaaagccatcttctctcacgcggctggtgataacagcacactccttagtttcaaggagggagatcttatcacgttgcttgttccagaagcacgagacggatggcattacggggagtctgaaaagaccaaaatgagagggtggtttccattctcatatacacgtgtcttggacagcgacggcagtgaccggctacatatgtccttacaacagggaaaatccagttccaccggcaatcttctggacaaggatgatcttgcaatccctccgcctgattatggcgcagcttcgcgggctttcccagctcagactgcatccggatttaagcagcgtccctattcagtggctgtcccggcattttcccagggtctggacgattacggcgcaaggtctatgtcccgtaatccctttgcccacgtgcaacttaaaccgactgtcacaaatgataggtctgctcccctcctctcttag

SEQ ID NO: 27448 - DNA, 1563 bp, synthetic construct
  misc_feature 1..1563: note = Description of Artificial Sequence: Synthetic coding sequence
  source 1..1563: mol_type = other DNA
atgagtttgagtcggtctgaggagatgcatcgcttaacagaaaacgtgtataaaactatcatggaacagtttaatccctcattgcggaactttattgccatgggcaagaactacgaaaaggcgttggcaggagtgacttatgccgctaagggctattttgacgcccttgtgaaaatgggagagttagcaagtgaaagccaggggagcaaggagcttggcgatgtgctgttccagatggcagaagtccatcgtcagatccagaatcagctggaggagatgctgaaatcattccataacgagctgctgacacaattggagcagaaagtggaattggacagccggtatctgtcggccgctctcaaaaagtatcagactgaacagagatcgaaaggggatgcacttgataagtgtcaggctgaactcaaaaagctccgcaaaaagtctcagggttctaaaaacccacagaagtatagcgacaaggaactgcaatacattgacgctatcagcaataagcaaggcgagctcgagaattacgtgagcgatgggtacaaaacagctttgaccgaggaaaggaggaggttttgctttctggtcgaaaagcaatgtgctgtggccaagaacagcgccgcatatcattctaaaggaaaggaactcttggcccaaaagttgccactgtggcaacaggcttgtgctgatccttccaagatccccgagcgcgctgtacagctgatgcaacaggttgctagtaatggggcaacgctccctagtgcactgagcgcctcaaagtcaaacctcgtcatttcagatcctatccccggagcaaaaccactcccagtgccacctgagctcgcaccattcgtgggtcgtatgagcgcacaggagtcaactcctattatgaatggcgtaacgggtcctgatggcgaggattacagcccttgggctgacagaaaggctgcacagccaaagtctctttctccaccgcagtcacagagcaagctgagtgatagctactccaacactttgcctgtgcgaaagagcgtgaccccaaagaactcctatgctaccactgaaaacaaaactctgcctcgtagctcctctatggccgctggcctggagcgtaacggacggatgcgggtgaaggccattttttcccacgctgccggagataactccacgctgctgtctttcaaggaaggcgacctgatcacgctactggttccggaggccagggacggctggcattatggagagtccgaaaagactaagatgaggggctggtttcccttcagttacacccgggtgctcgattcagacggcagcgatcggctccatatgtccctccagcaagggaaatctagcagcacaggcaacctgcttgataaagacgacttagcaatacccccaccggactatggcgctgcctcaagggcctttcctgctcagacggcttctggattcaagcaaagaccctatagtgttgccgtgccagccttttcacaaggcttggatgattatggagccagaagcatgtcttctgcagacgtggaggttgcaagattttag

SEQ ID NO: 27449 - DNA, 720 bp, synthetic construct
  misc_feature 1..720: note = Description of Artificial Sequence: Synthetic coding sequence
  source 1..720: mol_type = other DNA
atggcccacgcaggacggactggctacgataaccgtgagattgtgatgaaatatatccactacaagctgagccagagaggatatgagtgggatgccggtgacgtgggagccgcacctccaggggctgcacctgcccctggcatcttctcttctcagccaggacataccccccaccccgcagcgtcacgtgaccccgtcgctcgtacatcgccactgcagacgccagctgctccaggcgcagccgcaggacccgctctgagcccggttccgcctgtggtgcatctgacgctgaggcaggccggagacgacttctcaaggagatataggagggactttgctgagatgagctcccagttgcacctcactccattcaccgctcggggtagatttgccacagtagtggaggagttgtttcgcgatggtgtgaactggggcagaattgtggcgtttttcgaatttgggggagtgatgtgcgtggagagcgtaaatcgcgagatgtccccactcgtcgacaatatcgctctgtggatgaccgagtacctgaacagacacctccacacgtggattcaagacaatggcggttgggacgcattcgtggagctatatggtcccagtatgaggccactattcgatttttcatggctgagcctgaagaccttattatccctggccctggtgggcgcatgcatcacccttggagcttaccttggccataagtag

SEQ ID NO: 27450 - DNA, 720 bp, synthetic construct
  misc_feature 1..720: note = Description of Artificial Sequence: Synthetic coding sequence
  source 1..720: mol_type = other DNA
atggcccacgccggacggacaggatatgataatcgagagattgtgatgaaatatatccactataagctttcccagaggggatacgaatgggatgccggagatgtgggtgccgctcccccaggagcagcgccagctccgggtatctttagttctcagcccggacataccccacatccggcagcaagtcgcgacccggtcgcccgaactagcccacttcagacacccgcagcgccaggagccgctgctggacctgcgctctccccggtcccacccgtcgtgcatttaacactaaggcaagctggcgacgatttctcgcgacgctaccgaagagatttcgccgaaatgtcctctcaactccacctcacaccctttacagctagaggcagatttgctaccgtggtcgaagaactgttccgggacggagtgaattggggacggatcgtcgcctttttcgaatttggcggtgtaatgtgcgtggagtcggtgaaccgcgagatgtcgccactggtggacaacatcgcactctggatgaccgagtacctcaacaggcacctccacacctggattcaggataacgggggttgggatgctttcgtggagctgtacggtccttctatgagaccgctctttgatttttcatggcttagtttgaagacacttctgtccttggctctcgttggagcctgtataaccctcggcgcttatttaggccacaagtag

SEQ ID NO: 27451 - DNA, 618 bp, synthetic construct
  misc_feature 1..618: note = Description of Artificial Sequence: Synthetic coding sequence
  source 1..618: mol_type = other DNA
atggcacacgccggacggactggctatgataatcgagagattgtcatgaagtatatccactacaagctgagtcagaggggatacgaatgggatgctggtgacgtcggggctgctccccctggcgctgccccagccccaggtatcttctctagccaacctgggcatacgcctcacccagcagcttctcgcgaccctgtggccaggaccagccctctgcaaacccctgccgcaccaggagctgccgcaggccctgctttatctcctgtgccacccgtcgtgcatcttacactgcgccaggccggagatgacttctctcggaggtatcggcgagactttgcagaaatgtctagtcaattgcacctgacaccattcacggctagaggcagatttgcaacagtcgtagaagagctgtttcgggatggcgtgaactggggcaggattgtcgccttcttcgaatttgggggagtgatgtgtgtggagagcgtgaacagagaaatgagcccgctcgtcgacaatattgctctttggatgacagaatatctgaaccgacacctgcacacatggatccaggacaacggcggatgggtgggagccctgggcgatgtctccctgggctag

SEQ ID NO: 27452 - DNA, 1578 bp, synthetic construct
  misc_feature 1..1578: note = Description of Artificial Sequence: Synthetic coding sequence
  source 1..1578: mol_type = other DNA
atgaaggcccttattgctgccctgctgcttataactttgcaatacagctgcgctgtttcacctaccgactgcagcgctgtggaacccgaagccgaaaaagcattggatctcatcaacaagcggagacgtgacggctatctttttcagcttcttcggatagctgacgcacacttagaccgggtggagaataccacagtctactatttggtgctggatgtgcaggagtcagactgctccgtgttaagccgcaaatattggaatgactgtgagccccctgatagcagaaggccgagtgaaatcgtgattggtcagtgcaaggttatcgccacacgacattcacatgagtcacaggacctgcgcgtcatcgacttcaactgtacaacgagctccgtatcctcagcgctggcaaatacaaaggactcgccagtgctgattgacttctttgaggacaccgagaggtaccggaagcaggctaacaaagccctcgagaagtacaaagaagagaatgacgatttcgcaagctttcgggtcgacaggattgagagagtggcccgtgtaaggggcggagaaggcacaggctactttgtcgatttttccgtccggaactgtcctaggcatcacttcccgagacatccaaatgtcttcgggttctgtcgggctgatctgttctatgacgtggaggcacttgacctagagtcgccaaaaaatctggtgattaattgcgaagtcttcgatcctcaggaacatgagaacattaacggcgtgccaccccacctgggacatccttttcattggggagggcatgagcgtagctccactaccaagccaccatttaaaccccatggcagcagggatcaccaccatccccataagccccacgaacatgggccacctccaccgccagatgagcgggatcactcccacggaccccctctgcctcaaggccctccccctctgctgcccatgtcttgctcatcatgccagcatgccactttcggtaccaatggtgcccagaggcacagtcacaacaataatagctccgacttacatccccataaacatcacagtcacgagcagcatccccatggtcaccaccctcacgcccaccacccacatgaacatgacacgcatagacagcatcctcatggacatcacccacacggtcaccacccccacgggcaccaccctcacggtcatcatccgcacggacaccacccccattgccatgacttccaggactacggcccatgtgaccctccccctcacaaccagggacactgttgccatggacatgggcctcctccaggccatcttcgaaggcgaggccctggcaaagggcctcgccctttccattgtcggcagatcggatccgtctatcgcctgcctccattgcggaagggtgaggttctgcccttgccagaagcaaattttccctcattccccttaccgcaccacaagcatccattaaagccagacaatcagccctttccgcaatccgtgtcagagagttgtcccggtaaatttaaaagtgggtttccacaggtgagcatgttcttcacgcatacgttcccaaagtag

SEQ ID NO: 27453 - DNA, 2121 bp, synthetic construct
  misc_feature 1..2121: note = Description of Artificial Sequence: Synthetic coding sequence
  source 1..2121: mol_type = other DNA
atggcctctccagcagattcttgcattcagttcacgcggcatgccagcgacgtactgttgaatctcaatcggctccgctccagagacatactaactgacgttgtcattgtagtgtctcgggagcaattcagagcacataaaaccgtcctaatggcctgctcgggtctgttctactcaatttttaccgaccagttaaaatgtaacctgagcgtgattaacctggacccggaaatcaacccagagggtttctgcatcctgcttgatttcatgtacacttcccgacttaatcttcgggagggaaatattatggcggttatggccaccgcgatgtacctgcaaatggaacatgtggtggatacatgtcggaaattcataaaggcaagtgaggccgagatggtgtccgctatcaaacctcccagggaagaatttctaaactctcggatgctgatgcctcaggacattatggcatatcggggtagagaggtggtcgagaataacctgcccctccgctccgccccaggatgcgagagcagagcctttgctcccagtctgtactcgggcctgtccactccccctgcttcttattcaatgtactcccatcttcccgtaagttctctactctttagcgacgaagagttccgcgacgttagaatgcctgtggcaaaccctttcccaaaagaacgagccctgccctgcgactcggctagaccagtgccaggtgagtactcccggcctaccctggaagttagtcccaacgtttgccactctaatatctacagccctaaagaaaccattccagaggaagctcggagcgacatgcactattcagttgctgagggcctcaagcccgcagcgccttcagcgcgtaatgctccttactttccctgcgacaaagcttccaaggaggaggagcgaccctctagtgaagacgaaattgcccttcactttgaacctcccaacgcgcctctgaacaggaaaggattggtatctcctcaatctccccagaaatccgattgccagccaaattcgcccactgaaagttgttcttcaaaaaatgcttgcatactccaggcctcagggtcaccccctgctaagagccccacagatcctaaggcatgtaactggaaaaaatataaattcatcgtactcaactcactgaatcaaaacgcaaaacctgaaggacccgaacaagccgagctgggtcgcctctctcctagagcatacacagcccctcccgcatgtcaacccccaatggaacccgagaacctagacctacagtcccccaccaaactgagtgcctccggggaggactctaccattcctcaggctagtcgtcttaataacattgtaaatcgctcaatgactgggagtcccagaagttcctctgagagtcactcacccctgtacatgcatccacccaaatgcacatcttgtggctcacagtctcctcagcacgccgagatgtgtttacataccgctggaccaaccttccccgaagagatgggagagactcagagcgaatatagtgacagttcctgcgagaacggagctttcttctgcaatgagtgcgattgccggttctctgaggaggcttctttaaagcgacacacattgcagactcactccgataaaccttacaagtgtgaccgctgccaggcatcattccgttataagggaaatcttgcatctcataaaaccgtccatacgggtgaaaagccataccggtgtaacatatgcggggctcagttcaaccgccctgctaatctgaaaacacacacacggatccactcaggggaaaaaccctataagtgcgaaacgtgtggcgcaagattcgtacaagtggctcatctgcgcgctcatgtgcttatccacaccggggaaaagccatatccctgcgagatttgcggcacccggttcagacatcttcaaaccctcaaatcccacttgcggattcacactggggagaagccttaccactgtgagaaatgcaatttgcattttcggcacaaatctcagctccggctacaccttcgacagaagcatggggcaatcactaatacaaaggttcagtacagggttagcgcgactgatctgccccctgagctgcccaaagcctgttag

SEQ ID NO: 27454 - DNA, 369 bp, synthetic construct
  misc_feature 1..369: note = Description of Artificial Sequence: Synthetic coding sequence
  source 1..369: mol_type = other DNA
atggctagtcctgcggacagttgcatccagtttacacggcatgctagtgacgtgctcctgaaccttaatcgcctgagatcaagagatattcttactgatgttgtgattgtggttagcagggagcagttcagggcccataagaccgtgcttatggcttgttctgggctgttttatagcatcttcactgaccagttgaagtgcaatctgtctgtgatcaatttggatcccgaaatcaatccagaaggcttctgcatcttgctggactttatgtatacaagccggcttaacctgagagaaggcaacatcatggcggtaatggctacagcaatgtacctgcagatggaacatgtggtcgacacctgccggtag

SEQ ID NO: 27455 - DNA, 315 bp, synthetic construct
  misc_feature 1..315: note = Description of Artificial Sequence: Synthetic coding sequence
  source 1..315: mol_type = other DNA
atggccagccctgcagactcttgtatccagtttaccagacacgcgtccgatgttctccttaatctcaaccgcttacgcagccgcgatatattgacagatgtggtgatcgtggtctctcgagagcagttccgggcacacaagacagtgctgatggcatgtagtggactcttctacagtatattcaccgaccagctcaaatgcaatttatccgtcatcaacctcgaccccgagatcaacccggagggattttgcattttgctggactttatgtacaccagtcgactgaatctgcgcgaggggaatataatggcgtag

SEQ ID NO: 27456 - DNA, 1953 bp, synthetic construct
  misc_feature 1..1953: note = Description of Artificial Sequence: Synthetic coding sequence
  source 1..1953: mol_type = other DNA
atggctagccctgccgattcctgcatccaattcacgcgtcacgcgagtgatgtcctacttaaccttaaccgcctgcgtagcagagacatcctgactgatgtcgttatcgtggtgtcccgcgaacagttccgggctcataagacggtcctcatggcctgttctgggctcttttactcgatattcacggatcagctgaaatgtaacctatctgtaataaacctcgatccagaaataaatcccgagggcttttgcatccttttggacttcatgtataccagcaggctgaatctaagagaaggtaatattatggcagtaatggctactgctatgtaccttcagatggagcatgtagtggacacgtgcagaaaattcataaaagcaagtgaagctgagatggtgagcgccataaagcctcctcgcgaggagtttctgaatagcagaatgctgatgcctcaggatatcatggcttatcgagggagagaagtggtggagaacaacctcccgctgcggtcggcccctggatgcgaatctagggcctttgcccctagtctctacagcggcttgtcaactccgcctgcatcttactccatgtactctcatttgcccgtcagctctctcctgttcagtgatgaggagtttagagatgtccgcatgcccgtggctaatccctttcccaaggaaagggccctgccatgcgattccgccaggcctgtgcccggagagtatagccgtccaactttagaagtaagcccaaatgtgtgccacagcaatatctactctcctaaggagactatccctgaggaggcccgatccgacatgcattatagcgtggcggaaggcctgaaaccggctgccccttcagccaggaatgctccctacttcccttgtgacaaagcttctaaggaggaggagcgcccatcgagcgaggacgaaatagcgctccactttgaaccgcctaatgcccctctcaatcgtaagggcctagtgtcacctcagtcaccgcagaaatcggactgccagccaaactcccctaccgagtcttgctcttctaagaatgcatgtattcttcaagctagtggatctccccctgctaagagtcctacggaccctaaggcctgtaactggaagaaatacaaatttatcgtgctcaattcccttaatcagaacgctaaacccgaaggacccgagcaagccgagctaggacgcctgagtcctcgggcatacaccgctcccccagcgtgccagccccctatggagcctgagaatctggacctgcagtctccaaccaagctttccgctagcggcgaagactccacgatcccccaggcctctcggttgaacaatatcgtgaataggtctatgactgggtcgccccgatctagtagcgagtctcacagccctctgtacatgcaccctcccaaatgtacctcatgtggcagccaaagtccccagcacgcagagatgtgtctgcatacagccggtccaacctttccagaggaaatgggcgagacacagtccgagtattccgatagttcttgcggtgaaaagccctatagatgcaacatttgtggcgctcagtttaatcgcccagccaacctcaaaacacatactaggatccattcaggtgagaagccatacaaatgtgaaacctgtggagccagattcgtgcaggtggcacatttgagggcacatgtgttgatacatacaggggagaaaccgtatccatgcgaaatctgcgggaccagattccggcatctccagacactcaagtcccacctgcgaatacacaccggtgaaaaaccataccattgtgaaaagtgtaacctccactttcgccataagtcgcagctgcgactgcacttgcgtcagaagcacggagccataacgaacactaaggtccagtaccgggtttccgctaccgatctgccccctgagctgcccaaggcatgttag

SEQ ID NO: 27457 - DNA, 306 bp, synthetic construct
  misc_feature 1..306: note = Description of Artificial Sequence: Synthetic coding sequence
  source 1..306: mol_type = other DNA
atgaagtttgggatgggctccgctcaggcgtgcccttgccaggttcctagggccgcttccaccacatgggtgccgtgccaaatttgcgagacaaggggcgctgcagctgccccacctttgacccttgaaggtcctgtgcagtcgcatcatgggacccctgccctgacacagggaccacaatcccctcgggatggggcacagctgggggcttgcacccgccctgtcgatgtcagggacagcggcggaagaccactacctcctcccgacaccctcgcgagcgctggagacttcctctgtaccatgtag

SEQ ID NO: 27458 - DNA, 396 bp, synthetic construct
  misc_feature 1..396: note = Description of Artificial Sequence: Synthetic coding sequence
  source 1..396: mol_type = other DNA
atgaaattcggcatggggtcggcgcaggcttgtccctgccaggtaccccgagccgcatctactacatgggtcccatgccagatctgtgggcctcaaccaagcctttcccttgctgagcagcatctagagtcccctgtcccatctgctccaggggctttggcgggtggacccacccaagccgctcctggggtccgaggcgaagaggagcaatgggccagggagatcggagctcagctcagacgaatggcagatgaccttaatgctcagtatgaacgcagaaggcaggaagagcagcagaggcacaggccatctccctggagagtgctgtacaacctcatcatgggactgcttcctcttccaaggggccaccgggctcccgaaatggagccgaattag

SEQ ID NO: 27459 - DNA, 582 bp, synthetic construct
  misc_feature 1..582: note = Description of Artificial Sequence: Synthetic coding sequence
  source 1..582: mol_type = other DNA
atggcaagggcacgacaagagggctcctcccccgaaccagtcgagggcttggcgcgagacgggcctcgtccttttcccctaggaaggctagtcccttccgccgtctcgtgtggtctatgtgaaccgggactggccgcagcccctgcagctcctaccctgctacccgcagcctatctgtgtgccccaacagcgccacctgctgtgacggccgctcttggcggatccaggtggcccggtggcccaagatcgcgccctagagggccaagaccggacggccctcagccttcactgagcttagccgagcagcacctagagagtccagtgccttctgcacccggagccctcgctgggggacccacacaggctgcaccaggggtgcgaggcgaggaagagcagtgggcacgggagatcggtgctcaacttcggcgaatggccgacgacttgaatgcccagtatgagcgacggcgtcaggaagagcagcagcggcatagaccaagcccctggagagttctgtataatctaattatgggcttactgcctctcccccgtggccacagggctccggaaatggaaccgaattag

SEQ ID NO: 27460 - DNA, 786 bp, synthetic construct
  misc_feature 1..786: note = Description of Artificial Sequence: Synthetic coding sequence
  source 1..786: mol_type = other DNA
atgaaattcggaatgggctcagcccaggcctgtccgtgtcaggtgcctcgtgccgctagtaccacctgggtgccgtgtcaaatttgcggcccaagggagcggcacggccctcgtactcctggcggtcagttacccggtgcacgcagagggcctggacctagacgccctgccccactgcctgccagacctccaggggctctggggtccgtgctgcgacccctacgagcgaggcccggatgtcgccctagacggcctcatcccgcagctagatgcctgcccctgagacctcatcgcccaacaaggcggcatagacgccctggaggatttcccctggcttggggaagtccgcagcccgcaccacggccagctcctggcaggagttccgcgctcgcactggcgggtggggcagcccctggagttgcccgtgcacagcggcctgggggtagtggaggtcgatctcacccaggcggtccaggctccccaaggggaggtggcaccgtggggccaggggatcgcggacccgctgccgcagacgggggacggcctcagcggaccgtgagggccgcagaaacgcgcggagccgcagccgctccccctctgacactggaaggccctgtgcagtcacaccatgggacccccgctctgacacaaggaccgcagagtccacgtgacggcgcacaattaggggcatgcacaagacccgtggatgtccgcgactccgggggtcgccctctgccgcctcctgacactctcgctagcgccggtgactttctgtgcacaatgtag

SEQ ID NO: 27461 - DNA, 1308 bp, synthetic construct
  misc_feature 1..1308: note = Description of Artificial Sequence: Synthetic coding sequence
  source 1..1308: mol_type = other DNA
atgctctgcggcttccaggaggatgccacgcctcctcctcctccgaggcctcgacgattacaccggagattgccgagacccgaagaggtcggtatgctgagtctgcctcccggattgctcactgtgtccggctcggcagccgcagccgatgcagtgccactgagacctggcgactgggcaggcgtgtctactgcagacaggggagaacgggctccactcgggcctgccttctgtgacctcgcggtctcacctaccagtcccgcttggcgcggagaagaggacgaaggcgctaaagcatcttctggggacattgggagcctcgattatcaggagttcgtcgtggacattgagtctcggctgcgtatggaaggagtggagcttaaagaggaatggcaggacgaagattttccaatccctctccccgaggatgacagcattgaggccgacattctcgcaataaccgggccagaagatcaacctgggtccctggaagtgaacggcaataaagtgcgcaagaaactcatggctccggacatcagcctgacattggacccttctgacgggagtgtgctgtctgatgatctggatgagtccggagaaatcgatctagacgggctcgatactccttcagaaaattctaatgagttcgagtgggaagacgacctgccgaaaccaaagaccacagaggtcatcaggaaagggtccattactgagtacactgctgctgaagagaaggaggacggaaggagatggcgtatgtttcgtatcggtgagcaagaccatagggtagacatgaaagcaattgagccatataagaaggttatttctcatggcggatactatggggatggactgaacgccatcgtggtttttgccgtgtgtttcatgccagagagttcgcagcccaactacaggtacctgatggacaacctattcaagtatgtgatcggcactctcgaattactggtcgcagagaactatatgattgtgtatttaaacggagccaccacgcggagaaaaatgccctcactgggctggctgcgcaagtgctaccagcaaatcgatcgacgtctgcggaaaaatttgaagtctctgattattgtgcatccatcgtggtttatcaggaccctcctggcggtcactaggcccttcatcagctctaagttctctcagaaaattcgctacgtgttcaacctcgcggaacttgcagagctcgtccccatggagtacgtgggaattccagaatgcattaagcaggtcgaccaggaactgaacggcaagcaggacgagcccaagaacgagcagtag

SEQ ID NO: 27462 - DNA, 1131 bp, synthetic construct
  misc_feature 1..1131: note = Description of Artificial Sequence: Synthetic coding sequence
  source 1..1131: mol_type = other DNA
atggagccctgccccagcagtgctcccccacctttttaccctggagtgggcgaagtagcaggccttcgttggttctccatctacgaccagcgcccaagttggtatcggacgaagaaactcggcctccttgacatcggcagcctggattaccaggagttcgtagttgacatagaaagtcggctccgcatggagggagtggagctcaaagaagaatggcaggatgaagacttcccaatccctctgcccgaagatgatagcattgaagcagatatcctggccatcactggccctgaggaccagccaggctcattggaggtaaacggcaataaagtgagaaagaaactgatggctcctgacatcagcctcacacttgacccatctgacggctctgttctctccgatgacctcgacgagtcaggtgagatcgacctggacggtttagacactccctctgaaaattcaaatgaattcgaatgggaagacgatctgcctaaaccgaagacgacggaggtgattcggaaaggcagcatcactgaatatacggctgcggaagagaaggaggatgggagaaggtggcggatgttcaggataggtgagcaagaccatagagtggacatgaaggcaatcgagccttacaagaaggttatatcccatggaggatactatggcgatggacttaacgccatcgttgttttcgcagtgtgttttatgcctgagtcaagccaacccaactaccggtatcttatggacaacctgtttaaatacgtgatcggaaccctggaattgctggtggcagagaactatatgatcgtctatctaaacggtgctactactcggagaaaaatgccttcactggggtggcttcgaaaatgctatcagcaaattgaccggaggctgcggaagaacctaaaaagtttgataatcgttcatccttcatggttcattcgtactctgctggccgtgacccgcccttttatttcaagtaagttttctcagaagatacgatacgtttttaacctggccgaactggccgagctggttcctatggaatatgtgggcattcctgagtgcataaaacaagtcgatcaagagctaaacggcaagcaggacgaacccaagaatgagcagtag

SEQ ID NO: 27463 - DNA, 939 bp, synthetic construct
  misc_feature 1..939: note = Description of Artificial Sequence: Synthetic coding sequence
  source 1..939: mol_type = other DNA
atggccaaagtcttctcattcatccttgtaaccaccgcattaaccatgggacgagaaatatccgctttggaggactgtgctcaggaacagatgcgcttaagagcgcaggtcaggctgctcgaaacacgggtgaagcagcagcaagtgaaaatcaagcagctgttgcaggagaacgaagtccagttcctcgacaagggagacgagaacactgttattgacttgggcagcaagcgccagtatgctgattgcagcgaaattttcaacgatggctacaagttgtccgggttctataagataaaacctcttcagtcgcccgcagaattctctgtgtactgtgatatgagtgatggagggggttggaccgtcattcagcggaggtcggatgggtcagaaaacttcaataggggctggaaagactacgagaatggcttcggcaactttgtgcaaaagcatggggagtattggctggggaacaagaatttacactttcttactactcaggaggattacacacttaagatcgacttagccgacttcgagaagaacagcaggtacgcccaatacaagaacttcaaagtgggcgacgagaagaatttctatgaactaaacatcggcgaatacagtggtactgcgggagatagcttggctggaaacttccatcccgaagtgcagtggtgggcctcccaccagcgaatgaaattcagtacttgggacagggatcacgataactacgagggcaactgcgccgaggaagaccaatccggttggtggttcaaccgttgtcacagtgccaatttgaacggcgtttactacagcggcccatacacagcgaagacggataacggaatcgtttggtacacttggcatggctggtggtatagcctcaagtcagtggtgatgaagatcaggcccaacgattttatcccaaacgtaatatag

SEQ ID NO: 27464 - DNA, 660 bp, synthetic construct
  misc_feature 1..660: note = Description of Artificial Sequence: Synthetic coding sequence
  source 1..660: mol_type = other DNA
atgagctctcaccttgtggagccacctccacctcttcataacaataataataattgtgaagagaatgagcagtcactgccccctccagccggactcaatagcagctgggttgagctccccatgaattcgtccaacggaaacgataatggcaacggtaagaacggcggtctggaacacgtccctagcagctcgagcatacacaatggggacatggagaaaatcctccttgatgcacagcacgaaagtgggcaatcgtcctcacggggatcatctcattgcgactcaccatccccacaggaggacggtcagattatgttcgacgttgaaatgcacacatcaagggaccactctagccagtctgaggaggaggttgttgaaggggaaaaggaggtagaggccctgaagaagtctgctgattgggtctccgactggtcaagtcggccagagaacattcccccaaaggagttccactttcgccatcccaagcgcagcgtgtccctgtccatgcgaaagtcaggggcaatgaagaaagggggtatcttttccgcagagtttttgaaagtgttcattccatctctttttctcagccatgtgttggcgctagggctaggcatctacattggcaagcgactgtccaccccaagtgccagcacatactag

SEQ ID NO: 27465 - DNA, 540 bp, synthetic construct
  misc_feature 1..540: note = Description of Artificial Sequence: Synthetic coding sequence
  source 1..540: mol_type = other DNA
atgaacagttcaaatggaaatgataatgggaatgggaagaatggcggtctcgagcatgtgccatcttcatcctctatccacaatggagacatggaaaaaatcttgctggacgcgcagcacgagagcggacagagttcctcccgaggctcaagccattgcgactctccaagcccccaggaggatggccagattatgttcgatgtggagatgcacacctctcgggaccactcttctcagtccgaggaggaggttgtggaaggcgagaaggaagtagaggctttaaaaaaatccgccgactgggtatccgattggagctctaggccagaaaatataccaccgaaagaatttcactttaggcatcccaagcggtctgtctcactgtccatgcgtaagtcgggggcaatgaaaaagggtggcattttcagtgcggagtttctcaaggtctttattccttccctctttctctcacacgtcttggccttgggtttggggatatacatcggtaagagattaagcacacctagcgctagcacctactag

SEQ ID NO: 27466 - DNA, 540 bp, synthetic construct
  misc_feature 1..540: note = Description of Artificial Sequence: Synthetic coding sequence
  source 1..540: mol_type = other DNA
atgaactcgtcgaatggaaatgacaacggaaacggcaaaaacggcggtttggagcacgtgccttcatccagctctatccacaacggcgatatggagaaaatactgctggatgcccaacacgaatcaggccagagctcctccagggggtcatctcactgtgactcacccagtcctcaagaggacgggcaaattatgttcgacgtcgagatgcacacgtcacgcgatcacagtagtcagtccgaagaagaggtggtggagggcgagaaggaggtcgaggccctgaagaagtccgctgattgggtttcagactggagtagcagaccagagaatatccctccaaaggagttccactttcggcatcccaaaaggagcgtgagtctcagcatgaggaagtctggcgctatgaaaaaggggggaatcttctctgctgagttcctcaaggtattcattccatccttgttcttatctcacgtgctggccctgggactgggaatttacatcggaaagaggttatcgacccctagcgcctctacctattag

SEQ ID NO: 27467 - DNA, 540 bp, synthetic construct
  misc_feature 1..540: note = Description of Artificial Sequence: Synthetic coding sequence
  source 1..540: mol_type = other DNA
atgaacagctccaatggcaatgacaacggaaacgggaagaatggcggtctcgagcatgtgcccagcagctcgtctatccacaacggagacatggaaaagatcctcttggacgcccagcatgagagtggacagtcttcttctagaggcagcagccactgtgacagcccgagcccccaggaggatggccagatcatgtttgatgtcgagatgcacactagccgagatcattccagtcagtctgaggaagaggttgtagagggggaaaaagaagtggaggcgctgaaaaaaagtgcggactgggtctcagactggagttcaagacccgaaaacatccctcccaaagagttccatttccgccaccctaagagatctgtaagcctatccatgcgtaagtctggggctatgaagaaagggggtatcttctctgcggaattccttaaggtttttatcccttccctcttcttgtcccacgtattagccctgggtctgggaatctacatcggtaagagactgtcaaccccctctgcttcaacgtactag

SEQ ID NO: 27468 - DNA, 636 bp, synthetic construct
  misc_feature 1..636: note = Description of Artificial Sequence: Synthetic coding sequence
  source 1..636: mol_type = other DNA
atggcttcagggcagggacctggtccgcctaggcaggagtgcggcgagcctgctctcccttcggcttccgaagaacaagtcgcacaagatacagaagaagtttttcgctcttatgtgttttacagacaccagcaggaacaggaagcggagggagtggctgctccagctgaccccgaaatggtcaccttgcctctgcagccaagctccacaatgggccaggtcggcagacagctggcgattattggcgacgatataaatcggcgttacgacagtgaattccaaacaatgctgcagcacctgcagcctacagctgagaatgcatacgagtactttaccaaaatcgcaacatcattgtttgaatctgggatcaattggggaagggtggttgccctcctgggcttcggctacagactagccctgcacgtgtaccagcacggattaaccgggttcctggggcaggtcactcggtttgtggttgacttcatgcttcaccattgcatcgcacgttggatcgctcagagaggaggctgggttgccgcattaaacctcggaaacggcccaatcctaaacgtattggtagtgcttggggtggttcttctgggtcagttcgtagtgcggagattttttaaatcttag

SEQ ID NO: 27469 - DNA, 576 bp, synthetic construct
  misc_feature 1..576: note = Description of Artificial Sequence: Synthetic coding sequence
  source 1..576: mol_type = other DNA
atggccagcggacagggacccggtcctcccagacaggaatgcggtgaacctgctctgccgtcggcttctgaggaacaagtggcccaagacacagaagaggtcttccggagctatgttttttatagacaccagcagcagcccagttctacgatgggccaggttggccgacagttggctataattggcgacgatatcaatcggagatatgactcagaatttcagacaatgctgcaacatttacaacccacagccgagaatgcttacgagtatttcacgaaaatcgccacgtctttattcgagagcggtattaactggggcagagtcgtcgctctccttggattcggctaccggctcgctctgcatgtctatcagcacggactgacaggatttctgggtcaggttactaggttcgttgttgactttatgcttcaccactgcatcgccagatggatcgctcagaggggaggttgggtcgccgcattgaatttaggcaatggaccaatcctgaacgtcctggtagtcttaggagtggtgcttctgggtcagtttgtagtaagacgtttctttaaatcctag

SEQ ID NO: 27470 - DNA, 636 bp, synthetic construct
  misc_feature 1..636: note = Description of Artificial Sequence: Synthetic coding sequence
  source 1..636: mol_type = other DNA
atggccagtggacagggacccggtccgccaagacaggagtgtggagagccggcactgccatctgctagtgaggaacaggtggcccaggacaccgaggaagtttttagatcctacgtgttttataggcatcagcaggaacaggaggccgaaggggtcgcagctcccgcagaccccgaaatggttaccctacccctgcagccctcatcaacaatggggcaggtgggacggcagctcgctatcataggtgacgacatcaataggcggtacgactccgagtttcagactatgcttcagcacctccaacccacagcagagaacgcatatgagtactttactaaaattgcgaccagcctgtttgagagcgggattaattggggcagagtcgtggctcttctcggcttcggttaccgcttggcactgcacgtttatcagcatggtctgactggatttctggggcaagttacaaggtttgtcgtcgactttatgctgcaccactgtatagcccgttggatcgcacagcggggaggttgggttgccgctctgaacctgggcaacggcccaatcttgaatgtgctggttgtgctcggggtggtactcctgggccagttcgtcgtgcgcaggttttttaagtcctag

SEQ ID NO: 27471 - DNA, 462 bp, synthetic construct
  misc_feature 1..462: note = Description of Artificial Sequence: Synthetic coding sequence
  source 1..462: mol_type = other DNA
atggcaagtgggcagggccctggtccacccagacaggagtgtggcgaacctgccttgccatctgcatctgaagagcaggtagcccaggataccgaagaggtgtttcggtcttatgtgttctatcgccaccaacaggagcaggaggccgaaggggtcgctgcacccgcagatccggagatggtgaccctgccactacagccatcctccaccatgggccaggttggcagacagctcgcaattatcggggatgatattaatcggcgatacgacagtgaattccaaaccatgttgcagcacctgcagccaactgctgagaatgcttacgagtacttcacgaaaattgcaacccgcccagccgcaactccaacagcgtgcctcagggtggcttctattggtgccgtttggtggttgttttgggcttccgccacggtttggccttacaccagcacctcaatggcttag

SEQ ID NO: 27472 - DNA, 507 bp, synthetic construct
  misc_feature 1..507: note = Description of Artificial Sequence: Synthetic coding sequence
  source 1..507: mol_type = other DNA
atgttccagatcccagagttcgaaccctcggagcaggaggactcgtcttccgcagagaggggtctaggtccgtcccctgcgggagacgggccatcaggtagtgggaaacatcatcgccaggccccagggctgctgtgggacgcctcacatcaacaagaacagcctacttcctctagtcaccatggaggcgctggagccgtggaaatacgatcccgccattcaagttacccagccggaacggaggacgacgaaggcatgggggaagagccctcacctttccgtgggaggtcccgcagtgcgcctccaaatctgtgggctgcccagcggtacggaagggagctgcgccgaatgtcagacgagtttgtagactccttcaagaaaggactgccgaggcccaagagcgccggaacagctacacagatgcgccagagttcatcctggaccagagtgtttcagtcttggtgggatcggaaccttggcaggggaagcagtgctcctagccagtag

SEQ ID NO: 27473 - DNA, 507 bp, synthetic construct
  misc_feature 1..507: note = Description of Artificial Sequence: Synthetic coding sequence
  source 1..507: mol_type = other DNA
atgttccagattcccgagttcgaacctagtgagcaggaggactcatcctcagccgagcgaggcctcggtcctagccctgccggtgatggtccctctggctcagggaagcaccaccgccaagccccaggcctcctgtgggacgccagccatcagcaggagcagcccacaagctcctcccatcacggcggtgcaggagcagtagagattagatctcgtcactcctcttatcctgctggaaccgaagacgacgagggtatgggcgaggagccttccccattccggggacgctccaggtctgcccctccaaatctatgggccgctcaaagatatgggagggagctcagacggatgtctgatgagtttgtggattcattcaagaaaggcctaccgcgaccgaagtccgccggaaccgcgactcaaatgcggcagtccagcagctggacccgagtctttcaaagctggtgggatcgcaatcttggcaggggatcaagcgcaccatcacaatag

SEQ ID NO: 27474 - DNA, 450 bp, synthetic construct
  misc_feature 1..450: note = Description of Artificial Sequence: Synthetic coding sequence
  source 1..450: mol_type = other DNA
atgttccagatcccggagtttgagccttctgaacaggaggatagttcctccgctgagcgaggactagggccttcaccggctggtgacgggccttctgggtccggtaagcaccacaggcaggcaccaggcttgttgtgggatgcttcgcatcagcaggagcaacccacgtcgagttcgcatcatggtggagccggtgcagttgagataaggtccagacattctagttacccggctggcaccgaggatgacgaaggtatgggagaggaaccatcaccattcaggggacggtcccggtcggccccacccaacctctgggcagcccagcgctacgggcgtgagctcaggcggatgtcagacgaatttgtggactctttcaaaaaaggactcccacgacctaagagcgcgggaactgcaactcagatgaggcaatcatcacgaaggttacgctag

SEQ ID NO: 27475 - DNA, 591 bp, synthetic construct
  misc_feature 1..591: note = Description of Artificial Sequence: Synthetic coding sequence
  source 1..591: mol_type = other DNA
atgaacaggtcgcaagaggtgacacgcgacgaagagtccactcggtcagaggaagtgacgcgggaagaaatggcagctgcgggtctgaccgtaaccgttacccattcgaacgaaaagcatgacctgcacgtcacctctcagcagggatccagtgaacctgtggtgcaggacctggcccaagttgtcgaggaggtcatcggggtccctcagagtttccaaaaactcatattcaagggtaaatctctgaaggagatggagaccccactgtcagcacttggaatacaggacggctgtagagtcatgctaattggcaaaaagaatagcccacaggaggaggtagaattgaagaagctgaagcacctggaaaagtctgtggaaaagatagctgaccagcttgaggagcttaacaaggagctgacaggaatccagcaaggctttctgccgaaagatcttcaggcagaggcattatgtaagctcgacagacgggtgaaggctacaatcgaacagtttatgaaaatcttagaagagatagatactctcattttgccagagaacttccctaccctcacgctggtgctgaacgaaaagtag

SEQ ID NO: 27476 - DNA, 693 bp, synthetic construct
  misc_feature 1..693: note = Description of Artificial Sequence: Synthetic coding sequence
  source 1..693: mol_type = other DNA
atgaatagatcccaagaggtgacgcgggacgaagaaagtacacgcagcgaagaagtcactcgagaggagatggctgccgctggcctaaccgtgactgtcactcacagtaacgagaaacatgatctccacgtgactagccagcaggggagttccgagccagtcgtgcaggatttggcacaggttgtcgaggaggtgattggtgtcccacagagctttcaaaaattgattttcaaaggcaaatccctgaaggaaatggaaaccccactctctgccctggggatccaggatggatgtcgcgttatgcttataggcaagaagaacagtccccaggaagaggtggaactcaagaagctgaagcacttggaaaagagcgtcgaaaaaattgctgatcagttggaggaattgaacaaggaactcaccgggatccagcaggggttcctgcctaaggatctgcaagcagaggcactctgcaagcttgacagaagagtcaaagccacaatcgaacagtttatgaaaatcctcgaggagatcgacactctgatcctgcccgagaacttcaaagactcaagactgaagcgcaagggactggttaaaaaggttcaggctttccttgcggagtgtgacaccgtcgaacaaaacatctgccaggagacggaaagactgcagtccactaatttcgccctggccgagtag

SEQ ID NO: 27477 - DNA, 1038 bp, synthetic construct
  misc_feature 1..1038: note = Description of Artificial Sequence: Synthetic coding sequence
  source 1..1038: mol_type = other DNA
ctagcacagcggggaggagccaggaggcccagaggcgacagggagcgactggggtctaggctccgggcactgaggcctggcagagaacctagacaaagcgagccccctgctcagagaggcccaccgccatcaggtcggcctcccgctaggtcaaccgctagcggtcacgatcgtccaaccaggggtgctgctgcaggtgctaggcggccaagaatgaaaaaaaagaccagaaggcgctccacacgctctgaggaacttacccggagcgaagaactcaccctctctgaagaagccacctggtctgaggaagccactcaatccgaagaagctacccagggcgaggagatgaataggtcacaggaggtgacccgggacgaagagtctacacgctccgaggaagtgacacgggaagagatggctgccgctggattaaccgtgacggtcacgcactcaaatgagaaacacgacctgcatgtgacctcccagcaaggaagttccgagcccgtggttcaggatttggcccaggtagtggaggaagtgatcggagtgcctcagtcttttcagaaactgatctttaaaggaaaatctttaaaggagatggaaacacctctctcagcactgggtatccaggacggctgtcgagtcatgctgattgggaaaaaaaactccccccaagaagaagtggagctgaaaaaactcaaacatttggagaagtccgtggaaaaaatagccgatcagttggaggagcttaacaaggaacttacaggaatacagcagggtttccttccaaaagacttacaagctgaggctctctgtaagctcgatcgacgcgtgaaggctactatcgaacagttcatgaaaattctggaggagattgacaccctgatccttcccgagaattttaaggatagtaggctgaagcgaaagggactcgtgaagaaagttcaggctttcctggccgaatgtgacactgtggaacaaaacatctgccaagagaccgaaagactccagagcactaattttgccctagccgagtag

SEQ ID NO: 27478 - DNA, 1728 bp, synthetic construct
  misc_feature 1..1728: note = Description of Artificial Sequence: Synthetic coding sequence
  source 1..1728: mol_type = other DNA
atgtcggccgcaacacattccccaatgatgcaggttgctagcggaaatggtgaccgtgatcccctccctccaggctgggagattaagatagatcctcagacggggtggcccttctttgtggatcacaattcaaggaccacaacctggaatgatcctagagttccttcagaaggacctaaagagaccccttcatccgctaatggcccatcaagagaaggctccaggctgccccctgcaagagaaggacatccagtgtaccctcagctgaggcccggttatattccaattccagtactccacgagggagccgagaaccgtcaggtccatccctttcatgtgtacccccaaccgggtatgcagagattccgaacagaggccgcagccgcagctccgcagcgatcccagtcccctctgagggggatgccagaaaccacccagcccgacaagcagtgcgggcaggtggccgcagcagcggcagcacagccgccagcgagtcacggtccagagcggagtcaaagccccgctgccagcgattgtagcagctcctcttcttctgcctcgcttccttcatcaggccgaagttcattaggaagccaccagctccctagaggctacataagcatcccagttatacatgagcaaaacgttacaagacccgctgcacagccctcgttccaccaagcacagaagactcactatccagcacagcagggtgaatatcagactcatcaaccagtgtaccataagattcagggcgacgactgggagcctcgcccactccgcgcagcttctcctttccgctcatccgtacagggggcaagcagtcgggagggatcgccggcaagaagcagtaccccactacatagtccttcgcccattagagtgcataccgtggtggatagacctcagcagcctatgactcacagagagaccgcacctgtttcccagccggaaaacaaaccggagtctaagcccggacccgtcggaccagagctgccacctggtcatatcccaatacaagtgattagaaaggaggtggactcaaagcccgttagccaaaagccacctccaccgagcgagaaggtcgaggtgaaggtaccacctgcaccggtgccgtgccccccacccagccccggtccctccgctgtgccttccagcccaaaatctgtagccacggaagagcgcgcagcaccgtcaaccgcgcctgccgaagcaacccctccaaagcccggagaggccgaggctccccctaaacatccgggtgtactcaaagtagaagccatactggagaaagtgcaagggctggagcaggcggtcgacaacttcgaaggaaagaagactgacaaaaagtacctcatgatcgaggagtacctcaccaaggagctgcttgcactcgacagtgtcgacccggaagggagagccgacgttcgccaggccaggcgggacggcgttcggaaggttcagacaatattggagaagctggaacagaaggccattgatgtgcctggacaggtgcaggtctacgagctccaaccgagcaaccttgaggcagatcaaccgctccaggccatcatggagatgggcgctgttgccgctgacaaaggcaagaagaacgccggaaatgccgaggacccccatacagaaacccagcaacccgaggccaccgccgcagcaacatccaacccaagctctatgacagatactccgggtaaccccgcagcaccttag

SEQ ID NO: 27479 - DNA, 978 bp, synthetic construct
  misc_feature 1..978: note = Description of Artificial Sequence: Synthetic coding sequence
  source 1..978: mol_type = other DNA
atgcaggaaacgccctcgtcagctaatggaccgtcccgcgaagggtcaagactgcccccagcccgtgaaggccaccctgtgtaccctcagctgagaccaggctatatcccaatcccagtgctacacgagggggcagaaaataggcaggtgcacccatttcacgtctaccctcagcccggaatgcagcggtttaggaccgaggccgcagctgctgcccctcagcgatcacagtcgcctttacggggtatgccagagaccacccagccggataaacagtgtgggcaggtggccgctgcggctgccgctcaaccacctgcctcccacggaccagagcgcagccagagtcccgctgcatccgactgtagctctagtagctcttccgccagcctgccatcgtccggacgcagttccctgggctctcaccaattgcctagggggtatatcagcatccctgtgatccacgaacagaacgttactcgcccagcggcacaaccatcgttccaccaggcacagaaaactcactatcctgctcaacagggggaataccagactcatcagcctgtttatcacaaaatccaaggggacgactgggagcccaggcccctccgcgcagcttcaccctttagaagcagcgtccaaggggcttcctctcgagagggttctcctgcaagatccagcactccgttgcattccccctctcccattcgggttcatacagtagttgatagaccacagccaatgacacaccgcgagacagcacccgtcagtcaaccagaaaataagccggagtccaagcccggtcctgtaggccctgaactcccaccgggtcacatccccattcaagtgatcaggaaggaggtcgatagcaagccagtatctcagaagcccccacctcccagcgagaaggtggaagtgaaggtgcctcccgctccggtaccttgccccccaccttctccaggtcctagcgctgttccatag

SEQ ID NO: 27480 - DNA, 657 bp, synthetic construct
  misc_feature 1..657: note = Description of Artificial Sequence: Synthetic coding sequence
  source 1..657: mol_type = other DNA
atggacggttctggcgaacagcccaggggcggagggcctacttcatcggagcagatcatgaagaccggcgctctcctgctgcaggggttcattcaggatagagctggcagaatgggcggagaggcgccagaattggctttggaccctgtacctcaggatgccagcactaagaagctgtccgagtgtctgaaacggataggtgatgaactggactccaacatggaactccagaggatgatagccgcagtcgacactgattctcctcgcgaagtattttttagagtggccgctgacatgttctctgatggtaactttaattggggccgtgtggtcgctctgttttactttgcatctaaactggtgctcaaagccctgtgtaccaaagtgcctgagttgatccgaacgataatgggctggaccctggattttctgcgggaaaggctgctaggctggatacaggaccagggaggctgggtgaggctgctaaagcctccccaccctcatcatcgcgcattgactaccgctcctgcaccccctagcctgccacctgccacaccactgggcccatgggcattttggtctaggagccaatggtgtcccttgccgatatttcggtcttctgacgtcgtttacaatgcgttctccttgcgggtttag

SEQ ID NO: 27481 - DNA, 579 bp, synthetic construct
  misc_feature 1..579: note = Description of Artificial Sequence: Synthetic coding sequence
  source 1..579: mol_type = other DNA
atggacggaagcggggaacagccacgcggagggggacccaccagcagtgagcaaattatgaagactggcgcactgctgctgcaaggcttcattcaggatagggctggcagaatgggaggcgaggccccagaattagccctggacccagtgccccaagatgctagcacaaaaaagctttcggaatgccttaaacgcatcggcgacgagttggattccaatatggaattgcaaaggatgatcgcagcagtggatacagattcccctagggaagtgttttttagggtggccgcagacatgttctccgacggcaatttcaactgggggagggtggttgccctgttctacttcgcatccaagctcgtcctgaaggcattgtgcacaaaagtccccgagcttattcggacaataatggggtggaccctcgattttctccgggagagactactgggctggattcaggaccaagggggatgggacgggttgctgagttacttcggcacccctacgtggcagaccgtcacaattttcgtagcaggcgtgctgacggctagtctgactatttggaaaaagatgggttag

SEQ ID NO: 27482 - DNA, 432 bp, synthetic construct
  misc_feature 1..432: note = Description of Artificial Sequence: Synthetic coding sequence
  source 1..432: mol_type = other DNA
atggatggctccggcgagcagccaagggggggagggccaaccagttctgagcagataatgaaaacaggcgctcttctgctgcagggcatgattgccgctgttgacacagactctcccagagaggtgtttttccgagtggccgctgacatgttttcagacgggaattttaattggggacgcgtagtggctctattttactttgccagcaagctggtcttgaaagctctgtgcacaaaggttcctgaactcattcggaccatcatggggtggacgttggacttcttaagggaacggctgctcggctggattcaggaccagggcggatgggatggcctcctgtcttattttgggacaccgacctggcagacagttacgatattcgtggccggagtcctgacagcatccctgaccatctggaagaagatgggatag

SEQ ID NO: 27483 - DNA, 126 bp, synthetic construct
  misc_feature 1..126: note = Description of Artificial Sequence: Synthetic coding sequence
  source 1..126: mol_type = other DNA
atggatgggagcggagagcagccacgcggtggtgtgtcctctcgcattgagcagggcgaatggggaggcagacatccatcttggccctggacacggtgcttacggatgcggcctccaagatcctag

SEQ ID NO: 27484 - DNA, 540 bp, synthetic construct
  misc_feature 1..540: note = Description of Artificial Sequence: Synthetic coding sequence
  source 1..540: mol_type = other DNA
atggatggctctggtgagcagcccagaggcggaggcccaacatcatcagagcagatcatgaagactggagcactgctactgcagggcttcattcaggatcgcgctgggcgaatgggcggagaggcccctgagctggcgctggacccggtgccgcaggatgcgagcacaaagaaactctcagagtgcctgaagagaattggagacgaactggactcaaatatggagctgcaacgcatgattgccgcagtggatacggattccccacgggaggtttttttccgggtggccgcagatatgttctccgatggaaacttcaattggggccgagtggttgccctcttctattttgcgagcaaactcgtcttgaaggctttatgcaccaaggtgcccgagctgatccgcaccataatgggctggactctggattttctccgggaaagactgttagggtggatccaggatcaggggggttggaccgtgacgatcttcgtggccggagtgttgactgctagtctcaccatttggaagaagatgggctag

SEQ ID NO: 27485 - DNA, 495 bp, synthetic construct
  misc_feature 1..495: note = Description of Artificial Sequence: Synthetic coding sequence
  source 1..495: mol_type = other DNA
atggacggcagcggcgaacagcccagagggggaggtcccacctcgagtgaacagattatgaagacaggcgctctgctcctccaggggtttatccaggatagagccggaagaatgggtggtgaagcacccgagcttgccctcgaccccgttcctcaagatgctagcaccaagaagctctcggaatgcctgaagcgtattggcgatgaactcgatagcaatatggaactccaaaggatgatcgctgccgtcgataccgattcgccgagggaagtgttctttcgggtcgccgcagatatgttcagtgacggcaattttaattggggcagggtggtggctctcttctactttgcctccaagcttgtactaaaagccggtgtgaaatggcgggacctgggatctttgcagcctttacctccaggctttaaaaggttcacttgtttatcaatccccagatcatgggattaccggccatgcgctcctcggtgtaggaactag

SEQ ID NO: 27486 - DNA, 1806 bp, synthetic construct
  misc_feature 1..1806: note = Description of Artificial Sequence: Synthetic coding sequence
  source 1..1806: mol_type = other DNA
atggcttacgatgatagtgtgaagaaagaggattgcttcgacggggaccacactttcgaagatattgggctggccgctggcaggagccaaagggaaaagaaaaggtcttacaaggacttcctgcgggaggaggaagaaattgctgctcaagtgcgtaattcttcaaaaaaaaaactaaaggattccgaactgtacttcctcgggactgatacacacaagaagaaacgcaagcatagcagtgacgactactactatggagatatctcctccctggagtcaagccagaagaagaagaagaagtctagccctcagtccaccgataccgccatggatctgcttaaggctatcacttccccgcttgccgcagggagcaagccaagtaaaaagactggtgagaagtcctccggttcaagctctcattcagagtcgaagaaggaacaccaccgtaaaaaagtaagtgggagttcaggcgagctcccattggaggatggcggaagccacaagtccaaaaagatgaagccattatatgtgaacacagagaccctgacactgcgcgaaccagatggcctcaaaatgaagctgattctcagtccaaaggagaaaggcagcagcagtgtagacgaggaatcattccagtatccgagccagcaggcgaccgtgaaaaagtcatcaaaaaaatctgcaagggatgaacagggcgctctcctgcttggtcacgagctccagagctttctgaaaaccgctagaaaaaagcataagtcttcctcggacgcacactcctctcccggacccgagggttgcgggagtgacgcatcccaatttgctgagtcacacagtgccaaccttgacctgagcgggctcgagccaatcctggtggagtccgattctagtagcggcggagaactagaggcaggtgaattggtgatcgacgattcttatagggaaataaaaaaaaagaagaaatccaagaagagcaagaagaagaaagacaaggagaagcataaagagaaacgacatagtaaaagtaaaagaagcttgggcctgtcggctgtgcccgtaggcgaagtgacggtgacctccggaccacccccttctataccgtatgccggagcagctgcccctcccttgcccctgccaggactccatactgacggtcactcggaaaagaaaaagaaaaaggaggagaaggacaaagagcgtgaacggggtgaaaagcccaagaaaaagaatatgtctgcttaccaggtattctgtaaagaatatcgcgtgactatcgtggctgaccaccctgggattgactttggcgaacttagcaagaagctcgcggaggtatggaaacaactgccagagaaggacaagctcatttggaagcagaaagcgcagtacctccaacacaaacagaataaggccgaggcaacaaccgtgaagcgcaaggcttcctcatcggaaggttcgatgaaagtcaaagcatcctccgtgggagtgctgtcaccacaaaagaaatctccccctaccacgatgcttctgcctgcttcacccgcaaaagccccagagactgagcctatagacgtcgccgcacacctgcaattgctgggtgagtcgctgtccctgatcggccaccggctacaggaaaccgaaggaatggtggccgtatccgggagtctcagcgtgctcttagactccataatttgtgcactcggaccattggcgtgccttactacccagctccctgaactgaatgggtgtccaaagcaggtcctctccaatacactagacaacatagcttacatcatgccaggtctctag

SEQ ID NO: 27487 - DNA, 702 bp, synthetic construct
  misc_feature 1..702: note = Description of Artificial Sequence: Synthetic coding sequence
  source 1..702: mol_type = other DNA
atgagccagtccaatagggagctggtggtcgatttcctgtcctacaagctgtctcagaaggggtacagttggtcccagttctccgacgttgaggagaacagaacggaagcacctgagggtaccgaatccgaaatggagacgccttctgctattaatgggaacccatcttggcacctagctgatagccctgctgtcaatggagctacagggcattctagttctttagacgcgcgagaagtgatcccgatggctgcggttaagcaggccctgagggaagcaggcgacgagtttgagctgaggtataggcgagcgtttagtgatctgaccagtcagctccatatcacaccaggtacagcgtaccagagcttcgaacaagtggtcaacgagttgttccgggacggagtgaattgggggcgtattgtggccttcttctctttcggtggagctttgtgtgtcgagtctgtggacaaggagatgcaggtactcgttagcaggattgcggcatggatggcaacgtacctgaacgaccatttagagccatggattcaagaaaacgggggatgggacacctttgtggaactctacgggaacaatgcagcagcagagtcacgcaaggggcaggagcgctttaatcggtggttcttgacaggaatgactgtcgctggagttgtgcttctggggtcgctcttttctcgcaaatag

SEQ ID NO: 27488 - DNA, 513 bp, synthetic construct
  misc_feature 1..513: note = Description of Artificial Sequence: Synthetic coding sequence
  source 1..513: mol_type = other DNA
atgagccagtccaaccgtgaattagtagtggacttcctgagctacaaattgtcacagaaagggtattcctggtcccagttttccgacgtagaagaaaaccggaccgaggccccagagggaaccgaatccgagatggaaaccccctcggcaatcaatggcaatccttcatggcacctggcagacagcccggctgtgaacggagcgaccggccattcgtcttcgctcgatgctcgagaggtcattcccatggcagccgtgaaacaagcccttagggaagcgggagacgaatttgagctccggtataggagagctttctcagatttgacctcccagctgcacataacccccggaacagcctatcagagtttcgaacaggacaccttcgtggaactctacggaaacaacgccgcagccgagagtcggaaaggtcaggagcggttcaatcgctggtttctgaccgggatgacagttgctggagtggtcctgctgggcagtctattctccagaaaatag

SEQ ID NO: 27489 - DNA, 702 bp, synthetic construct
  misc_feature 1..702: note = Description of Artificial Sequence: Synthetic coding sequence
  source 1..702: mol_type = other DNA
atgagccaatccaaccgtgaactggtcgtcgactttttgtcctacaagttgagtcagaagggatattcatggtcccagttttccgacgtggaggagaatcggactgaggcacccgagggcacggagtccgaaatggagacgcccagtgctataaatgggaacccgtcttggcatctcgccgattcgcctgccgtcaatggtgccaccggtcattcctcgagcctggatgccagggaagttataccaatggccgctgtgaaacaggcactcagggaagctggtgatgagtttgagctgaggtaccggagggcatttagtgatttgacaagccagttacatatcacgccaggcaccgcatatcaatctttcgagcaagtcgtcaatgaactttttagagacggggtgaactggggtcgcattgtggcattcttctcattcggcggagcattatgtgtggaatcggtggacaaagagatgcaggtacttgtcagtcgtatcgccgcttggatggccacctatctcaatgatcacctggagccctggattcaggagaacggcggatgggatactttcgtcgagttgtacggtaacaatgcagcagccgagtcccggaagggtcaggagcggtttaatcgatggtttctcaccggaatgaccgtggcaggagtagtactcctagggtctctgttttcccgaaagtag

SEQ ID NO: 27490 - DNA, 567 bp, synthetic construct
  misc_feature 1..567: note = Description of Artificial Sequence: Synthetic coding sequence
  source 1..567: mol_type = other DNA
atgagccagagcaaccgggagctcgtggtagactttctctcttacaagctgagccaaaagggctactcctggtcacagttttctgacgttgaggaaaatcgtaccgaggccccagagggtaccgagagcgagatggagaccccgtcagcgataaatggaaatccctcctggcatctggctgactctcccgcagtcaacggcgctaccggccactcgtcctccctagatgccagagaggtaatcccaatggcagctgtgaagcaggcgctgcgtgaggccggagatgaatttgagctgcggtacaggcgcgcattctccgatctcacctctcaactacatatcactcctggaacggcgtatcagtctttcgagcaggttgtgaatgaactcttcagagacggtgttaattgggggcgaattgtggcattcttttcatttgggggtgcactgtgcgtggaaagcgtggacaaggaaatgcaagtcttggttagcaggattgcagcatggatggccacatatttgaacgaccatctggaaccttggattcaggaaaacgggggatggtag

SEQ ID NO: 27491 - DNA, 702 bp, synthetic construct
  misc_feature 1..702: note = Description of Artificial Sequence: Synthetic coding sequence
  source 1..702: mol_type = other DNA
atgagccaatccaaccgagagttagtggtagatttcctttcctacaaactgagccaaaaagggtacagttggagtcagtttagcgatgttgaagagaatcgcaccgaagctccagagggcaccgaaagtgaaatggagaccccgtctgctatcaacggcaacccttcgtggcacctggcggacagtcccgctgtgaatggcgcaactgggcactctagcagcttagacgcccgagaggtgatacctatggccgctgtcaaacaggctctgagagaagctggcgatgaatttgagttgcgatatcgaagagcattcagtgatctgaccagccagcttcatatcacacccggaaccgcataccaaagctttgaacaggttgtcaatgaattgtttcgcgatggtgtgaactggggcaggattgttgctttcttctctttcggtggggcattgtgcgtggaatctgttgacaaagagatgcaagtgctggtcagccgtattgctgcgtggatggccacatacttaaacgaccacctcgaaccatggatacaagaaaatggtgggtgggatacatttgtggagctgtatggcaacaatgcggcagcagaaagtcgaaaaggacaggagcgcttcaaccggtggtttcttactgggatgacagtcgcaggggtggtactcctcgggagcttgttctcccgtaagtag

SEQ ID NO: 27492 - DNA, 567 bp, synthetic construct
  misc_feature 1..567: note = Description of Artificial Sequence: Synthetic coding sequence
  source 1..567: mol_type = other DNA
atgagtcagtccaaccgcgaactcgttgtggactttctgtcttacaagctgagtcagaagggatattcatggtctcagtttagtgatgtggaagagaacagaacagaggcccctgagggcacggagagtgaaatggagacccccagcgcaatcaatgggaaccccagctggcacctggctgactctccggcagtgaatggagccacaggtcattcttcaagcttggacgctagagaggtgatccctatggccgcagtaaagcaggcactgcgggaagccggtgacgaatttgaactccgctaccgtagagccttttcagaccttacgtcacagcttcatataactcctggaaccgcataccaatccttcgaacaggtggtgaatgaactcttccgcgacggcgtaaactggggcagaatagtggcttttttttcctttggcggagccctgtgcgtggaatccgtagacaaggagatgcaagttctggtcagtaggattgctgcctggatggctacctatctcaacgatcatcttgagccgtggatccaggagaatggaggctggtag

SEQ ID NO: 27493 - DNA, 147 bp, synthetic construct
  misc_feature 1..147: note = Description of Artificial Sequence: Synthetic coding sequence
  source 1..147: mol_type = other DNA
atgtctcagagtaatagggagctggtcgttgatttcttgtcttacaagttgtcgcagaagggatacagctggtctcagttttctgatgtggaggagaatcgcactgaggctcccgaaggcacggagagcgagatggaaactccttag

SEQ ID NO: 27494 - DNA, 546 bp, synthetic construct
  misc_feature 1..546: note = Description of Artificial Sequence: Synthetic coding sequence
  source 1..546: mol_type = other DNA
atgtcacaaagtaaccgggagctagtagtcgattttctgagctacaaactgtcacaaaagggttatagctggtcccagttcagcgacgtggaggagaatagaacagaggcacctgagggcacagagtccgaaatggagacaccatccgctatcaacgggaacccatcgtggcaccttgccgatagccctgcagtgaatggggctacaggccacagtagcagtctggacgcccgtgaagttatacccatggcggctgtgaagcaggccctcagggaagctggggatgagttcgagctgcggtatagaagagcctttagcgatctcactagccagctccacatcaccccaggcactgcttaccaatcatttgagcaggttgtgaacgaattgttccgggatggtgtgaattgggggcgaattgtggccttctttagttttggtggcgcactgtgtgtagaatcagtggataaggagatgcaagtcctggtctcgcgaatagcagcctggatggcaacatatttgaatgaccatctggaaccctggtag

SEQ ID NO: 27495 - DNA, 618 bp, synthetic construct
  misc_feature 1..618: note = Description of Artificial Sequence: Synthetic coding sequence
  source 1..618: mol_type = other DNA
atgtcccagagcaatagagagctcgttgtggacttccttagttataagctctcacagaagggctattcttggagccaattcagtgatgttgaagaaaacagaaccgaggcacctgaaggtacagaatccgaaatggagacaccttcggcgattaacggaaatcctagttggcatctggcagactcccccgctgtaaacggggcaacaggacactcatcatctctggacgctcgcgaagtgatcccgatggccgcagtgaaacaagccctgagggaggctggcgatgagtttgagctgagatacagaagggccttttcagatttgaccagtcaactgcacatcactcctgggacggcctatcaaagctttgagcaggtagttaatgagctgttccgcgatggagtgaactggggcagaattgtggcattcttcagtttcgggggtgcgctgtgcgttgagtccgtcgataaagagatgcaggtcttggtgagtcgaatcgccgcatggatggcgacttatctaaacgatcaccttgagccatggatacaggagaacgggggatgggatacttttgttgaactctacggtaataacgcagcggctgagtctaggaagtag

SEQ ID NO: 27496 - DNA, 567 bp, synthetic construct
  misc_feature 1..567: note = Description of Artificial Sequence: Synthetic coding sequence
  source 1..567: mol_type = other DNA
atgtcccagtctaatcgtgagctggtggtggattttctttcctacaagttgagccaaaagggctattcctggtctcagttttctgacgtcgaggagaatcgcaccgaggccccagagggaaccgagagtgaaatggagactccatctgccatcaacgggaaccctagctggcatcttgccgacagccctgccgtaaacggagccacagggcactcctcctctctggatgctcgagaagtaatcccgatggccgctgtcaagcaggccctgcgagaggccggagacgaatttgagttgcgttatcgacgcgcattttcggatctgacctcacaattacatatcacccctggtactgcttaccagtctttcgagcaggtcgtgaacgagctgttcagagacggtgtgaactggggcagaatcgtggccttctttagcttcggcggtgcactgtgtgtcgaaagtgtggacaaggagatgcaagtcctggtcagtagaatcgccgcttggatggcaacttacctcaacgaccacttggagccatggattcaggaaaatggtggatggtag

SEQ ID NO: 27497 - DNA, 615 bp, synthetic construct
  misc_feature 1..615: note = Description of Artificial Sequence: Synthetic coding sequence
  source 1..615: mol_type = other DNA
atggtcgaccaactgagggagcggaccactatggccgatccactccgcgagcggaccgagttactgttggccgattatctcggctattgcgccagggaacctggcacccctgagcccgctccttctacccctgaagccgcagtgctgcggtctgcagctgctaggttacggcagatacatcgatcattcttttccgcttatctcggctatcctggaaataggttcgaactggtcgccctgatggccgacagcgtgctttccgacagccccggacctacatgggggagagtggtgactctcgtgacgttcgccggaacactgttggagcggggtcctctcgtaacagcccgatggaagaagtggggcttccagcccaggttgaaggagcaggagggagacgttgcccgagactgccaaagattagtggctctactgagtagtcgcctgatgggccaacatcgcgcatggctccaggcccaaggtggatgggacggcttctgccacttcttccgaacccctttccctctggcattttggcgcaaacagctagtgcaggcctttctgtcgtgcctcctgacaactgctttcatatatctgtggacaaggctgctttag

SEQ ID NO: 27498 - DNA, 417 bp, synthetic construct
  misc_feature 1..417: note = Description of Artificial Sequence: Synthetic coding sequence
  source 1..417: mol_type = other DNA
atggccaaacaaccttcagacgtatcctcagaatgcgatagagagggtcggcaattgcagccagctgagaggccccctcagttgcgtcccggtgctccgacatccctacaaaccgagccgcaagaccggagtcccgcacccatgtcctgtgacaaatcgactcaaacacctagtcctccatgtcaggcctttaatcattatttatcggctatggcaagcatgcggcaggctgaaccagccgatatgcggccagagatttggattgcccaagagctcagaagaatcggtgacgaatttaatgcctattatgctcgacgggtgttcctgaataattaccaggcggcagaggaccaccccaggatggtgattctccgtctgcttcgatatatcgtgaggctggtgtggcggatgcattag

SEQ ID NO: 27499 - DNA, 339 bp, synthetic construct
  misc_feature 1..339: note = Description of Artificial Sequence: Synthetic coding sequence
  source 1..339: mol_type = other DNA
atggcgaagcagccctctgatgtgagctctgagtgtgatcgcgagggccgtcagctgcagccggctgagaggccccctcagcttagacccggagccccaacctctctgcagactgagccccaggatcgcagccctgcaccaatgagctgtgacaagagcacacaaaccccctctccaccttgccaagcttttaatcactatctgagcgctatggtggtcatactggaagatatcggcgaccttagcctctgttttgggttcatcttcacgggcctggatctttacggacatcaccactcccaggataccgagcaactcaaccacaaagacttcagctag

SEQ ID NO: 27500 - DNA, 519 bp, synthetic construct
  misc_feature 1..519: note = Description of Artificial Sequence: Synthetic coding sequence
  source 1..519: mol_type = other DNA
atggctaagcagcctagcgacgtgagtagcgagtgtgacagggagggcagacagcttcagcctgctgagaggcctcctcaattgaggccaggggcaccaaccagccttcagacagagccacaaggcaatccagagggcaaccatggcggtgaaggggacagctgcccacatggatccccccagggacctcttgcaccccctgcaagccctgggccattcgcaacccgcagcccgctcttcatattcatgcgccgtagctcactgctgtcgcggagctcatcaggctatttctccttcgatactgataggtcacctgcccctatgagctgtgataaatcgacgcagacccccagccccccttgccaggccttcaatcactacctgagcgctatggcctcaatgaggcaagctgaacccgcagacatgcgaccggaaatctggattgctcaggagctgcggagaattggcgatgaatttaatgcgtactacgcacgacgcatgccactgccaccagactag

SEQ ID NO: 27501 - DNA, 219 bp, synthetic construct
  misc_feature 1..219: note = Description of Artificial Sequence: Synthetic coding sequence
  source 1..219: mol_type = other DNA
atggccaagcagccatccgatgtcagctcagagtgcgatcgcgagggcagacagctgcaacccgcagagcggccaccccagctccgccctggcgctcctacttctctgcagactgagcctcaggggaatcccgagggaaaccacggaggggaaggggatagctgccctcacggatcaccccaagggccactggctcccccagcaagcccaggaccctag

SEQ ID NO: 27502 - DNA, 258 bp, synthetic construct
  misc_feature 1..258: note = Description of Artificial Sequence: Synthetic coding sequence
  source 1..258: mol_type = other DNA
atggcaaagcaaccctccgacgtgtcgagcgagtgtgaccgcgaaggcaggcaattgcagcctgcagagcgccctccacagctcaggccaggggcaccaacgtcactgcagaccgagccccaagcctccatgagacaagctgagcctgctgatatgcggccagaaatctggatcgctcaagagttgagaaggatcggggacgagtttaacgcctactacgctcgaagacttgctaagctgttggccagctcaacatag

SEQ ID NO: 27503 - DNA, 597 bp, synthetic construct
  misc_feature 1..597: note = Description of Artificial Sequence: Synthetic coding sequence
  source 1..597: mol_type = other DNA
atggccaaacagccctctgatgtgagctcggagtgtgatagggagggcagacagctgcagccggcagaaagacccccacagctacgtccaggggctcctacatccctccagaccgaaccacagggtaacccagaagggaatcacggcggtgagggggacagttgtccgcatgggagccctcaaggaccattggctccacctgcatccccagggccatttgccacccgatcccctctgttcatcttcatgcgtcgctccagcctgctgagcaggagttcaagtggatacttttcattcgacacggacaggtctccagctccgatgtcttgtgacaagtccacacagaccccatcccccccatgtcaggccttcaatcattacttgtccgctatggcctccatgagacaagctgaacctgccgacatgaggccagagatctggattgcacaggaactgcgcaggatcggggacgagtttaatgcctattacgccaggagggtcttcctaaataattaccaagcagccgaagaccacccaaggatggtgattctcagactgctgcgatacatagtgcggctggtgtggcgcatgcactag

SEQ ID NO: 27504 - DNA, 369 bp, synthetic construct
  misc_feature 1..369: note = Description of Artificial Sequence: Synthetic coding sequence
  source 1..369: mol_type = other DNA
atggccaaacagccatccgatgtaagcagcgagtgcgaccgagaggggaggcagctccagcctgccgagcggccaccgcagcttcgcccaggcgcaccaacatcattacagaccgaaccacagggcaatcccgagggtaaccacggtggagagggtgacagctgccctcatgggtcaccccaaggccctctcgcaccgcctgcaagtcctggtccttttgcaactcgttctcctctgttcattttcatgcggagaagcagcctactgtcccgctctagtagcggatactttagtttcgatacggataggtcacctgctcccatgtcatgcgacaaaagcacccagacaccgagccctccttgccaatag

SEQ ID NO: 27505 - DNA, 222 bp, synthetic construct
  misc_feature 1..222: note = Description of Artificial Sequence: Synthetic coding sequence
  source 1..222: mol_type = other DNA
atgaggcaggcagaaccagccgatatgcgaccggagatttggattgcccaagaactgcggcgtatcggagacgaattcaatgcctattatgcccgaagagtaatgatgttttccctgccagctttccttctcaccccctctccatctaccctgtacttctttaagaaaacagtcacgtcttgtaactatatgctgatcctggagatgatcacagtggcctag

SEQ ID NO: 27506 - DNA, 243 bp, synthetic construct
  misc_feature 1..243: note = Description of Artificial Sequence: Synthetic coding sequence
  source 1..243: mol_type = other DNA
atggccaaacagccttctgacgtctcttctgaatgcgatcgtgaaggccgacagctccagcccgcagaaaggcctccccaactgagacccggagcacctacatcccttcagactgagccccaggatagatccccggcacctatgtcctgcgataagagcacccagacaccaagcccaccttgccaggcctttaatcactacctgtccgccatggtgagggaaatcgaagaggtagtggtgtag

SEQ ID NO: 27507 - DNA, 408 bp, synthetic construct
  misc_feature 1..408: note = Description of Artificial Sequence: Synthetic coding sequence
  source 1..408: mol_type = other DNA
atggcgaagcaaccatccgatgtcagctcagaatgtgaccgggaaggtcggcagttgcagccggcagagaggcccccacagctgcgccctggagctccaacctcactgcaaaccgaaccacagggcaatcctgaaggcaatcacggcggagaaggggatagttgccctcacggttcaccccagggtccactcgcacctccagcctctcccggacccttcgctacaagatctcctctgttcatattcatgcgaaggagctctctgttatctcgatcctcatctggctatttttctttcgacacagacaggagcccagccccaatgagctgtgataagtcaactcaaactccgagccctccctgccaggcgtttaatcattaccttagcgctatggcaaattgggattag

SEQ ID NO: 27508 - DNA, 423 bp, synthetic construct
  misc_feature 1..423: note = Description of Artificial Sequence: Synthetic coding sequence
  source 1..423: mol_type = other DNA
atggccaaacaaccttcagacgtgtcgagtgagtgcgatcgcgaggggcgtcagctgcaacctgccgagcgtccaccacagctccgacccggagcgccaactagcctgcagacagaaccacaaggtaatccggagggcaatcatggtggcgagggagactcttgtccccatggaagtcctcaaggtcctctggcccctccagcatcccctggtccctttgccactagatctcctctgtttattttcatgagacggtcctccttactgtctcgctccagtagcggctatttctccttcgatacagacaggtctccagcacccatgtcatgtgacaagagtacacagactccttcccccccttgccaagcctttaaccactacctctcagcaatggtccgcgaaatagaggaggtcgttgtgtag

SEQ ID NO: 27509 - DNA, 291 bp, synthetic construct
  misc_feature 1..291: note = Description of Artificial Sequence: Synthetic coding sequence
  source 1..291: mol_type = other DNA
aaacagccgagcgatgtgtctagcgagtgtgatagagaaggcaggcaactgcagccagcagaacggccacctcagttgcgacccggagcaccgacatctctgcagacagaaccacaagacagatcccctgcccctatgtcgtgtgataagagcacgcagacccctagcccaccgtgccaggcgttcaaccactacttgtccgccatggatgactcggctggcagctcccttcgaatagccctgcaccgggaagtccagtggcctctgaaatggctcgctaagagtagctag

SEQ ID NO: 27510 - DNA, 249 bp, synthetic construct
  misc_feature 1..249: note = Description of Artificial Sequence: Synthetic coding sequence
  source 1..249: mol_type = other DNA
atggccaagcagccctcagacgtcagctccgagtgcgaccgcgaaggaagacaactgcagcccgcagagagacctccccagctaagaccaggggctcctacctccctacagaccgagccgcaggcttccatgaggcaagcagagcctgctgacatgaggcctgaaatctggattgcacaggagcttaggagaattggtgatgaatttaacgcctattacgctagaaggatgccactaccgcctgactag

SEQ ID NO: 27511 - DNA, 582 bp, synthetic construct
  misc_feature 1..582: note = Description of Artificial Sequence: Synthetic coding sequence
  source 1..582: mol_type = other DNA
atggcaactccagcgtccgcccctgatacccgcgctctggtcgccgattttgtgggatacaagctacgtcagaaaggatacgtttgtggcgctgggccaggtgagggcccagctgccgacccactgcaccaggcaatgcgggctgccggagacgagtttgagacccgattccgtagaacattcagtgacctggccgcacaactgcatgtgacacccggtagcgcccagcagagattcacccaggtaagcgacgaactttttcaaggaggacccaactgggggcgactggtagcgttcttcgtctttggcgctgccctgtgtgcggaatcggttaataaggagatggaacctctggtcgggcaggttcaggagtggatggtggcataccttgagactcagctggcggattggatccactcctccgggggttgggccgagtttaccgccttatacggggacggagccttggaagaagcgcgaagactgagagaggggaactgggcatcagtaaggacggtcctgacaggcgctgtcgccttaggcgcattggttactgtgggggcatttttcgcctcaaaatag

SEQ ID NO: 27512 - DNA, 156 bp, synthetic construct
  misc_feature 1..156: note = Description of Artificial Sequence: Synthetic coding sequence
  source 1..156: mol_type = other DNA
atggcaacacctgcgtcggcccctgatacgagagcactggtcgcagattttgttgggtataaactgcgtcagaagggatatgtctgcggtgcaggaccaggggagggtccggctgctgacccactgcaccaggccatgagggctgctggcgattag

SEQ ID NO: 27513 - DNA, 219 bp, synthetic construct
  misc_feature 1..219: note = Description of Artificial Sequence: Synthetic coding sequence
  source 1..219: mol_type = other DNA
atggccacacctgcctcggccccagatacgagggcactcgttgcggatttcgtgggatataagctgcgccagaagggctacgtctgcggcgcaggacctggggaagggcctgcagccgatccactgcaccaggccatgcgggcagcaggggacgaatttgagacgagattccgccgtactttttctgatctggccgctcagctgcacgtaacaccatag

SEQ ID NO: 27514 - DNA, 450 bp, synthetic construct
  misc_feature 1..450: note = Description of Artificial Sequence: Synthetic coding sequence
  source 1..450: mol_type = other DNA
atggctactcccgcatcagcccctgacaccagagctctcgtcgccgacttcgtcggatataagctccgacagaaaggctatgtctgtggcgctgggccaggtgaggggcctgctgcagatcctcttcaccaggcaatgagggcagcgggagacgagtttgagacacggtttagacggactttttccgatttagcagcccagctacatgtcacccccggttccgcccagcagagattcacccaggtttctgatgagctatttcaggggggaccaaattggggcaggctcgtggcgttctttgtctttggcgcagccctctgtgcagagagcgtgaacaaagaaatggagccactcgtagggcaggtacaggaatggatggtggcatacttggagacccagctggcggactggattcattcttcaggcggatgggcagaatttacagcctag

SEQ ID NO: 27515 - DNA, 435 bp, synthetic construct
  misc_feature 1..435: note = Description of Artificial Sequence: Synthetic coding sequence
  source 1..435: mol_type = other DNA
atggctacacctgcttccgcccctgacactcgcgctctagtcgccgactttgtaggatacaaactgcgccagaagggctacgtgtgtggagccggaccgggtgaaggcccagccgctgatccactccaccaggccatgcgcgctgccggagacgagtttgaaacaaggttccgccgtacattttctgatctcgcggctcagctccacgtgacccctggaagcgctcagcagagattcacccaggtaagcgacgaattgttccagggcggaccaaattgggggaggctcgtggctttctttgtgttcggcgctgctctgtgtgccgaaagcgtgaataaagaaatggaaccccttgtgggacaggtccaagaatggatggtcgcctatttggagactcagttggctgactggatacattcctcagggggttggtag

SEQ ID NO: 27516 - DNA, 528 bp, synthetic construct
  misc_feature 1..528: note = Description of Artificial Sequence: Synthetic coding sequence
  source 1..528: mol_type = other DNA
atgaccgactgcgagtttggctatatctatcgattggcccaggactacctccagtgcgtcctgcagatcccacagcctgggtccggccctagtaaaacctccagagtgttgcagaacgtggccttttcagtacagaaagaggtggagaaaaacctgaaatcctgcctggataacgtgaacgtggtgtctgtagacactgcacgcaccctctttaatcaggtaatggaaaaggaattcgaagacggtattatcaactggggacggatcgtcaccatttttgcctttgagggaatactcatcaaaaaactactgcgacagcagattgccccagacgtcgacacgtacaaagagataagctattttgttgccgagttcataatgaataacacaggagagtggatcaggcaaaatggtgggtgggaaaacggctttgtgaagaagtttgaaccaaagtcaggctggatgacatttctggaggttactggtaagatttgtgaaatgctgtcgctgttgaagcagtactgctag

SEQ ID NO: 27517 - DNA, 492 bp, synthetic construct
  misc_feature 1..492: note = Description of Artificial Sequence: Synthetic coding sequence
  source 1..492: mol_type = other DNA
atgaccgactgcgagtttgggtatatttatcgactggcccaggactaccttcagtgcgtcctccagattccccaaccagggtcagggcctagtaagacaagtcgcgtgctacagaacgtggccttctccgtccagaaagaagtcgagaagaatctgaagtcatgtttagataatgtgaatgttgtctctgtagacactgcccgaacactcttcaaccaggtgatggagaaggagttcgaggatgggattatcaactggggcaggattgttacgatcttcgcgtttgaaggcattctgatcaaaaagttgcttaggcagcagattgcccctgatgttgacacctacaaagagatcagctatttcgtagcggagtttattatgaacaatacgggggaatggattcgacagaacggcggttggggcaagtggcacaatcacacgcctatgctggtggagagcgtggcccacaagaaacgtaaaatggccctatag

SEQ ID NO: 27518 - DNA, 726 bp, synthetic construct
  misc_feature 1..726: note = Description of Artificial Sequence: Synthetic coding sequence
  source 1..726: mol_type = other DNA
atgtgctcaggcgctggggtaatgatggcaagatgggccgcacggggacgggcaggttggcgttcgactgtcaggatcctcagtccactcggccactgcgaaccaggcgttagtaggtcttgtcgagccgctcaggccatggattgcgaggtgaacaacgggtcaagcctcagagatgagtgcattaccaaccttctcgtgttcggctttctccagagttgcagtgataatagtttccggagagaactggatgctctgggtcacgaattgcccgtgttggctccccaatgggaagggtatgatgagctgcagaccgatggcaaccgatcctcccattcgaggctaggaaggatcgaagctgacagcgagtcccaggaagatattattagaaacattgccaggcacctagcccaggtgggtgacagtatggacagatccattcctccaggattggtaaacggactggcccttcagctccggaacacctctaggtctgaagaagatcggaaccgggatttggcaaccgctctcgaacaactgctgcaggcgtacccgagagatatggaaaaggagaagaccatgctggtgctggcccttctgctggccaaaaaggtggcaagccacaccccgtctttgctacgtgacgtgttccacaccacagtgaattttattaaccagaacctgcgaacatatgtcagatcccttgcccgtaacggcatggactag

SEQ ID NO: 27519 - DNA, 414 bp, synthetic construct
  misc_feature 1..414: note = Description of Artificial Sequence: Synthetic coding sequence
  source 1..414: mol_type = other DNA
atggattgtgaggtcaacaacggaagtagcttacgcgacgagtgcataacaaacctgcttgttttcggcttcctgcagtcttgcagtgacaattcttttaggcgtgagttggatgctctgggacacgaactgccagttctcgcgccacaatgggaggggtacgatgaattgcagaccgatggcaaccggagctctcacagccggctcggacggatcgaggctggtgcgtctgacaacaacacagcaagtgccgaggaggaaactgaggccgcagggtccgtcgcagtggagcgcggtctgcacggggctgccactgtgattttgaaggtcaaaaaaactagtagcgggatcctccccggaacatcccctcggtcagggacagcatggaccgtcgcgtctctgcgcgcttggtag

SEQ ID NO: 27520 - DNA, 300 bp, synthetic construct
  misc_feature 1..300: note = Description of Artificial Sequence: Synthetic coding sequence
  source 1..300: mol_type = other DNA
atggacaggtccattcctccaggactggtgaatggcctagcgctgcagttgagaaatacaagtagatccgaggaggacaggaatagagatctggccaccgccctcgagcagctgctgcaagcatatcctagagacatggagaaggagaagacaatgctcgttcttgccctgttgctcgccaaaaaagtggcgtcccacactcctagcttgctcagggatgtgttccataccaccgtgaacttcatcaatcagaatttgcgcacctacgtgcgcagcctggcaagaaatggtatggactag

SEQ ID NO: 27521 - DNA, 300 bp, synthetic construct
  misc_feature 1..300: note = Description of Artificial Sequence: Synthetic coding sequence
  source 1..300: mol_type = other DNA
atggatagatcgatacctccaggcctcgtgaacgggttagccctacagctgcgaaacacctctcgtagtgaggaagaccggaacagagacttggctaccgcgctggaacagctcctccaggcctatcctagggacatggaaaaagaaaagacaatgctcgtgttggcccttctcctggccaagaaagtagcatcacacaccccctcactcctgcgggatgtatttcacacgactgttaacttcatcaaccagaatttgcggacctacgtccgttccctggctaggaatggaatggactag

SEQ ID NO: 27522 - DNA, 588 bp, synthetic construct
  misc_feature 1..588: note = Description of Artificial Sequence: Synthetic coding sequence
  source 1..588: mol_type = other DNA
atggattgtgaagtcaataatggaagcagcttgcgagacgaatgtatcactaatcttttagtgttcggctttctccagtcctgcagcgataatagctttaggcgtgaacttgatgctcttgggcacgagttgcccgttcttgcccctcagtgggaaggctatgatgaattgcagacagacggaaatagaagctcccactctcgcctcgggaggatcgaagcagactctgaaagccaagaggacatcattagaaatattgccaggcaccttgctcaagtgggcgatagtatggataggtccatcccacctggcttggtgaatggactggctctgcagcttcgaaataccagcaggtccgaggaggatcgcaacagagacctggccaccgcactcgaacagctccttcaggcctacccgagggatatggagaaggaaaaaacaatgctggtgctggctctcctgctcgctaaaaaagtggctagtcacactccgtcacttctgagagatgtgtttcacacgacggtcaactttatcaatcagaacctccggacatatgtgcggagcttggctcggaatggaatggattag

SEQ ID NO: 27523 - DNA, 588 bp, synthetic construct
  misc_feature 1..588: note = Description of Artificial Sequence: Synthetic coding sequence
  source 1..588: mol_type = other DNA
atggactgcgaagtaaacaacggatccagcttacgtgatgagtgcattaccaacctcctcgtctttggcttccttcagtcttgctccgataacagtttccggcgagagcttgacgctcttggacacgaattacctgtgctagcccctcagtgggagggatacgatgagttacagactgacgggaataggtcatctcactctcgtcttggaagaatcgaggctgacagcgaatctcaggaagacataattcgtaatatcgcccgacatctggctcaggtgggagattcaatggatagaagtatccccccaggcttggtcaatggtctcgctctgcagctgcggaacacttcaagatccgaagaagataggaatagagacctggcaaccgcactggaacaactcctgcaggcctacccacgtgacatggagaaggagaaaaccatgctcgtcctggccttgctcctcgccaaaaaagtggcttcacacacaccctcactgttacgcgacgtgttccatacaaccgtgaacttcatcaaccagaacctgcggacctatgtgaggtcacttgccaggaacggaatggactag

SEQ ID NO: 27524 - DNA, 1353 bp, synthetic construct
  misc_feature 1..1353: note = Description of Artificial Sequence: Synthetic coding sequence
  source 1..1353: mol_type = other DNA
atggaagagccacagaaatcttatgttaacacgatggatctggagagagatgagcctttgaaaagtaccggcccacagatttcggtgtccgagttttcctgtcattgctgttacgacattctggtgaaccccaccacactgaactgcggccattctttctgtagacattgtctggcattgtggtgggccagttcaaagaagactgaatgtcccgaatgcagagagaaatgggaaggttttcctaaggtctccattctccttcgcgacgctattgagaagttgtttcccgacgccatccggctgagatttgaggacatccagcaaaataatgacatcgtgcagtcgttggcagcgttccaaaagtacggcaatgatcaaatcccactggcccctaacaccggcagagccaaccagcaaatggggggaggtttcttcagtggtgtcttgacagctttgacaggcgtggccgtggtacttttggtctaccactggagttcgcgcgagagcgagcacgaccttttggtgcacaaggctgtggccaaatggaccgcagaggaggtcgtgctatggctcgaacagctggggccttgggctagcctctaccgcgagcggttcctaagcgagcgtgtgaatggccgtcttcttctcaccctaaccgaggaggagtttagtaaaactccgtacaccatcgaaaactctagccaccggcgagccattctgatggagctggaacgcgtcaaggcgctgggagtgaaacctcctcaaaacctttgggaatataaggccgttaaccctggccgatcactttttctcctgtatgcgttaaaatcatccccacggctctcccttctctatctctatctgttcgattacacagacacttttctgcccttcatccacacaatatgtccattacaggaggacagtagcggcgaggacatcgtcacgaagttgttggatctcaaggagcctacgtggaaacagtggcgggagttcctggtgaagtattcatttctgccgtaccagctgatagccgaatttgcctgggattggctggaagtccactactggacatcacgtttcctgataattaacgccatgttactttcagtactggaacttttctccttttggaggatatggagccgcagcgagctgaagaccgtcccacagaggatgtggagtcacttttggaaagttagcacccagggtctatttgtcgctatgttttggcccctcataccgcagttcgtatgcaattgcctgttttattgggccctctactttaatccaatcattaatatagatctcgtcgtgaaagagctgaggcgccttgagacccaggtattatag

SEQ ID NO: 27525 - DNA, 969 bp, synthetic construct
  misc_feature 1..969: note = Description of Artificial Sequence: Synthetic coding sequence
  source 1..969: mol_type = other DNA
atggtgggaattttcaaggaaaacaggatgtctaggatgcagcggaaaatgggcagattcccccaatcccagtacagtccacaggtcgttctgcttgtttatcattggtctagtagagaatctgagcacgatctattggtgcacaaagctgtggccaaatggacggccgaggaagtcgtgctctggctagagcagttgggaccctgggccagcctgtatagggaaaggttccttagcgaaagggttaacggacgactgctgctcaccctcaccgaggaggagttcagcaagactccatacaccatcgaaaactctagtcacaggcgtgctatcttgatggagctcgagcgagtcaaagcccttggagtgaagccccctcagaatctgtgggagtacaaggccgtcaatcctgggcgttccctgttcctgctctacgccctgaagagttctcccaggttgtccctgctgtatctgtacctttttgattacaccgacacgtttctccccttcatccatactatatgcccactgcaggaggatagttcaggcgaggatattgtgactaaactgcttgaccttaaggagcccacatggaagcagtggagagagttcctcgtgaaatattcgttcctgccttatcagctcatcgccgaatttgcctgggattggctcgaggttcactattggaccagcaggttcctgatcattaatgcgatgctgctgtccgttctggagctattcagtttttggaggatctggtctaggagtgagctgaaaactgtgccccagagaatgtggagccatttctggaaggttagcacacaaggccttttcgttgctatgttctggcctctgattccacagtttgtctgcaactgcctcttctactgggcgctgtatttcaacccgatcattaatatcgaccttgtagttaaggagctacgcaggcttgaaactcaggtgttatag

SEQ ID NO: 27526 - DNA, 4254 bp, synthetic construct
  misc_feature 1..4254: note = Description of Artificial Sequence: Synthetic coding sequence
  source 1..4254: mol_type = other DNA
atggctgccgtacctcagaacaatctgcaggaacagttggagaggcacagcgccaggacactgaacaataagctcagtctctctaagcctaaattcagcggatttacattcaagaagaaaacttcgtccgacaacaatgtgagcgtaacgaatgtaagcgtggcgaagactccagtgctgcggaacaaagatgtcaacgtgacggaggatttttctttcagcgagcctctcccgaatactactaaccaacagcgggtgaaagacttctttaaaaacgccccagccggtcaggaaacacaacgagggggaagcaaatctttgttaccggattttctgcagacacctaaagaggtggtttgcacgacccagaatacccccacagtcaagaaaagccgcgacacagcccttaagaagctcgagttttctagcagcccagactcactcagcacgataaatgactgggacgatatggatgatttcgacactagcgaaacatctaagagtttcgtgacaccaccccagagccatttcgttcgtgtgagcaccgcccagaagagtaaaaagggtaaaaggaatttctttaaagcccaactgtataccacaaacaccgtcaagacggacctgcctccgccatccagcgagtccgagcagatcgacttaaccgaagaacagaaggacgactcagaatggctgtctagtgacgtgatttgcatcgatgacggccctattgcagaggtgcacattaatgaggacgctcaagagagtgattctctgaaaacacatctcgaggatgaacgggataattcagagaaaaagaagaatctggaagaagcagagttacacagcaccgaaaaggttccttgcatcgaatttgatgatgacgattatgataccgatttcgttccaccttcccctgaggagattatatcggcctcaagctcctcatctaagtgccttagcaccttgaaagatctggacacctccgaccgcaaagaagatgtgctgtctacttccaaggatctgctgagcaagcccgaaaaaatgtctatgcaagaactaaaccccgagacctcaacggattgcgatgctaggcagatctctctgcagcagcaactcatccacgtgatggagcatatttgcaaactcatcgataccattcccgacgataaactgaaactgttggactgtggcaatgagttgttgcaacaacgtaatataagaaggaaacttctaactgaagtggacttcaataagagtgatgcttcactgctgggctcgttgtggcgctacaggcccgacagtctggacggccctatggagggcgactcttgtccgactgggaatagcatgaaggagctgaatttttcccacttgccatccaattcagtaagcccaggcgactgcctgctgactaccacgttagggaaaacaggattttccgcaacccggaagaatctatttgagcggccactgttcaatactcatcttcagaaatctttcgtctccagtaattgggcggagacccccagactagggaagaagaacgagtctagctactttccagggaatgtgctgacctccaccgccgtcaaggatcaaaacaagcacaccgcctctatcaatgaccttgaaagggaaactcagccctcttatgatattgataacttcgacatcgatgatttcgatgatgacgacgattgggaggacattatgcacaatttggctgcttcaaagagctcgaccgcggcataccagcccatcaaggagggcaggcccatcaagtccgtgtcagagcgactgagcagcgcaaagacagattgtctgcctgtctcgtcaacagcccagaatattaacttcagtgagtccatccagaattacacagacaaatccgcccaaaatctcgcttcccggaatctgaaacacgagaggtttcagtctctttcattcccccacactaaagaaatgatgaaaatatttcacaagaaatttggcctgcataatttccggaccaatcaactggaggcgatcaacgcggcactcctcggagaggattgctttatcctgatgcctaccggtggcggtaaatctttgtgctatcagctgcccgcttgcgtttcacccggagtcaccgtggttataagccctctccgcagcttgatcgtggaccaagtgcagaagttaacatctctagatattcctgcaacctacctgacaggagacaagacagattctgaagctacgaacatctacctgcagctctccaaaaaggatccaattatcaaactgctctatgtgacaccggaaaaaatctgtgcaagcaacaggctgatcagcactctcgagaacctgtatgagagaaaattgctggcaaggtttgtaattgatgaggcccactgtgtttctcagtggggacacgatttccgccaggattataaaaggatgaatatgcttcgacagaaattcccttctgttcctgtcatggcccttacggccaccgcaaatccaagagtgcagaaagatattcttactcagctcaaaattctgagaccgcaagtctttagcatgagctttaacaggcacaatttgaaatactacgtattgccaaaaaagccaaagaaggtggcctttgattgcttggagtggataaggaagcaccacccatatgattctgggatcatttactgcctgtctcgcagggagtgcgatacaatggccgataccctgcaaagagatggattggccgctctggcgtatcacgccggattgtcagacagcgctcgcgatgaagtccagcagaagtggatcaatcaggacgggtgtcaggtgatctgcgccactatagccttcggcatggggattgacaagcccgacgtgaggtttgtgatccacgcctctcttcccaagagcgtcgaggggtactatcaggaatcaggtagagccggacgggatggggaaattagtcactgtctgctgttctatacctatcacgacgtgaccagacttaagcggctgatcatgatggagaaggatggcaaccaccacacacgagagacccattttaacaatctgtatagtatggtgcattattgtgaaaacataaccgaatgccgcaggattcagctcctcgcatattttggggaaaacgggttcaatcctgacttttgcaaaaagcatccggacgtcagttgtgataactgttgtaagaccaaggactataagacacgcgacgtgaccgacgatgtgaagtcaatagttaggttcgtgcaggagcattcctctagccaggggatgcgtaacattaaacacgtcggaccaagcggcagatttactatgaatatgttggtcgacatcttcctaggttccaagtccgctaaaattcaatcaggaatattcgggaaaggatccgcgtattctcgtcacaacgccgagcgactgttcaagaagttaatactagacaaaattctggatgaagacctttacatcaatgctaatgaccaggcgatcgcttacgtcatgctgggcaataaagcacaaacagtccttaacgggaatctgaaggtcgatttcatggagaccgagaacagcagctctgtaaagaaacagaaagccctggtggccaaagtcagccaacgcgaggagatggtcaaaaaatgcctgggagagctgaccgaagtgtgcaaatccctgggcaaggtgttcggtgtgcactatttcaacatatttaacactgtaacgcttaaaaagctcgctgagagcttgagtagcgacccagaagtcttgctccaaatcgacggggtgactgaggacaagctagagaagtatggggcagaggttattagcgtgttgcagaagtacagcgaatggacatcgcctgctgaggacagctctcctgggatctcactgtctagctctaggggtcctggaagatccgccgcagaggagctcgatgaggaaattccagtttctagtcactatttcgcatctaagacaagaaatgagcgcaagagaaagaaaatgccagcaagtcagagatctaaaaggaggaagacggccagctctgggtctaaggctaaggggggttccgctacctgccgaaaaatctcttcaaagaccaaatcgagcagcatcattggctcttcatcagcgtcccacacttcccaggccacctccggagctaattcaaagttagggattatggcaccccctaaacctatcaaccggcctttcctgaagccttcgtacgctttttcctag

SEQ ID NO: 27527 - DNA, 3144 bp, synthetic construct
  misc_feature 1..3144: note = Description of Artificial Sequence: Synthetic coding sequence
  source 1..3144: mol_type = other DNA
atgtccatgcaggaactcaatccagagaccagcaccgactgtgatgcaaggcagatcagcctccagcaacaactgattcacgtgatggagcatatttgtaaactcatcgataccatacccgatgacaagctgaagttgttggattgtggcaacgaactgctacagcagcggaatatacgtcgtaaactcttgactgaagttgacttcaacaagtctgatgccagtctgttgggaagtctgtggaggtaccgaccggactctcttgatggaccaatggaaggagacagctgtccgaccggaaacagcatgaaagagctgaatttctctcatctgcctagcaattctgtcagtccgggtgactgcctgctgaccaccacactgggcaagaccggcttctcagctacgaggaaaaatttgttcgaacggcctctgtttaatacccatctgcaaaagagttttgtttcatctaattgggctgaaacacctcgcctcggcaagaaaaatgagagctcttattttccagggaatgttctcacctcgactgccgtgaaagaccagaacaagcacaccgcaagcatcaacgatctggagcgggaaacacaaccaagctacgatatcgataattttgacatagacgactttgacgatgatgatgactgggaagacataatgcacaacctcgctgctagcaagtcctccacagccgcatatcagccaattaaagaagggagacctataaagtccgtgtccgagcgccttagttcagccaagactgactgcctcccagtgagctccacagcgcagaacatcaatttttcagagtccatacagaattacacagacaagagcgcccaaaacctggcttcccggaaccttaagcacgagaggtttcaatccttgtctttcccgcacactaaggaaatgatgaaaatcttccataaaaaattcggcctgcacaacttccgaacgaatcaacttgaggccattaacgcagcactgctcggggaagattgtttcatcctaatgcctacagggggtggaaaaagcctgtgctaccaattgcctgcatgtgtcagcccaggggtgacggttgtgatttctccgctcaggtccctcatcgtcgaccaggtgcagaagcttacaagtctcgacattccagccacttaccttactggagacaagactgactctgaagctaccaacatctatcttcagctgagtaaaaaggatcctattattaagctgctttatgtaacacctgaaaagatttgcgcatccaataggcttatatcaactctggagaacctgtatgagcggaaacttttagcgaggtttgttattgacgaggcccactgtgtatcacagtggggacatgatttccggcaggactataaaagaatgaatatgctcagacaaaagtttcccagtgtgcccgtgatggcgctgaccgccactgccaatcctcgggtgcaaaaggacattctcactcaattgaagattctgcggccacaggtgttctctatgagcttcaatcgccataacttaaagtactatgtgctccctaaaaaaccgaagaaggttgcttttgactgcttggagtggatcaggaagcaccatccctacgactccgggattatatattgtttaagcaggagagaatgtgacacaatggctgatactttacaaaagtggattaaccaggacggctgccaggttatatgtgccactatcgctttcggtatgggcatcgataaaccagacgtcagattcgtgattcacgcctctctgcccaagtctgttgaaggctactaccaagaatctggccgagcaggcagagacggcgaaatctcacactgcctgctgttctatacttatcacgacgtcaccaggttgaagaggctaatcatgatggagaaagatggcaatcaccacacgagggagacacactttaacaacctatatagtatggtccactattgtgagaatataacagagtgcagaaggattcagctactagcctactttggtgaaaacggattcaaccctgacttctgcaaaaagcatccagacgtgtcctgcgacaattgttgcaaaaccaaggattataagactcgggacgtgaccgatgacgtgaaatccatagtcaggtttgtgcaggaacactcgagctctcagggtatgcgcaatatcaaacacgtagggccatcaggccgtttcacaatgaacatgctcgttgacattttcttaggctcaaagtctgcaaagattcagtcaggcattttcggaaagggcagcgcctacagcagacacaacgccgagcggctattcaagaaacttatcctcgacaaaatccttgacgaggacttgtatatcaatgccaacgatcaggcaattgcttatgtgatgcttggcaacaaagctcaaacggtgctgaacgggaatctaaaggtggactttatggaaacggaaaacagcagctcagtgaagaagcagaaggcgctcgtcgccaaagtttcccaacgggaagagatggtgaagaaatgcctgggggagcttaccgaggtgtgcaaaagcttgggcaaggttttcggggtacactattttaacattttcaataccgtgactctgaagaaactggccgaatccctatcaagcgatcctgaagttctcttacagattgacggcgtcactgaggataagcttgaaaagtacggcgctgaagtcatctctgtattgcagaagtactcggagtggacctctcctgccgaggacagtagccccggtataagcctgtcaagtagccgcggacctggccgatcagccgctgaggagttggacgaagaaatccccgtgagcagtcactatttcgcatctaaaaccagaaatgagcggaagaggaagaagatgcccgcatcacagagatccaaaagaagaaagaccgcctcgtccggttctaaagccaagggtgggtccgcgacctgcagaaaaatctccagtaagaccaaatccagttcgattatcggatcatcaagcgccagtcacacttcccaggctacttctggggcaaatagcaagctcggaattatggcaccccctaagcctattaataggcccttcttaaaaccaagttatgccttctcatag

SEQ ID NO: 27528 - DNA, 1560 bp, synthetic construct
  misc_feature 1..1560: note = Description of Artificial Sequence: Synthetic coding sequence
  source 1..1560: mol_type = other DNA
atgaatatgctccgccagaaattcccatcagttccggttatggcactgactgccaccgcaaaccctagggttcaaaaggacatccttacccagctgaagatccttcgtccgcaggtcttttccatgtcctttaaccgacataatcttaaatattatgtgctaccgaaaaagcccaagaaggttgcatttgactgccttgaatggattagaaagcaccatccatacgattcaggtattatctattgtttgagccgccgtgagtgtgataccatggccgacacactgcagcgcgatgggctcgctgctctggcctatcacgctgggttaagcgacagcgcaagggacgaagtgcaacagaaatggatcaaccaggatggctgtcaggtgatctgcgctacaatcgcatttgggatgggcatcgacaaacccgacgtgcgtttcgtaatacatgcgtctctcccaaagtctgtagaagggtattatcaggagagcggaagagctggacgtgacggtgagatcagtcactgccttctgttttatacataccatgatgtgacccgcttgaagcgcctgattatgatggagaaagatggcaaccaccacacacgggagacccacttcaataatctatatagtatggtgcactattgtgagaatataacggagtgccggaggatccagctgcttgcatatttcggggaaaacgggtttaatcccgacttctgcaagaaacaccctgatgtcagttgtgacaactgttgcaagaccaaggattataagactagggatgtaaccgacgatgtaaaatcaattgtgaggtttgtccaggagcattcttcctcgcaggggatgcgaaacatcaagcacgtaggaccaagcggcagatttacgatgaacatgctcgtggatatctttctcggatccaagtcagccaagattcaaagtgggattttcggcaagggttcagcatattcccggcacaatgccgagaggctgttcaagaaactgatcctcgacaaaatcttggacgaggatctatatattaacgctaatgaccaggccattgcttacgttatgctcgggaacaaagcccagactgtcctgaacggcaatctcaaggtagacttcatggaaaccgagaattcaagcagcgtgaaaaagcagaaagcccttgtcgcaaaggtttcgcagagagaagagatggttaaaaagtgcctgggggagctcaccgaggtgtgcaagagtctcggtaaggtgttcggcgtgcactatttcaacattttcaacacagttacactaaagaagttggctgaatctttgtcatctgacccagaggttctgcttcagatcgacggggtgacggaagacaaattagagaagtacggcgcagaggttattagtgtgctgcagaaatactcggagtggacatctcctgccgaggatagttctcccggaatcagcttgagcagtagccgtgggccaggccgttctgcggcagaggaactggacgaggagatcccggtcagctcccactatttcgctagcaagactcgtaattag

SEQ ID NO: 27529 - DNA, 981 bp, synthetic construct
  misc_feature 1..981: note = Description of Artificial Sequence: Synthetic coding sequence
  source 1..981: mol_type = other DNA
atgcaccggaccacccgcattaaaatcaccgaattaaacccacacctgatgtgtgtgctttgcggaggctatttcattgacgcgactacgattatcgagtgtctgcactccttttgcaaaacttgtattgtacggtatcttgaaaccagcaagtactgccctatttgcgacgtgcaggtgcacaagactcgtcccttattgaatatccgctcagacaagacgctccaagatatagtgtacaaattagtgcctggcctcttcaagaatgaaatgaaacggcgacgcgacttctatgccgcacatccttccgcggatgctgcaaatggctccaacgaggacagaggagaggtggccgatgaggataaaaggatcatcaccgatgacgaaattatttccctcagcatcgaattctttgatcagaacagactggatcggaaggtgaacaaggataaagaaaagtctaaagaagaggtcaacgacaagagatacctgagatgtccggcagccatgaccgtcatgcatctgaggaagttcctccggagcaaaatggacatcccgaacacattccagatcgatgtcatgtatgaggaggagccattgaaggattactatacactgatggacatcgcatatatatacacatggagaagaaatggaccattaccactcaaatatagggtgcgccctacttgcaagcgaatgaagatctcacaccagcgggatggtctaactaacgccggtgagcttgaaagcgattctggaagcgataaggcaaacagtccagcaggcggtatccccagtacctctagttgcctgccaagcccatcaactcctgtacaatcccctcacccacagttcccccatattagctctacaatgaatggcacatccaactctccttctgggaaccatcagtcttctttcgccaacagaccgaggaagtcatctgtgaacgggtcaagcgcaacatcgagtggctag

SEQ ID NO: 27530 - DNA, 717 bp, synthetic construct
  misc_feature 1..717: note = Description of Artificial Sequence: Synthetic coding sequence
  source 1..717: mol_type = other DNA
atgtgtgtgctctgtgggggatattttattgacgctactaccatcatcgaatgtcttcacagtttttgtaaaacctgtatagttcgatacctagagacttccaagtattgtccgatctgcgatgttcaggtgcacaaaactagacccttacttaacatccgtctagacaggaaagtgaacaaagacaaagagaagtcgaaagaagaggtgaatgataaacggtatctaaggtgcccagccgctatgaccgtcatgcacttgcgcaagtttctgaggagtaagatggatatacccaacacatttcagattgatgttatgtatgaggaggagcctctgaaggattactacacactcatggacattgcgtatatctatacctggcgtaggaacgggcctctcccattaaagtaccgtgtcagacctacatgcaagcggatgaagatttctcaccagcgggatggcctgactaacgctggggaactcgagtcagattcaggctctgacaaggcgaactcccctgctgggggtatcccatctacctcatcatgtctcccgtcaccctcaacacctgtgcagtcaccacacccacagttcccccatatatcctcgactatgaatggaactagtaacagtccttcgggcaaccaccaatcatcctttgccaaccgtccacggaaaagctcagtgaacggctctagcgctactagcagtggttag

SEQ ID NO: 27531 - DNA, 318 bp, synthetic construct
  misc_feature 1..318: note = Description of Artificial Sequence: Synthetic coding sequence
  source 1..318: mol_type = other DNA
atgcatcgtaccacacggatcaagatcactgaattgaaccctcacctcatgtgcgtgctctgcgggggttatttcattgatgccactactatcattgaatgtttgcactccttctgcaaaacgtgcatcgtgagatatctggaaactagcaaatattgccccatttgcgacgtgcaggtgcacaagacgagaccccttttaaacatacgaagtgataagacacttcaggatatagtgtataagctggtcccagggctgttcaagaacgagatgaagcgacgcagagacttttacgccgcacacccgtccgcagactag

SEQ ID NO: 27532 - DNA, 624 bp, synthetic construct
  misc_feature 1..624: note = Description of Artificial Sequence: Synthetic coding sequence
  source 1..624: mol_type = other DNA
atgcacagaaccacacggattaaaatcaccgagcttaatccgcacctgatgtgtgttctgtgcggcggttattttattgatgccacgacgattatcgagtgtttgcatagtttttgcaaaacatgtattgtcagatatcttgagaccagcaagtactgcccgatctgtgatgtccaggtgcacaagacacgcccactgctcaacattaggagcgataagactctgcaagacatcgtgtataagctggtgccgggactttttaaaaatgagatgaagaggcgtagagatttttacgctgcccacccttcggccgacgctgctaatggatctaacgaggataggggggaagtggccgatgaggacaaaaggatcatcaccgatgatgaaatcatcagcctgtcgatagagtttttcgatcagaataggctggatcgtaaggtgaacaaagataaggaaaagtcgaaggaggaagttaatgacaagagatatctcagatgccctgcagccatgacggtgatgcacctgcgtaaattcctgaggagcaagatggacattcccaatacttttcagattgatgttatgtatgaggaggagccacttaaggattattacaccttgatgtag

SEQ ID NO: 27533 - DNA, 453 bp, synthetic construct
  misc_feature 1..453: note = Description of Artificial Sequence: Synthetic coding sequence
  source 1..453: mol_type = other DNA
atgcaccgcaccactcggatcaaaatcacggagctaaaccctcacctaatgtgcgtgctctgtggagggtattttatcgacgccacaacaattattgagtgtcttcattcgttttgcaaaacctgcatagtgaggtacctggagacgtccaaatattgccctatctgcgacgttcaggtgcacaagaccagacccctgttgaacattcgcagcgataaaacgttacaagacatcgtttacaagctcgtgcccggactattcaagaatgagatgaagcgcaggagagacttttatgccgctcacccaagcgcggacgccgctaatggatccaacgaagaccggggagaagtcgcggacgaagataagaggattatcaccgatgacgagattataagcctttccattgagttttttgaccaaaaccgccttgaccggaaagtgaataaggactag

SEQ ID NO: 27534 - DNA, 555 bp, synthetic construct
  misc_feature 1..555: note = Description of Artificial Sequence: Synthetic coding sequence
  source 1..555: mol_type = other DNA
tacttcattgatgccacaaccataatcgagtgcctgcacagcttctgtaaaacatgtatcgtgcggtatctagagacaagtaaatactgtccaatctgcgatgttcaggttcataaaaccagaccgttgctgaatatacgcctggaccgcaaggtgaataaagacaaggagaagtcaaaggaagaggtgaacgataagagatatttacgctgtcctgctgctatgaccgtgatgcacctgcgaaagtttctgcgcagtaaaatggatattcccaatacatttcagatcgatgtcatgtacgaagaagaacctctgaaggactactacacattaatggatatcgcctatatctatacatggaggaggaacggcccactgccccttaagtaccgtgtaagacccacgtgcaaacgcatgaagatctcgcaccagagggatggattgactaacgccggagaactcgaaagtgattctggaagcgacaaggccaatagccccgcaggaggcatacctagtaccagctcatgcctaccctcccccagcacgccagtttag

SEQ ID NO: 27535 - DNA, 279 bp, synthetic construct
  misc_feature 1..279: note = Description of Artificial Sequence: Synthetic coding sequence
  source 1..279: mol_type = other DNA
atgcatagaacaacaagaataaagatcaccgaacttaatccgcatcttatgtgcgtgttgtgtgggggatactttatcgacgctaccaccattatcgaatgtctgcatagcttttgcaagacatgtatcgtcagatatctggaaaccagcaagtattgtcccatttgtgacgtccaagttcacaaaacccgacccttgctgaatatcagatcagacaagaccctccaggatatcgtgtataagctggttcccggactgtttaccgctaacggatcttag

SEQ ID NO: 27536 - DNA, 2193 bp, synthetic construct
  misc_feature 1..2193: note = Description of Artificial Sequence: Synthetic coding sequence
  source 1..2193: mol_type = other DNA
atgcccggtgttgcaagactcccactcctcttaggcttattgcttcttccaagaccgggaaggccgctggatctcgcggattatacctatgaccttgctgaggaagacgattctgaacctctcaattataaagatccctgtaaggccgctgccttcttgggggacatcgccctcgatgaagaggacctgcgcgcatttcaggtacagcaggccgtggatctgcgccgtcatacagccaggaaatcctctatcaaggccgcagtgccaggcaacacaagcactcccagttgtcagtccactaacgggcagccccaaagaggtgcatgtggtcgctggcgagggaggtctcgcagcaggcgagctgctacctcccggccagagagggtttggcccgatggagtgattcctttcgtcatcggcggaaattttaccggatcccaaagggcggtcttcagacaagcaatgcggcattgggagaagcacacctgcgttactttcctcgaacgcacagatgaggactcctacatcgtatttacctaccgaccctgtggttgctgtagctatgtgggacggcgtggcggtgggccacaggctatttccatcgggaaaaactgtgacaagttcggcatagtggtgcacgagctcggccatgttgtgggtttttggcacgaacacacccgaccagatcgggatcgccacgttagcatcgtcagagagaacattcagccagggcaggaatacaacttccttaagatggaacctcaggaggtcgagagcctgggagaaacatacgactttgatagcatcatgcattacgcgagaaatacattcagccgcggaatattcctggataccatcgtccccaagtacgaagtgaatggtgtgaagccgcctattggccagaggaccaggctgagcaaaggcgatattgcacaggcacgaaagctgtacaaatgtccagcttgcggcgaaaccttgcaggattctactggtaacttttcgtcaccagagtaccctaacggttattccgctcatatgcactgcgtgtggcgcatcagcgtgacccccggtgaaaaaattattctcaacttcacatcccttgacttgtatagaagcagactgtgctggtacgactacgttgaagtccgtgacggtttttggcgaaaggctccacttagaggcaggttttgtgggtcaaagctgcctgaacccatcgttagcaccgactccagactgtgggtggagttccgctcgtcatctaactgggtgggcaaagggttctttgcggtttatgaggccatctgcgggggagacgtcaaaaaggactatgggcacatccaatcccccaactaccccgacgactatcggcctagcaaggtttgcatttggaggatacaggtgagtgaggggtttcatgtgggtttgacattccagtctttcgaaatagagcgacacgattcctgtgcatatgattatcttgaggtgagggacggtcattcagagagttccactctgattggccgttactgcggatacgaaaagcctgatgacataaaatccacatcctctcggctttggctgaagttcgtttcggacggttcgataaacaaggccggtttcgccgttaacttctttaaagaggttgacgagtgtagtaggccaaacagggggggatgtgaacagcgctgcctaaataccttgggcagttacaaatgtagttgtgatccagggtacgagctagcaccagataagcgcagatgtgaggcagcatgtggaggcttcctgaccaagcttaatggttcaatcacctcccccggatggccgaaggagtatcctcctaacaaaaattgcatttggcaactcgttgcacccacccaatataggatctcacttcaatttgacttttttgagacagaggggaacgacgtctgtaagtatgactttgtggaggtgaggtctgggcttacggctgactctaagttgcatgggaagttctgtggttctgaaaagcctgaagtgatcacatctcagtacaacaacatgcgcgtagagttcaagtctgataatactgtctcgaaaaaaggattcaaggcccattttttttcagagaaacgtcctgccctgcagccccctagaggcagaccgcaccagttgaaattccgcgtacagaagcgaaataggacgcctcaatag

SEQ ID NO: 27537 - DNA, 2961 bp, synthetic construct
  misc_feature 1..2961: note = Description of Artificial Sequence: Synthetic coding sequence
  source 1..2961: mol_type = other DNA
atgccgggtgtggccaggctccccctattactcggcctgctgctgcttcctagacctggtcgccctttagatctggccgattatacttatgatctcgccgaagaggacgacagcgagccactgaattataaggatccctgcaaggccgcagctttcctcggagacatcgcactcgatgaagaagacctgagagcctttcaggtgcaacaagccgtcgatctccggaggcataccgccagaaagtcaagcatcaaagcagccgtccctggcaatacgtcaacccccagttgtcagagcacgaacggtcagccgcagcggggagcatgcggtcgatggcgcggacggtcccgatctcggagggctgctaccagcagaccagagagggtctggccagatggggtcatacctttcgttatcggcggtaacttcaccggttcgcagagagccgtgttccggcaagcaatgcggcactgggaaaagcacacgtgcgtgacatttctcgaacggactgacgaggactcctatattgtgttcacttaccgcccttgtggttgttgcagctacgtcggacgccgaggcggaggccctcaggctataagtatcggaaaaaactgcgataaatttggcatagttgtgcatgaactgggacacgtggttgggttttggcacgaacacacccgcccagacagagatcgccatgtgtctatcgtccgtgaaaatattcagccagggcaagagtataatttccttaagatggagcctcaggaggtggagagtctgggcgagacatacgatttcgatagcattatgcattatgctcggaatacctttagtcgaggtatattccttgacactattgtacctaagtatgaagttaacggagtgaagccaccaatcggacagagaacgcggttaagtaagggggacatcgcacaggcccgaaaactatacaagtgccccgcttgcggagagactctgcaggattctaccggcaatttctccagtccagagtacccgaacggttattcagcccatatgcattgtgtttggcgtatctcagtcacacccggtgagaagatcatcctgaacttcaccagcctggacctgtaccgctccagactgtgctggtatgactatgttgaggttcgagacggattctggcgcaaggcaccactgcggggtaggttttgcggttccaagctcccagagcccattgtgtctaccgacagcaggttgtgggtcgaatttcgttcaagctccaactgggtcgggaaaggctttttcgcggtgtacgaagcgatctgcggcggagatgttaaaaaggactacgggcacattcaatcccccaactatcccgatgattacagaccgtctaaagtctgcatctggagaatccaggtgtccgaagggtttcacgtcggcctgacattccagagcttcgagatcgagcgacacgatagttgcgcgtatgactaccttgaagtgcgggacggccactcagaatcaagcaccttgatcggtcgctactgcggatatgagaaacctgatgatattaagtctacatcaagccggctgtggctcaagtttgtaagtgatggttctatcaataaagccggatttgccgtcaatttcttcaaggaagtcgacgaatgtagcaggccaaaccggggtggctgtgagcagcggtgccttaatacattaggtagctacaagtgctcgtgcgatccagggtatgagctcgcccctgacaagcgtagatgtgaagccgcttgcggtgggttccttacgaaactgaacgggagcatcacgtccccaggttggccaaaagagtatcctcccaataaaaattgcatttggcagctcgttgctccaacccagtatagaatcagtctgcagttcgattttttcgagacagaaggaaacgacgtatgcaaatatgatttcgtagaagtgcggtccggactcacggccgacagtaagctgcacgggaaattctgcgggagtgagaaaccagaagttatcacctcccagtacaacaatatgcgggtcgaatttaaaagcgataataccgtctcaaagaagggattcaaggcgcattttttctccgacaaagacgaatgcagtaaggataacggaggctgtcagcaagattgcgtgaacacatttgggtcatacgagtgccagtgtcgctccggcttcgttctgcacgataacaagcacgactgtaaagaggctggttgcgatcacaaggtgactagtacatctggaaccatcacaagtcccaattggcccgataagtatccttctaagaaggaatgtacttgggctatatctagtacaccaggacacagggtaaagcttaccttcatggaaatggacatcgaatcacagcctgagtgtgcatacgatcacctggaggtgttcgacggtagggacgctaaggccccagttcttggcagattctgtggatccaagaagccggagcccgtgctcgcaaccgggtcccgcatgtttttgaggttttattccgacaactccgtccagcgcaagggttttcaggctagccacgcaacagagtgcggaggccaggtgcgggctgatgtaaagaccaaggacctgtattctcatgcacaattcggtgacaacaactatccaggcggagtggactgcgagtgggtgatcgtggccgaagagggctacggggtggaactggtgtttcagacattcgaggtggaagaagagacagattgcggctacgattacatggaactgttcgatgggtacgattccacagctcctcgcttgggacgatattgcggatccgggccacctgaagaggtgtacagcgcaggcgactccgttttggtgaagttccatagtgatgatacaatcacaaagaagggattccatctaaggtacacatcgactaaattccaggataccctgcactcgcgcaaatag

SEQ ID NO: 27538 - DNA, 909 bp, synthetic construct
  misc_feature 1..909: note = Description of Artificial Sequence: Synthetic coding sequence
  source 1..909: mol_type = other DNA
atgcccggtgtcgcaagacttccactgctcctgggattattactattacctcggcctggcagacccctggaccttgccgactatacatacgacctcgcagaggaagatgactcagaacctctaaattacaaagacccatgcaaagccgctgctttcctgggggacattgcgctagacgaagaggacctaagggcttttcaggtgcaacaggccgtagacttgagacggcacaccgctcgaaaaagttcaatcaaggcggcagtgcccggaaacacctcgaccccatcttgccagtccactaacggccagccccaaagaggtgcctgcgggcgttggagagggcgaagccgctcccgacgcgcagcaaccagcaggccagagcgggtgtggcccgatggagtaattccgttcgtcataggaggcaattttactggtagccagcgggctgtatttagacaggcgatgcggcattgggagaagcacacttgcgttacttttctggagagaaccgatgaggactcgtacattgtgtttacatatcgaccttgcggttgttgttcgtacgtcgggagacgaggaggaggtccacaggctatctccattgggaaaaactgcgataagtttggcattgttgtccatgaacttggtcacgtggttggattttggcacgagcacacacgccctgacagagatagacacgtcagcatagtgcgcgagaacatccagcccggtgtgcttcactcgagtctgctgctgctatcatgcgggtctagaaatggagcctcatttccatgttcactagagagtagcatacaccaggccttatgttggacgggactctttctgcggccatctccctttcctcggctccctctggcagcgcctagaacgttaagagctggagtgtag

SEQ ID NO: 27539 - DNA, 1869 bp, synthetic construct
  misc_feature 1..1869: note = Description of Artificial Sequence: Synthetic coding sequence
  source 1..1869: mol_type = other DNA
atgccgggtgtggccaggctcccactcctgctgggcctgcttctcctgccgagacccggaagaccgttggatctcgccgactatacttatgatctggcagaagaggatgacagcgagcctctgaattataaggacccttgcaaggccgcagcgttcctcggggatattgctcttgatgaagaggacttaagggcttttcaggtgcaacaggccgtggaccttagacgccacactgcccgtaaaagcagtataaaagccgcagtgccgggaaacaccagtacccctagttgccagtccacaaatggacagccccagcgaggcgcttgtggccgatggcgcggaaggagtagatccaggagagcggctacatccaggccagaacgcgtgtggccggatggagtgatcccattcgtgattggcggaaacttcaccggaagccagagagctgttttcaggcaggccatgcgtcactgggaaaaacatacatgtgttaccttcctggaaaggactgatgaggacagttatatagtgtttacctatagaccatgcgggtgctgctcttatgtgggcagaaggggcggtggccctcaggcaatttcgatcgggaagaactgtgataagttcggtatcgttgttcatgagctcggtcatgtcgtcgggttttggcatgagcacaccagacccgatcgggatcggcatgtgtctatcgtgagagagaacatccagcccggacaggagtacaactttcttaagatggagccacaggaggttgaatctctgggcgaaacctatgatttcgattccattatgcactacgctagaaataccttctccagagggatttttttagacaccatcgtacctaagtatgaagtgaatggcgtgaaacctcccattgggcaaaggaccaggttgagcaagggtgatatagcacaggcgcgtaagttatacaaatgtcccgcatgcggtgagaccctgcaggatagtacgggcaacttttcctcgcctgaataccctaacggttattcggcccacatgcattgcgtttggcgcatctctgtcacgcccggagagaagataattcttaattttacatcgctggacttgtacaggagcagactgtgctggtacgactatgtggaggtgcgtgatggcttctggcgcaaagctccactaaggggtagattctgcggttcaaaactgcccgagccaatcgtgtctactgacagtcgcctgtgggtcgagttccgaagttcgtctaactgggttggcaaaggcttctttgccgtttatgaggccatttgtggcggagacgtgaagaaggactatggacacatccagtcaccgaactaccctgacgactatcgcccatcaaaagtgtgtatctggcggatacaggtgagcgagggattccacgtggggttgaccttccaaagcttcgaaatagagcgccacgactcctgcgcgtacgactatctggaggtacgagatggccactctgagagcagtactttgataggtagatactgcggatatgagaaacctgacgacatcaagtcgacctcttcccgcctgtggctgaagtttgtgtcggacgggtctattaataaggcgggattcgctgttaatttttttaaggaagtagatgagtgctcacgacccaatcggggaggatgcgaacagaggtgcctaaatactttggggtcttacaaatgtagctgtgacccagggtacgaattggcccctgacaagcgaaggtgtgaggggtgctacgacctgcaggtgggtaagcctctcctgtgggatcgccattgctttcgtctgtctacccacggcccagaaatgctgggcacagcattgcgaggttag

SEQ ID NO: 27540 - DNA, 2472 bp, synthetic construct
  misc_feature 1..2472: note = Description of Artificial Sequence: Synthetic coding sequence
  source 1..2472: mol_type = other DNA
atgccgggtgtggcgcgactccccctgctcctcggcctgctcctcctcccccgaccaggtcggcctcttgacctggccgactatacctacgacctggccgaagaagacgactcggagccattaaactataaggacccctgtaaagccgcagcttttctgggggatatcgctcttgatgaggaagatctccgggcatttcaagtccaacaggccgtggatctccggaggcacaccgctcggaaaagctccattaaggccgctgttccagggaatacttcaacccccagttgccagtccacaaatggacagcctcagagaggcgcttgtggaagatggagagggagaagcagaagtaggagagcagccacgtctcgacccgaaagagtttggccagacggggtgatcccctttgtgattggcggtaacttcaccggtagtcagcgggcagtgttcagacaggctatgaggcattgggaaaagcatacctgtgtgacattcctggagcgcactgatgaggattcttacatagtgtttacatatagaccctgtggctgttgctcatatgtcgggaggagagggggaggcccacaggcgatatcgattggaaaaaattgcgacaagtttgggatagtggtacacgagttgggtcatgtggtaggattctggcatgagcacacgcgtccggatcgtgatcgccacgtttccattgtgcgtgaaaacatccagcccggtcaggaatataattttctgaagatggagccgcaagaggtggagagcctgggagaaacctatgactttgattcaatcatgcactacgcacgtaatacatttagccgaggaatctttctcgacacaatcgtgcctaagtatgaggttaatggggtcaaacccccaatagggcagcgaacaaggttgtctaagggggacatagcacaggcaaggaagctttacaagtgccccgcttgtggagagaccctgcaggactcaaccgggaatttcagctctccagagtatcccaatgggtacagcgcccatatgcattgtgtatggagaattagtgtgacgcctggggagaagatcatcttgaacttcaccagtttggatttatataggagccgcctctgttggtacgattatgttgaggtacgcgatggcttttggcggaaggctcccttacgcggacgcttctgcgggagcaaacttccagagcctattgtaagcacagactcccgcctgtgggtggagttcagatcaagctctaactgggtaggcaaggggttctttgctgtgtacgaagccatttgtgggggtgatgtgaagaaggattacggacacattcagagccccaattacccggatgattaccgcccttccaaggtgtgcatctggcggatacaggtctcagaggggttccatgttggcctgacattccaatcatttgaaatcgagaggcatgatagctgcgcttacgactatctggaggtgcgggacggacactcagagagtagcaccctgatcggacgctactgcggctatgagaaacccgatgatatcaagtccacgtcttctagactctggctcaaatttgtatctgacggctcaataaacaaagctggcttcgctgtgaatttctttaaggaggtcgacgagtgtagccgaccaaatcgtggcggatgtgagcaacgctgcctgaataccctgggttcatacaagtgttcgtgtgaccctggttacgagctggcacctgataagagaagatgtgaggctgcctgtgggggtttcctgacaaaactcaacggatccattacttctcccggttggccgaaggagtacccccctaataagaattgcatttggcaactggtcgccccaacccagtaccgtatttccttgcaatttgacttcttcgaaacggaaggtaacgacgtatgcaagtacgactttgtggaggtgcggtctgggctcaccgctgatagcaaactgcatggcaagttctgcggaagtgagaaaccggaggttataacctctcaatacaataacatgcgggtggagtttaagtctgataacacggtgagtaagaagggctttaaggcccattttttttccgttcttgaaggcgctggggacaggcactctcacctatccgggctcgagctattgctctgtccgcatgccttggttgataccgtacctgccccaccaagcgctctgcacggagatacacacgcacacactcatacccatgtgcacacgcactgccctatagcacaggaaacctgcaggggacctccgctgggggcatctcgactgagcccgcagggcccaggccatctgaccctggctccccaggaaggatcctacctggacttctgggacactcaccggggagaccctaagccacgtcgtcggcgaaaatcgttgaaaacattctctctaacgcctgctacttttcggggaatttgggcactctag

SEQ ID NO: 27541 - DNA, 2193 bp, synthetic construct
  misc_feature 1..2193: note = Description of Artificial Sequence: Synthetic coding sequence
  source 1..2193: mol_type = other DNA
atgccaggcgtcgcaaggctccccctcctacttggccttctgttactgcctcggcctggacgccctttggatctggctgactacacttacgacctcgccgaggaagacgatagtgaacccctgaactataaggacccatgtaaagctgctgcctttcttggggatatcgcgctagacgaggaagacctgcgcgcattccaggttcagcaggctgtggacctacgaagacacactgctagaaaatcctccataaaggcggcagtccctggcaataccagcacccccagttgtcagagcaccaatggccagcctcagaggggagcctgtggtcggtggaggggtaggtcaaggtctaggcgggctgctacctcacggcctgaaagggtgtggcctgatggagttataccttttgttataggcggaaactttacaggttcccaaagggcggtcttcaggcaggccatgagacactgggaaaaacatacatgcgttacgtttcttgaacgcacagatgaagatagctacatagtctttacttatagaccttgcggctgctgctcatacgtcgggagaagaggcggtgggcctcaggctatatccatcggcaaaaattgcgataaatttggtattgtagtgcacgaactaggccacgtcgtgggattttggcacgaacacactaggcccgatcgcgatcggcacgtctctattgtgagggaaaacatacagccaggtcaggagtacaatttcctgaaaatggaaccccaggaggtcgagtctttgggtgaaacctacgattttgacagcattatgcattatgccagaaatacattctctcggggaattttcctggacactattgtccccaagtacgaagtcaacggtgtcaagcctcccatcggacagcggactcggctcagtaaaggcgacattgctcaggcacggaagctgtacaaatgccccgcatgcggagagaccctccaggatagcaccggtaacttcagcagtccagaatatccaaacggctactcagctcatatgcattgtgtttggcgcatttccgtcaccccaggcgaaaaaatcattttgaacttcacaagcctcgacctgtacagatcaaggctgtgctggtacgactacgtggaagtgcgcgacggcttctggaggaaagcccctctgcggggaaggttctgtggctccaaactccctgagcccatcgtgtccaccgacagtagactgtgggtcgagtttcgcagttcctccaactgggtgggaaaggggttctttgccgtgtatgaagcaatttgtgggggtgacgtgaaaaaggactacggccatattcaatcacccaattatcccgacgactataggccctcaaaggtgtgcatctggcgcattcaagtgtccgaaggattccacgtcggtctgacctttcagtcatttgagatcgagcgacatgacagttgtgcgtacgactacctggaggtcagggacggacatagcgaaagcagcactctcattgggaggtactgtggctacgaaaagccagatgatattaaaagcacctctagtcgactgtggttgaaatttgtttcggacggctctatcaacaaggctggattcgccgtcaactttttcaaggaggtcgatgagtgctctagaccaaacagggggggatgtgagcaacggtgtctgaacacgcttggatcgtataagtgtagttgtgaccctgggtatgagcttgcacctgacaagagacgctgcgaggcggcatgcggaggattcttgaccaagttgaatggctctattacgtctcctggctggccgaaggagtacccaccaaataaaaattgtatctggcagctcgtcgctccaacccagtataggatatccctccagttcgatttctttgagacagaggggaacgatgtgtgcaagtacgactttgtggaagttaggagcggacttactgccgattcgaagttacacggcaaattctgcgggagcgaaaagcccgaggtcatcacgagccagtacaacaacatgagggtggagtttaagagcgataacacagtcagcaagaagggtttcaaggcccactttttcagcgaaaaacgcccagccttgcagccgccaaggggtaggccccatcagttaaaattcagggttcaaaagaggaaccgaacccctcagtag

SEQ ID NO: 27542 - DNA, 1509 bp, synthetic construct
  misc_feature 1..1509: note = Description of Artificial Sequence: Synthetic coding sequence
  source 1..1509: mol_type = other DNA
atgctgctaagatccgcgggaaagctcaatgtagggaccaagaaagaagacggagagtcgacagccccaacaccacgtcctaaggtgctgcgttgtaaatgtcaccaccattgccccgaagacagcgtgaacaacatctgcagcaccgacggctactgcttcaccatgatcgaggaggatgactctggtttgcctgttgtgacttccggatgcctggggttagagggcagcgacttccagtgtcgggacacaccaattccccaccagcgccgaagcattgagtgttgcacggagagaaacgagtgcaataaagatctgcacccaactcttccccctctgaaaaatcgcgacttcgtggatggtcctatccaccatcgcgctctgctgatctctgtcaccgtgtgttcccttctgctggtcctcatcattctgttttgttactttcggtacaagagacaagaaacacggccacggtactccattggcctcgaacaggacgagacatacatccctccaggcgagtccttgagagacttgattgagcagagccagtcttcaggcagcggctccgggctgcctcttctggttcaacggacaattgcaaagcagattcaaatggtcaagcagatcggcaagggtcggtacggcgaggtgtggatgggtaagtggaggggagaaaaagtggctgtcaaagtgtttttcaccacggaagaagcatcatggttcagagagacagaaatatatcagaccgtactcatgcggcatgagaacatacttggattcatcgctgctgacatcaaaggaaccgggtcctggacacaactgtatctgatcaccgactaccacgaaaacggaagcctgtacgattatctgaaatccactacactcgatgccaagtctatgcttaaacttgcttatagtagcgtctccgggctctgccacttgcacactgagatctttagcactcagggaaaacccgctattgcccacagagatctgaaatcaaagaacattctggtgaagaagaacggaacttgctgcatagcggaccttggccttgccgtgaaatttatctcagacacaaacgaagtggacattccgccaaacaccagagtgggcaccaagcggtacatgccccctgaagtgctggatgaatcgctcaatcgcaatcattttcagtcttacattatggctgacatgtacagttttggcctgatcttatgggaagtagcccgtcggtgcgtcagcggtgggatcgtggaggaatatcagctcccctaccatgacctcgttccttcagaccctagctacgaggacatgcgggagatcgtgtgcatcaagaagcttcgaccctcatttcccaacaggtggtcatccgacgaatgccttaggcagatgggaaagttgatgaccgagtgttgggcacataacccggcaagccgccttaccgcccttagagtcaagaaaacacttgctaaaatgtccgagtcacaggacatcaagttatag

SEQ ID NO: 27543 - DNA, 1509 bp, synthetic construct
  misc_feature 1..1509: note = Description of Artificial Sequence: Synthetic coding sequence
  source 1..1509: mol_type = other DNA
atgctccttcgctccgccggaaagctcaatgtgggaacgaagaaggaggacggcgagtccaccgcaccaacacctcggcctaaggtattgaggtgtaaatgccatcaccattgtccagaagacagtgtgaacaatatatgctctacagatgggtactgtttcacaatgatcgaggaagatgactctggattacccgtcgtcacatccggatgcctgggcctcgagggcagtgacttccagtgcagggataccccaatccctcatcaacggagatctattgagtgctgcacagagcgtaacgaatgcaacaaggatctgcacccgactctgccaccactcaagaatcgagatttcgtggacgggcctatccaccaccgcgctctgctcatttccgtgactgtgtgctctctcctgttggtccttatcatattgttctgttatttccgatataaacggcaggaaactagacctcggtactccatagggctcgagcaggatgagacctatattcctcccggtgaatccctccgcgatcttatcgagcagtctcaatccagcggctccgggtcaggtctgccactcctcgtccagaggacgatcgcaaaacagatacaaatggtgaaacagatcggaaaaggaaggtatggggaggtatggatgggaaagtggcgaggtgaaaaggtcgcagtaaaggtgttctttactaccgaagaggccagttggttccgagagaccgaaatttaccaaacggtcctaatgaggcacgagaatatcctgggattcatagccgctgatatcaagggcactggtagttggactcaattatatctgataactgattaccacgagaatggatcactatacgattacctgaaaagtaccactttagacgctaagtctatgcttaaactagcatattctagcgtgagcggcctctgtcacctgcacacggaaatcttcagtactcagggcaaaccagcaattgcccatcgagacctgaagagcaagaacatcttagtcaagaagaacggaacatgttgcattgctgacttggggctcgctgtcaagttcatctcagacacaaatgaggtcgatatcccgcctaacacgcgagtgggaactaagagatacatgcccccagaggtgctggacgagagtcttaatcggaaccacttccagtcttatatcatggctgacatgtactcctttggcttgatactgtgggaggttgcgaggcgatgtgtctctggcggaattgtggaggagtatcaactgccgtaccacgatttggtgccttcagaccctagctacgaggacatgcgggagatcgtgtgcatcaaaaaactccgcccttccttcccaaaccggtggtcttctgacgaatgcttgcgtcagatgggtaaacttatgaccgagtgctgggctcacaatcccgcatctagactgactgcactcagagtcaaaaaaacccttgcaaaaatgtccgaatcccaagacatcaagctctag

SEQ ID NO: 27544 - DNA, 1599 bp, synthetic construct
  misc_feature 1..1599: note = Description of Artificial Sequence: Synthetic coding sequence
  source 1..1599: mol_type = other DNA
atgggctggctcgaggagctgaactggcaactgcacattttcctgcttattctactctctatgcataccagggcaaatttcctggataacatgttacttaggtccgcgggaaagctcaacgtggggacaaagaaagaggatggcgagtccaccgcccctactcctcgcccaaaagtactgagatgtaagtgtcaccaccattgccccgaggattctgttaataatatttgttctacagatgggtactgttttacaatgattgaagaggacgacagcggattgcccgtggtcacctccggttgtctgggcttagaggggagcgacttccagtgtcgagacactcctatcccgcaccagcgccgtagcattgagtgttgtaccgagaggaacgagtgcaacaaggacttgcatcctactctccctccactaaagaacagggattttgtagacggacctattcaccatcgagctctgctcatatccgtaacggtatgtagtttacttttagtgctcattatcctgttctgctatttccgttacaagagacaggaaacccgccctagatactccattggtctcgaacaggacgagacctatataccgccaggggaatccctgcgggacttgattgaacagtcccagtcctctggatcaggaagcggtctgcctctcctggtgcagcgtactatcgcgaagcagattcagatggtgaagcagatcggcaaagggcgatacggcgaagtgtggatgggaaagtggcgcggagagaaagttgccgtaaaagtcttcttcactactgaggaggccagctggttccgggagactgaaatttaccagactgtgctgatgcgccatgagaacatcctcggcttcatcgctgcagatatcaaaggtacaggctcatggacgcagctctacctgatcaccgactaccatgagaatggcagcctgtacgactacctcaagagcacaaccctggacgcaaagtcaatgctgaaactggcctattcctcagtgtcaggactctgccacctccatacggagatttttagcacccagggaaagcccgcaattgcccacagagacctgaaatccaagaatattctcgtgaagaaaaatgggacttgctgcattgctgatctggggctagcagtgaagtttatatctgatacgaacgaggttgacatcccgcctaatactcgagtaggcaccaaacgctatatgccccctgaggtgctggatgaaagcctgaaccgcaaccactttcagagctacatcatggctgatatgtacagctttgggttgatactgtgggaggtggccaggagatgcgtctcaggtggcattgtggaggaataccagctgccttatcacgatctcgttccttcagatccctcatatgaagatatgagggaaattgtctgtatcaaaaagcttcgacctagctttcccaacaggtggagctccgacgagtgtcttaggcaaatgggaaagctgatgaccgagtgctgggcgcacaacccagcatcacgcctcacagctctgcgggtgaaaaagaccctggcaaagatgagtgaatctcaggatatcaagctgtag

SEQ ID NO: 27545 - DNA, 345 bp, synthetic construct
  misc_feature 1..345: note = Description of Artificial Sequence: Synthetic coding sequence
  source 1..345: mol_type = other DNA
atgctcctgagaagcgctggtaagctgaacgtcggaactaaaaaggaagatggcgaatctaccgcacctactccacgaccaaaagtgctgagatgcaagtgccatcaccattgcccggaggactcagtaaataatatttgttctacagacgggtattgcttcactatgatagaagaggatgacagcggactgcctgtagtgacctcaggctgtttaggactggaaggttctgacttccagtgccgcgtcagaacactaccttttctcataaaagaggaccagctgaacgccgcacagaaaggaacaaacgtaatcaagacctacacactccactgtctccactag

SEQ ID NO: 27546 - DNA, 378 bp, synthetic construct
  misc_feature 1..378: note = Description of Artificial Sequence: Synthetic coding sequence
  source 1..378: mol_type = other DNA
atgctcctgcgttctgccggtaagctgaatgtcgggacgaaaaaggaggacggcgagagcacagctccgacaccccgacctaaagtgctgcggtgtaagtgccaccaccactgtcctgaagacagtgttaacaacatttgctcaaccgacgggtactgcttcacaatgattgaagaagacgatagcggtctgcctgtggtcacatcagggtgtctcggattggaaggttctgactttcagtgccgggacactccaatcccccatcagcgacgcagtattgagtgttgcactgagcgaaacgagtgcaataaggatctgcaccctaccttgccccctttgaagaaccgagacttcgtggatggaccaattcaccattag

SEQ ID NO: 27547 - DNA, 1509 bp, synthetic construct
  misc_feature 1..1509: note = Description of Artificial Sequence: Synthetic coding sequence
  source 1..1509: mol_type = other DNA
atgctcttgcgctccgccggtaaactcaacgtgggaacaaaaaaggaggacggggagtctaccgccccaaccccccgtccaaaagtgctgaggtgtaaatgtcatcaccattgtccagaagatagcgtcaataacatttgcagtaccgacgggtattgctttactatgattgaagaggatgattccggcttgcccgtggttaccagtgggtgcctcgggctggaagggtctgattttcaatgcagagacacccccattccacatcaacggaggtctattgaatgctgcaccgagcggaatgagtgtaataaagatctccacccaaccctgccccctctgaaaaaccgggactttgtggatggacccattcatcaccgcgcattgctgataagcgtgactgtatgcagccttctgctggtcctgataattctcttctgttattttagatacaaaaggcaggaaactaggcctcgttactcaataggtcttgagcaggacgaaacctacatccctccaggggagagcctccgcgacttaattgaacagtcgcagtcttccggatcggggtccggcttgcccctgcttgttcagaggaccatcgccaagcagatccagatggtcaagcaaataggcaagggaagatacggggaggtgtggatgggcaagtggagaggcgagaaagtagccgtgaaagtctttttcacaacggaggaggcatcctggttccgggagactgagatctaccagacagtcctgatgaggcacgagaacatactgggatttatcgccgctgacatcaaaggcaccgggagctggacccaactgtacctgatcactgattaccacgagaatgggtctctatatgattacctcaagagcactaccctcgacgctaagtccatgctcaaactcgcatattcatcggtgagcgggctttgccatctccacaccgagatattttctacccaagggaaaccagcaatcgcacatcgggatctgaaatcaaaaaatatactggtgaagaaaaacggcacgtgctgtattgcagacctcggactggccgttaaattcatctcggatactaatgaagttgatattccgcctaatacccgggtgggaactaagcgctacatgccgcctgaagtcctcgacgaaagcctgaatagaaaccacttccagagttacatcatggccgatatgtattccttcggcctgatcctgtgggaggtagcccgaagatgtgtctccgggggtatcgtggaagagtaccagcttccttatcacgatctcgtgccatctgatccatcgtacgaggatatgagggagatagtctgcatcaagaaattacgcccttcattccctaaccggtggagtagtgatgagtgtttacggcagatggggaaacttatgaccgagtgctgggcacataatcccgcttctagacttaccgcactgagggtcaaaaagacactggctaagatgagtgagtcccaagatatcaagctgtag

SEQ ID NO: 27548 - DNA, 1509 bp, synthetic construct
  misc_feature 1..1509: note = Description of Artificial Sequence: Synthetic coding sequence
  source 1..1509: mol_type = other DNA
atgctcctgcgcagcgccggtaaattgaacgtgggcaccaagaaggaagatggtgaaagcaccgccccaactccccgtcccaaagttctcagatgcaagtgccaccaccattgcccagaggacagcgttaacaatatctgctcaactgatgggtattgcttcactatgatcgaggaagatgatagcggcctgcccgttgtaacctcaggctgcttgggtctagaagggtccgacttccagtgccgcgacactccgatcccacatcagaggagaagtattgagtgctgtactgagaggaacgaatgtaataaagatctccacccaactttacctcctctgaaaaatcgcgatttcgtagatgggccaatccaccaccgggctcttctcataagcgtgactgtgtgctcacttctgctcgtgctgatcatcctcttctgctacttcagatataagcgccaggagacccggcctaggtacagtattgggttggagcaggatgagacttacatcccgccaggtgagagcctgagggacctgatagagcagtcacagtccagcgggtctggttccggtcttcccctactggttcagaggaccatagcgaaacagatccagatggtcaaacagattggcaaggggagatacggagaagtgtggatggggaaatggaggggtgaaaaggttgccgtaaaagtattttttactaccgaggaagctagctggtttagagagacagagatctatcagactgtcttgatgcgtcatgaaaacattttgggtttcatagccgctgacattaaaggcacgggatcctggactcaactctacctgataaccgactaccatgagaatgggtccctatatgattacctaaagtccactacattagatgccaaaagtatgctgaaattagcttattccagcgtgtcagggctttgtcacttgcataccgagatcttcagcactcagggaaaaccggcaatcgcacaccgagaccttaaatccaagaacattctggtcaaaaagaatggtacttgttgtattgccgatttaggactggccgtgaaattcattagcgatacaaacgaggttgacatcccacctaacacgagggtaggcaccaaaagatatatgcccccagaggtactggacgaaagtctgaaccgtaaccattttcaatcatacatcatggctgacatgtattctttcggactgatattgtgggaagtcgcaaggaggtgcgtttcgggaggtatagtagaggaataccagttaccatatcatgatcttgtgccatcagacccttcctacgaggacatgagggagatcgtctgtattaaaaagctgcgcccaagctttccaaaccgatggtcctctgacgagtgtcttcggcaaatgggtaagttgatgacagaatgctgggcccacaaccccgctagtagactaaccgccctgcgggtcaagaagaccctggccaaaatgtccgaatctcaggatataaagctttag

SEQ ID NO: 27549 - DNA, 1509 bp, synthetic construct
  misc_feature 1..1509: note = Description of Artificial Sequence: Synthetic coding sequence
  source 1..1509: mol_type = other DNA
atgctcctccggagtgcaggaaagctgaacgttggaactaagaaagaggacggtgagagtacggctccaacaccacggccaaaagttttacgttgtaaatgccatcaccactgtcctgaggacagcgtgaataatatctgctcaacggatgggtactgtttcacaatgattgaggaggacgattctggtctgccggtcgttacgagcgggtgtctaggccttgaaggaagtgattttcaatgccgcgatacaccaattcctcaccagcggagaagtatagaatgctgcaccgaaaggaatgagtgcaataaagacctgcatcccaccctgccacccctgaagaatcgcgattttgtcgatggaccgatacatcatcgcgcattgttgatcagcgtgacagtttgcagcctgctgctcgtgcttatcatcctattttgttatttcaggtataaaagacaggaaactagaccccgttactccatcggactggaacaagatgagacctatatccctcctggggagagcctccgcgatctgatcgagcagtcccagtcttctggttctggatctggcttacctctgttagttcagcgcactattgctaaacagatccagatggtgaagcaaatagggaaaggtaggtacggagaagtgtggatgggaaaatggcgcggtgaaaaagtggccgtcaaggtgttctttaccacagaagaggcctcctggttccgggagacggagatctaccagaccgtcctgatgagacacgagaatattttagggtttatcgccgctgatattaagggcactggctcttggacacaattgtatctaatcactgactaccatgaaaatggatcgctctatgactacctaaaatcaactacactcgatgcaaagtctatgctgaagctggcttatagttccgtcagcggcctctgccatctacacacagaaatcttctcaacccagggcaagcccgctatagcacatcgcgatctgaagtctaagaatatactggtgaaaaagaacgggacctgttgtattgctgacttggggctggccgtgaaattcattagtgatacaaacgaagtggacatcccaccgaataccagggtagggacgaaaaggtatatgccgccagaggtcctggacgagtccttgaataggaatcacttccaatcctacatcatggctgatatgtactcttttgggctgattctctgggaagtcgccagaagatgtgtgagcggcggtatcgtcgaggagtatcagctcccttatcacgatctcgtgccatccgatccctcctacgaagatatgcgggagattgtctgtattaaaaagctccggccttcttttccaaatcgctggagctctgacgaatgcctgcgacaaatgggcaaactgatgaccgaatgctgggctcacaacccggcaagcagacttaccgccctgcgcgtgaaaaaaacccttgctaagatgtcagaatctcaggatatcaagctctag

SEQ ID NO: 27550 - DNA, 4755 bp, synthetic construct
  misc_feature 1..4755: note = Description of Artificial Sequence: Synthetic coding sequence
  source 1..4755: mol_type = other DNA
atgagggggcaggcagctgcacctggacccgtgtggatcctggcacccttgctattactcttattattgctggggagacgcgctagggccgctgcaggcgcagatgccggtccgggacccgagccttgcgccactctggtacaagggaagttctttggttacttcagcgccgcagctgtttttcccgcaaatgcatctagatgttcatggactctcagaaatcccgacccaaggagatatactctgtacatgaaagtcgctaaggcccctgtgccatgcagcgggcctgggagagtgaggacatatcagtttgactcttttctggagtcgactcgcacttacctgggagtggagtctttcgacgaagtcttgcggttgtgtgacccatcagcgccattggcgttcttgcaagcgagtaagcaattccttcaaatgagaagacagcagcccccacagcatgatggcctgagaccaagggccggtccccctggaccgaccgatgactttagcgttgagtatctcgtcgtgggaaaccgcaacccgtcgcgggcagcctgccagatgttatgtcgttggctggatgcctgcctcgcaggttcgcggtcatctcacccgtgtggcatcatgcagaccccatgcgcctgtctgggaggcgaggctgggggtcctgccgctggtcccctggcacctcgaggcgacgtgtgtctgcgcgatgccgtggccggaggccctgagaattgcctcacatctctcacacaggatagaggcggtcacggggcaactggaggctggaaactctggtcgctttggggtgagtgtacccgcgattgcggaggcggactccagactaggacgcgaacctgtttacccgcacctggcgtggagggcggaggctgcgaaggagtactggaagagggcaggcaatgcaaccgggaggcatgtgggccagctgggcgtacgtctagccggagtcaatccctgaggtcaactgatgcgaggcgacgtgaggagctcggagatgagctccaacagttcggctttccggcaccacagacaggtgaccctgctgctgaggagtggtcaccctggagtgtttgctctagcacatgcggagagggttggcagacaagaacccggttttgcgtgagtagttcctactctacccagtgcagcggcccacttcgggagcagcggctctgcaataactcagccgtgtgtcccgtccacggtgcttgggatgagtggagtccttggtcactttgctcttctacatgtggtaggggcttccgggaccgcacccggacatgtagacctccacagttcggaggaaacccctgcgagggacctgagaagcagaccaagttttgcaacatcgccctgtgcccagggagagctgtcgacgggaactggaacgaatggagttcttggtccgcctgctccgcgagttgctcccagggcagacaacagaggacgagagagtgtaacggcccttcatacgggggagctgaatgtcaggggcattgggtggagactcgggactgctttttgcagcagtgtccagtcgacggcaagtggcaagcttgggcttcttgggggagctgctcagtgacctgcggggcaggctcccaacggcgagaaagagtatgctcaggcccttttttcggcggtgcagcgtgccagggtccacaagacgaatacaggcagtgcggaactcagagatgccccgaacctcacgagatctgcgacgaagataatttcggcgcagtaatttggaaggaaacccccgctggggaagtggccgctgtgagatgtcccagaaacgcgacaggtctcattttgcgcagatgtgagctggatgaagagggcatagcctattgggaaccacctacttacataaggtgtgtcagtatcgactacaggaatattcagatgatgactcgagaacatttggctaaggctcaacgtggcttgcctggcgagggggtgagtgaagtgatccagaccctggtggagatttcccaagacggcacatcatactctggcgatctcctctctacaattgacgtgttacgaaatatgaccgaaatattcaggcgggcttattatagccccacaccgggtgacgttcagaattttgtccaaatcctctccaatctgctagccgaagaaaaccgagacaaatgggaggaagcccaactggcaggcccaaatgccaaggagctatttcggttggtggaagattttgttgatgtgatcggttttcgcatgaaggacttacgcgacgcttatcaagtgaccgacaacctggtgctgagtattcacaaactgccggcttcgggagcgacagatataagctttccgatgaaagggtggagagcaaccggcgattgggctaaagttcccgaagatagggttaccgtgagcaagagcgtgtttagcacaggcctgaccgaagccgatgaggcctccgtgtttgtggttggcaccgtgctgtatcgaaatttggggtcatttttggccttgcagcgcaataccacagttctcaattcgaaagttatctctgtgactgtgaagccccctccacggtctcttcgcacccctttagaaatcgagttcgcccatatgtacaacggaactacaaaccaaacttgcatcctctgggacgagacggatgtgccctccagcagcgctcctccacagctgggcccatggtcttggcgagggtgccgaactgtgccgcttgacgccctccggaccaggtgcttgtgcgatcgtctcagcactttcgctatactggctcagctgtcagccgacgccaacatggagaaggccacactgccttccgtgacactcatcgtgggctgtggcgtgtcctctttgacgctgttaatgctagtgattatatatgtttccgtgtggcggtatattcgctctgagcgatcagtgatccttatcaatttttgcctgagtatcatctcatcaaatgctctgattctgattggacaaacacagacacgaaacaaagtggtgtgcacactggtggcagcatttttacacttcttctttttatcaagcttttgctgggtgctgacagaggcatggcaaagttatatggcggtgaccggccacttaagaaacaggctaatccgcaaacggttcctctgtctcggctggggacttcctgccctcgttgtcgcaatttccgtgggcttcaccaaagcaaaggggtattcaaccatgaactattgttggctgagtcttgaagggggtctgctctatgctttcgttgggccagccgctgccgtcgttctggtgaatatggtgatcggtatcctagtgtttaacaaattggtttctaaagatggtataactgacaagaagctgaaggaacgcgcaggtgcctcactgtggtcttcctgcgtcgtgctgcccctcctcgccctgacatggatgagcgccgtgttggccgtgaccgataggagatcagcactcttccagatcctgtttgctgtattcgatagccttgaagggtttgtgatcgtaatggtgcactgtattctgcggagagaggttcaggatgcggtaaaatgccgtgtggtggatcgccaggaggagggcaatggtgactctggcggaagctttcagaatggccatgcccaattgatgactgattttgaaaaggacgtggatctcgcttgcagaagtgttttgaacaaagacattgctgcttgtagaaccgctactattacgggcacattaaagaggccttcccttccggaggaggaaaagctcaaactcgcccatgctaagggtcccccaaccaatttcaatagtctccccgcaaacgttagcaaacttcatctccatggcagccctcggtatcctggcggacctctgcctgacttccctaatcatagcctcactcttaaaagggacaaggctcctaagtcatccttcgtcggggatggcgacatcttcaaaaaactcgactcggaactcagtagggctcaagagaaggcattagatacatcgtatgttattctgcctaccgccaccgccactctgcgacctaagccaaaagaagagcctaaatacagcatccacattgaccagatgccccagacccgtctgattcatttgtcgactgctccagaggccagtctcccagcccgatcacctcctagccggcaacctccaagtggaggtccaccagaggctcccccagctcagcccccacccccacctccaccaccgccacccccaccccagcaaccactgccccctcctcctaacctggagcccgcacccccttctctgggcgaccccggagagcctgcagctcacccaggcccatctactggaccctcgactaaaaacgaaaatgtggcaactcttagcgtctcctcgttggaacgccgtaagtcaagatacgccgaactcgactttgaaaaaataatgcacaccagaaaaaggcaccaggacatgttccaggaccttaaccgcaagttgcagcacgcagctgagaaagacaaggaggtgctgggccctgactcaaaacctgagaagcagcagaccccaaataagcggccatgggagtccctgaggaaggcacatgggaccccgacttgggtcaaaaaggaactcgagcccttgcaacctagccccctggaattgcggtctgtggaatgggagcgatctggcgctaccattcctctggtgggtcaggatattatagatctgcagaccgaagtttag

SEQ ID NO: 27551 - DNA, 4755 bp, synthetic construct
  misc_feature 1..4755: note = Description of Artificial Sequence: Synthetic coding sequence
  source 1..4755: mol_type = other DNA
atgcgagggcaggctgcggctcctggtcccgtgtggattttggcccctcttctgctgctcttgctcctgctgggcaggcgagcgagagccgctgccggtgcagacgcaggacccggaccagagccatgcgccaccctggtgcagggaaagttcttcggctacttttcagccgcagctgtgtttcccgcaaacgccagcaggtgcagctggaccctgcgtaatcccgatccacgacgttatacactttatatgaaggttgcaaaggctccggtgccctgctcaggaccgggaagagtcaggacttatcagtttgattctttcctggaaagtacacggacttatctgggcgttgagagctttgacgaagtgctcaggctttgcgaccccagtgctccgctggcttttctgcaggctagcaaacaatttcttcagatgcgcaggcagcagccccctcagcacgacggcctgcgccctcgcgctgggccacccggtccgacagacgacttttctgtggagtacctggtagttggaaaccgcaacccctcccgcgcagcctgccagatgttgtgtcgctggttggatgcctgcctcgcgggtagccgttcttcccatccctgcggtataatgcagaccccctgtgcgtgtctcgggggagaagctggcggtcccgcagcaggacccctggcacctcggggagatgtgtgcctgcgtgatgctgtcgccggagggcctgagaactgtctgaccagcctgacccaagatcgcggaggccatggcgctaccggaggctggaaactgtggtcgctttggggggaatgcacgcgggactgcggcggtggcctccagaccagaaccaggacctgtctgcccgctcccggagtggaagggggtgggtgcgagggagtgctagaagagggcaggcagtgtaacagagaggcctgcgggcctgctggtcgaacaagctcccgctcacagagcttgagaagcaccgacgcacggcgacgggaagagctgggggacgaactccaacaattcgggtttcccgcacctcagacaggggatccagccgctgaggaatggtccccctggtctgtttgtagttcaacttgcggggaaggatggcagacgagaacccggttctgcgtttccagctcttactctactcaatgctccggcccacttcgcgaacagaggctttgtaacaattctgcagtgtgccctgtccacggcgcttgggacgagtggtctccgtggagcctttgctctagcacatgcggacgcggattccgcgaccgaactcgcacatgccggcctccgcagttcggcggaaatccttgtgaggggccagaaaaacagactaagttctgtaatatcgcactatgtccagggagagccgttgatggcaattggaatgagtggagctcctggtctgcctgtagtgccagctgcagccagggccgtcagcagcgcacacgtgaatgcaacggaccatcttatggtggcgctgagtgtcagggtcactgggtcgagacccgggactgctttctccaacagtgccccgtggacgggaagtggcaggcatgggccagttggggctcttgctccgtgacctgtggcgctggtagtcaaaggagggagcgagtgtgctcaggacccttttttggaggcgcagcatgccaggggccacaggacgagtataggcagtgcggcacacaaagatgcccggagccccacgagatttgcgacgaagataactttggcgcagtgatttggaaggaaacaccagccggtgaagtggctgccgtgcgctgtccacggaacgccaccggcctcattctgagacgttgtgagctcgatgaggagggcatcgcatactgggaaccccctacttacattcgctgcgtctctatcgactacagaaatattcagatgatgacccgcgagcacctcgcgaaggcccagaggggcctgcccggagaaggggtgtctgaggttatccaaacactagtggaaatcagccaggacggcactagctattctggggacctccttagtaccattgacgtcctgcgtaacatgacagagatatttaggcgggcttactacagtccgactcctggagacgttcagaatttcgtccagatcctgtcaaatcttcttgctgaagagaatagggataagtgggaagaggcccagctggctggcccaaatgccaaggagttattccgacttgttgaggattttgtggacgtaatagggttccggatgaaggacctgagagatgcctatcaagtaaccgataatctggtgctttcaatacataagctgccagcgtccggggctactgatatttcttttcctatgaaaggatggagagccacaggcgactgggcaaaggtgccggaggaccgtgtgactgtcagcaagagcgttttctcgacggggctgacagaggctgatgaagcaagtgtgtttgtagtgggcacagtgctctaccgcaacctcggttcatttctggcactacaacggaatacaacagtgctcaacagtaaggtaatctccgtgactgtcaaacctcctcctcgctccctgcgcacaccactggagatagaattcgcacatatgtataacggcacgactaatcagacatgcatcctgtgggacgagacggacgtgccaagtagctcggctccccctcaactcggaccctggtcatggcgcggttgtcggaccgtgccattggatgctctcaggacacggtgcctgtgcgaccggcttagtacattcgctattctggctcagttgtcggccgacgccaatatggagaaggcaactttacccagcgtgacgttaatcgtcgggtgcggcgtctcttccctaaccctgctgatgctcgtgattatctatgtgtcggtgtggcgctacatcaggtccgagagaagtgtgatcctcattaatttttgcctgagcattatttctagtaacgcccttatcctcatcgggcaaacccagaccaggaacaaggtggtgtgtacgctcgtggcagcttttctgcattttttcttcctatcgagcttctgctgggttcttaccgaggcctggcagagctacatggccgtgaccgggcacctccgcaaccggctgattaggaagcgcttcctatgcctcgggtggggactgccagccctcgttgtggctatttcagtgggattcacaaaggcgaagggctactcaaccatgaattattgttggctgtctctggaagggggtcttctgtacgctttcgtgggaccagcagctgcagtggtattggtcaatatggtcatcgggatcctggtgttcaacaagcttgtgagtaaagacggtataacggacaagaagctcaaggagagagctggcgcatctttgtggtcaagctgtgtggtcttacctcttttggccttaacctggatgagtgccgttctggcagtgaccgacaggcgatcagctctattccagatcctcttcgcagtgtttgacagcttggagggttttgtgattgtgatggtgcactgtatcttacgtcgcgaagtccaggatgcagtgaagtgccgtgtggtagatagacaggaggagggtaatggtgactcgggaggatccttccaaaatggacatgctcaacttatgactgactttgaaaaggacgtggatctcgcttgtcggagtgttctgaataaggatatcgccgcttgcaggactgcgaccataaccgggactcttaaaaggccttcattaccagaggaagaaaagcttaaattggcacatgcgaagggaccgccaacaaatttcaattcgctgcctgctaacgtaagtaagctgcatctccacggatccccccgttatccaggaggtcctctcccggacttccccaatcatagcctcacactgaagagagacaaagctcccaaatcatctttcgtgggagatggtgatatctttaagaaacttgatagcgagctttctcgagctcaggaaaaagctcttgatacaagctacgtgatcctccccactgctaccgcaacactgcggcctaagccaaaggaggagcctaaatactccatacacattgaccaaatgccacagacgcgactgatccacttgtctaccgcacccgaggctagcttgcccgctcgtagtccaccctcacgacagcccccaagcggcggtccacccgaagccccaccagcacaacctccaccccctcccccaccgcctccgcctccgcctcagcagcctctcccccctcctcctaacttagagcctgcaccaccctccctcggcgatcctggggaaccagctgcccatcccggaccaagtacgggccctagtactaaaaatgaaaacgttgcaaccctctctgtaagttccctggagaggcgaaaatccaggtatgctgagctcgacttcgaaaagatcatgcacacccgaaaaaggcatcaggacatgttccaggacctcaatcggaaactccagcacgcggcagagaaggataaagaagtcctgggaccagattcaaagccagagaaacagcagacaccaaataaacgtccatgggagagtcttcggaaagcccatggcacacccacttgggtgaagaaggaactggagcctcttcagccgagtcccctggaactccggtccgtcgagtgggagcgcagtggcgctacaattccccttgtggggcaggacataatcgatctgcaaacagaagtatag

SEQ ID NO: 27552 - DNA, 2334 bp, synthetic construct
  misc_feature 1..2334: note = Description of Artificial Sequence: Synthetic coding sequence
  source 1..2334: mol_type = other DNA
atgcccgataatcgtcagcctaggaacaggcagcctcggattcgaagcgggaacgaaccaagaagtgctcctgctatggagcccgacggaagaggcgcatgggcccattctagagccgctctggacaggttggagaagctgctccgctgctctcggtgtactaatattttgagagagcccgtgtgtcttggaggttgcgagcatatcttttgctctaattgcgtgtctgattgtattggcaccggctgccctgtgtgttatacaccagcctggatccaggacctgaagattaaccggcagctcgacagcatgatccagctgtgctccaaactgcgcaacctgctacacgacaatgagctgtccgaccttaaagaagacaaacccaggaagtccctgttcaatgacgcaggaaataaaaaaaattctatcaaaatgtggttctcccctcgctccaaaaaagtaagatacgtggttagcaaggcctctgtccaaacccagccagccattaaaaaggatgccagtgcccagcaagacagttacgaattcgtgtccccaagcccaccagctgacgtgagcgaacgcgctaaaaaggcctctgcacgcagcggtaagaagcagaaaaagaaaaccctcgccgagatcaatcagaaatggaatcttgaagccgaaaaggaggatggtgaatttgacagcaaggaggaatcgaagcagaagctcgtgagtttctgctcccaaccctcagtgatctcgtctccccaaattaatggggaaattgacttactggccagcggctccctgactgagtctgaatgcttcggtagtttaactgaagtctcattaccattggcggagcagatcgaaagcccggatacaaagagccggaatgaggtagtgacacctgagaaggtgtgcaaaaattacctgacctccaaaaaaagcctgcctctggagaacaacggtaagcggggacaccacaacaggctgtcttcaccgatctctaagcggtgtagaacctcgattttgagtacctccggagattttgtgaaacaaacagtcccgagtgaaaatattccgctacccgaatgcagttcacccccaagctgcaaacgtaaggtgggcggaacaagtgggcgaaagaactcaaatatgagtgacgaatttatctcgttgtcccctggtacgcccccttccactctgagctcgagcagctaccgccgtgttatgagcagtccgagcgcaatgaagcttttaccaaacatggccgtgaaacggaaccaccgaggagagaccctcttgcacatcgcttcaatcaagggggatatcccttccgttgagtacttactccagaacggaagtgacccgaatgtcaaagatcatgccggatggactccacttcacgaggcatgtaatcacggtcatctcaaggttgtggagctgttgctgcagcacaaagcgctggtaaacacaaccggctaccaaaacgactcacccctgcacgacgcagccaagaatgggcatgtggacattgtcaagctgctgttgagctacggcgcaagtcgtaatgccgtgaatatcttcggcctgcgtccagtagattacaccgacgatgaatccatgaagtcccttctgttgctccccgaaaagaacgaatccagctccgcatctcactgctccgtaatgaataccggccaaaggagggacggcccactcgttctgataggcagcggactgagctcagaacagcagaaaatgctgagtgaacttgcagtgatactcaaagccaagaagtatacagagtttgactctacggtgacacatgtggtggtaccaggcgatgccgtgcagagtacccttaagtgcatgttaggtattctcaacggctgctggatcctcaagttcgaatgggtaaaggcttgcctgcggcgaaaagtatgcgagcaagaggagaagtacgagattcccgagggtccaagaagaagcagattgaatcgggagcagctgcttcctaagctatttgacggttgctacttctacctgtggggcacattcaaacaccacccaaaagacaacctgatcaaactggtgactgccggaggaggccaaatactctctcgtaaacctaagccagactcagacgtaacacagaccatcaacacggtagcttaccacgctagacctgattctgaccagcgcttctgcacacagtacataatctatgaagatctgtgcaattatcatcctgaaagagtgagacaaggaaaggtctggaaggctccttcatcatggtttattgattgtgttatgagctttgaattactaccgttagactcctag

SEQ ID NO: 27553 - DNA, 1704 bp, synthetic construct
  misc_feature 1..1704: note = Description of Artificial Sequence: Synthetic coding sequence
  source 1..1704: mol_type = other DNA
atgtggttttcacctcggagcaagaaggtacgttacgtcgtctcaaaagcgagcgttcagactcaacccgctattaaaaaggacgcgagtgctcagcaggatagctacgagtttgtgagtccctctccgccagcagatgttagcgaacgggctaagaaggcatccgccaggtctgggaaaaagcagaaaaagaagacactcgctgaaatcaaccagaaatggaacctagaggccgaaaaggaggacggcgagttcgactctaaagaggaaagcaaacagaagctcgtttcgttttgttcgcagccttcagtcatctctagtcctcagatcaacggagagattgacctcttagcctccggaagcctcaccgaatccgagtgttttggcagccttacagaggtgtccctccccttggctgagcagattgaatctcctgacacaaaatcgcggaacgaagtggtaacccctgaaaaagtgtgtaagaattatctaacttcgaaaaaaagtcttcctctcgagaacaatggtaaaagaggacaccacaaccgcctcagcagtcctatatctaagcggtgtcgaacctccatcctatcgacatccggtgatttcgtgaaacaaaccgttccaagtgagaatataccattaccggaatgtagctccccaccgagctgtaaacggaaggtcggtggcacctcaggcaggaaaaactccaatatgtcagacgagttcatctcactgtctccaggaacaccccctagtaccctgagctcctcgtcataccgcagggtgatgagctctccctctgctatgaagctactgcccaatatggctgtgaaaaggaatcataggggagaaactctcttgcatattgcttctattaagggtgacatcccgagcgtagaatacctcttgcagaacgggtccgatcccaatgtgaaggatcatgccggatggacacccttgcacgaagcttgcaaccacggtcacttaaaggtggttgaactgctcctgcagcacaaagcattggtcaacactacaggctaccaaaacgacagccctctgcatgatgctgcaaagaacggccatgtggatatcgtgaaattgctgctcagttacggcgcttccaggaacgccgtgaacatatttggattaagacctgtggattacaccgatgatgagtccatgaaaagtctactgctgctccctgaaaagaatgagtccagctctgccagtcattgctccgtgatgaatacaggtcagcggagagatggaccgttggtgctgataggaagtggactctcgagtgagcaacagaaaatgctcagtgagctggcagtaatactcaaggcaaagaagtacaccgaattcgatagcacagtgactcatgtagtcgtgccgggtgacgcagtgcagagtactctgaaatgtatgcttggaatacttaacggctgttggatcctgaagttcgagtgggtgaaagcctgcctgagaaggaaggtctgcgaacaagaagaaaagtatgaaattccagagggcccacgcagatcccgtcttaatcgcgagcattgtcagagctgcctcatggacgcgacgtccatctgcggagaaccgagcaacacaattcaaagaacgacactgctgtcctcctctctgcaggtgggagcgagaagttcagtggagagcccttcacagaccgttacctag

SEQ ID NO: 27554 - DNA, 3750 bp, synthetic construct
  misc_feature 1..3750: note = Description of Artificial Sequence: Synthetic coding sequence
  source 1..3750: mol_type = other DNA
atgtcatctatgtggtcagaatacactatcggcggtgtgaagatctacttcccttataaggcttatccctcccagctggcaatgatgaactctatccttagaggcctcaacagtaagcagcattgcttgctagaatccccgacaggcagcggcaagtctctcgcactcttatgctccgctttagcatggcagcagagccttagtggcaagccagctgacgagggagtcagcgaaaaagcagaagtccagctgagttgctgttgcgcgtgccacagtaaggacttcactaacaacgatatgaaccaagggacatcacgacatttcaattatccctcaactcctccttccgaacgaaatggtaccagtagcacttgtcaggactcacctgaaaagactaccctggccgcaaagctctccgccaaaaaacaagcgtcaatataccgcgatgaaaacgacgacttccaggtcgagaaaaaacggatccgacctctcgagactacccagcaaatcagaaagagacattgttttggaactgaggttcataatctggacgccaaggtcgattctggcaagactgtgaaacttaactcgccgttagaaaaaataaattctttttctcctcagaagcctcctggacattgcagcaggtgctgctgctcaactaagcagggcaacagtcaggagagttcgaacactataaagaaggatcataccggtaaaagcaagatccccaagatctatttcggcacgcggacccataagcagatcgcacagatcactcgggagctgcgtagaactgcctactcgggagtcccaatgactatactcagctctagggatcacacctgcgtccatccagaggtagttggaaacttcaataggaacgaaaaatgcatggaactcctggacggtaagaacggcaagtcctgctacttttaccacggcgtccacaagatcagcgatcagcacactctccagacattccagggtatgtgtaaggcatgggacattgaagaactggtcagcctcggcaagaagttgaaggcttgtccttattatacagctcgcgaattaatccaggatgccgatatcatcttttgtccctataactacctgctggacgcgcagattagggaatcaatggacttgaacctgaaagaacaagtggtcattctcgacgaggcacataatatcgaagactgcgcccgagagtcggcctcctacagtgtgaccgaggtgcaacttcgatttgctcgcgatgagctggacagcatggtaaataacaacataaggaagaaagaccacgagcccctgagagccgtttgctgctcgctgattaactggttggaggcgaatgcagagtacctcgtggaacgggattacgaatctgcctgcaagatctggagtggaaacgagatgctgctcactttgcacaagatgggtattactaccgccacgttcccaatacttcagggtcacttcagtgcagttctccagaaagaggagaagatctcaccaatctacggtaaggaggaggcaagggaggtccccgtaatatccgcgtcaacacagattatgttgaagggcctgtttatggtccttgactacttgttcaggcagaattctagatttgccgacgactacaaaattgccatccagcagacgtactcatggactaaccagatcgacatttcggacaagaatggtttactggtgctccccaagaacaagaaacgctcacgacaaaagaccgcggtgcacgtgctgaacttctggtgtctcaaccctgccgttgctttttctgacatcaacggtaaggtgcaaacgatcgtgctgacctccgggacactttctccaatgaaatcgttcagtagtgagctaggggtgactttcactattcaactagaggccaaccatattatcaaaaactctcaagtgtgggtgggcacaatcggaagcgggccaaaaggtagaaacttgtgcgccacattccagaatactgaaacattcgaatttcaggatgaggttggcgcactattgcttagtgtgtgccagacagtgtcccaggggattttgtgttttctgccctcttataaactccttgaaaagttaaaggagaggtggctgagtaccgggctctggcacaacctggagctggttaagacagttatcgttgagccccaaggtggggagaaaacaaatttcgacgaactgcttcaggtctactacgacgccatcaaatataaaggagaaaaggatggagcgctcctggtggctgtatgtcgagggaaggtgagcgaaggactcgatttcagcgatgacaatgccagagccgttattactatcggtatccccttcccaaacgtgaaggacttgcaggtggaattgaagaggcaatacaatgatcatcatagcaaactgcggggtctgctgcctgggcgacagtggtatgagattcaagcataccgtgctctgaaccaggccctgggtcggtgtattcggcatcgcaatgactggggtgccttgatcctggtcgatgaccggtttcgcaataatccatcaaggtacatatctggacttagcaaatgggttcgtcaacaaatccagcaccattccaccttcgagtcggccttggagagtttggccgagttcagcaaaaagcatcaaaaagttctgaatgtgtcaattaaggacagaaccaatattcaggacaacgagtcaacccttgaggtgacgtcacttaaatacagcacttcaccctacttgctggaagcagctagtcatctgtctcctgaaaatttcgtcgaagatgaagccaagatctgcgtccaggagttgcagtgccctaaaataattaccaagaatagccctttaccaagcagcattattagtcgtaaagagaaaaacgaccccgtgttcctcgaagaggcaggcaaggcagagaagattgtcatctctcgctccacctcacccacgtttaacaagcaaactaaaagggtctcttggtcgagttttaacagtttgggacagtatttcacaggaaagatacccaaagccacccctgaactgggaagttccgagaatagtgcatcttcacccccaagattcaaaactgaaaagatggagtcaaaaacggtgctcccgtttactgataagtgcgagagtagtaatctcactgtcaacacctccttcggaagctgtcctcagtccgagactatcatctctagtctcaaaatcgacgctactcttaccagaaagaatcactcagagcatcccctgtgctctgaggaagccctggacccagacattgaacttagcctcgtgagcgaagaggacaagcagtccactagtaatcgtgatttcgagaccgaggcagaggacgagtcaatctatttcactcctgaattatatgatccagaagatacggatgaggagaagaacgacctggcagagactgacaggggcaaccggctggccaacaactcggactgcattctggctaaggatttattcgagatccgtactatcaaggaggtggacagcgccagagaggtcaaagctgaggattgcatcgataccaagctcaacggaatcctgcacattgaggagagtaaaattgatgatatcgatgggaacgtcaagacaacatggatcaatgaactcgaactgggcaaaacccatgagatagagatcaaaaacttcaagccctcccccagcaagaacaaggggatgtttccaggcttcaaatag

SEQ ID NO: 27555 - DNA, 945 bp, synthetic construct
  misc_feature 1..945: note = Description of Artificial Sequence: Synthetic coding sequence
  source 1..945: mol_type = other DNA
atggcatccagaagtaagagaagggccgtggagagtggagtaccccagccccctgatccccctgtccagagagatgaggaagaggagaaggaagttgagaacgaagacgaagatgacgacgattccgataaggagaaggatgaggaagatgaggtgatcgacgaggaggtaaacattgaattcgaagcttacagtctatcagataacgactatgatggaattaaaaagctactacagcagctgttcctgaaagctccagtcaacactgcagagctgaccgatctgctaatccagcagaatcacattggctccgtcattaaacagaccgacgtgagcgaggatagtaacgatgacatggacgaagacgaggttttcggatttatctccctgctgaatcttacagagaggaaggggacccagtgcgtcgagcagatccaggagctggtacttcggttctgtgaaaagaattgtgagaagagcatggtggagcagttagacaagttcttaaatgatacaactaagccggtcggcctgttgctcagtgaacgattcatcaacgttcccccacaaattgcactccctatgtaccagcagctgcaaaaggagcttgcgggagcccatcgaacaaacaagccttgtgggaaatgttatttttaccttctgatttcaaaaacttttgtggaagccggtaagaataatagtaaaaagaaaccaagtaacaagaagaaggccgcactgatgttcgctaatgccgaagaggagtttttctacgagaaagccattctcaaattcaattactccgtgcaagaggaatctgacacttgtctgggtggcaaatggtcctttgatgatgtacctatgactccactacgcacagtaatgctgatccctggcgataaaatgaacgagatcatggataaactgaaagagtacttgtctgtctag

SEQ ID NO: 27556 - DNA, 879 bp, synthetic construct
  misc_feature 1..879: note = Description of Artificial Sequence: Synthetic coding sequence
  source 1..879: mol_type = other DNA
atggcatcgcggtcaaagcgcagggccgtcgagtcaggcgtgccgcagccaccagatccccctgtgcaaagggatgaagaggaggaaaaggaagtggagaatgaggacgaggacgatgatgattccgataaggaaaaagacgaagaggatgaagtgatagatgaggaggttaacatcgagtttgaggcttacagcctctcggacaacgactatgatggaatcaaaaagctcctgcaacagctgttcctaaaggcccctgtgaacacagccgagttaaccgacctgcttattcagcagaatcacattgggagcgtgatcaaacagacagacgtgagtgaagacagcaatgacgacatggatgaagatgaagtgtttgggtttattagtcttttgaacctcacagaacgcaagggcacacaatgcgttgaacaaattcaagaactggtcctccggttttgtgaaaaaaactgtgaaaagagtatggtcgagcagttggacaagtttttgaatgatacgacaaaacctgtgggactcttgctatctgagagattcattaatgtaccgccacagattgccctccccatgtaccagcagctacaaaaagagttggcgggagcccaccgaacgaacaagccctgcgggaagtgctacttctaccttctaatctctaaaaccttcgtggaagccggaaaaaacaatagtaagaagaagccttccaataaaaaaaaggcggcattgatgttcgcgaacgcagaggaagaatttttttacgaggaacaaggtaagccggaagtgctcggcggaccggacacccggcgagggctagaaccagtcccaatacagcataacggttggagcgtgcctcccgtgctcgaatag

SEQ ID NO: 27557 - DNA, 969 bp, synthetic construct
  misc_feature 1..969: note = Description of Artificial Sequence: Synthetic coding sequence
  source 1..969: mol_type = other DNA
atggcatctcgaagcaaaaggagggccgtggaaagcggcgtgccccaaccccctgatccaccagtccagagagatgaggaggaggaaaaagaagtggagaacgaggacgaggatgatgatgattctgacaaggaaaaagatgaagaggatgaggttatcgatgaagaggtgaacatcgaattcgaagcctattcacttagcgacaacgactatgacggcattaagaagctgctccaacagctatttttgaaggctcccgtgaacacagccgaacttactgatctgctgatccaacagaatcatattggctccgtgatcaagcagaccgacgtgagcgaggacagtaatgacgatatggacgaggacgaggtttttgggtttatctctctgctaaatctaaccgaacgcaaaggaacacaatgtgtggagcagattcaggaactcgtgctgcgcttctgtgagaagaattgtgaaaagagtatggtcgaacaacttgacaagtttctcaacgataccacaaagccagtaggtctattactgtctgagcgatttatcaacgtacctcctcagatcgctctccctatgtaccagcagcttcagaaggagctggctggggctcacaggactaacaaaccatgcgggaaatgttacttttacttgctcattagcaagactttcgttgaagcaggtaaaaataatagtaaaaagaaaccttctaacaagaagaaagccgctctgatgtttgctaacgcagaagaagagtttttttacgaagagcaagggaagccagaggttctcgggggtcctgataccagacgtggcctggaaccagtgccaatccaacataatggaggctcacgtggccaagtcacggccctggtgagcttgaaggccggactaattcagtcacgtagcactctttccgactttcaaggaactttcatgaccgttggcattgctctctcatag

SEQ ID NO: 27558 - DNA, 879 bp, synthetic construct
  misc_feature 1..879: note = Description of Artificial Sequence: Synthetic coding sequence
  source 1..879: mol_type = other DNA
atggccagcagaagcaaacgcagagctgtagagagtggcgtgccacagcctcccgatcctcccgttcagagggacgaagaagaagagaaagaggttgagaacgaagatgaagacgacgatgacagcgataaggagaaggacgaggaggacgaggtgatcgacgaggaagttaatatcgaatttgaagcatactctctctccgataacgattacgatggcattaagaagcttctccagcagctgtttttaaaagcccctgtgaatactgcggagctgacagacctgctaattcagcaaaaccacatcggaagcgtaatcaagcagacagacgtgtccgaggactccaacgatgacatggacgaagatgaggtattcgggtttatttccctcctaaacctaacggaacgtaagggtacacagtgcgtggagcagatccaggagcttgtattaagattttgcgagaaaaattgcgaaaagtcaatggtggagcagctcgacaagtttttgaatgatactaccaaaccagtgggtctgttgctgtcggagaggtttatcaacgtgccccctcagatcgccctgcccatgtaccagcagctgcaaaaagaattagcaggcgctcaccgaactaacaagccatgcgggaagtgctatttctacctacttatatccaagacattcgtagaagctgggaagaataatagcaagaagaaacccagtaataagaaaaaggcagcactaatgtttgccaatgcagaggaagagtttttctacgagaaggccatactgaaatttaattattctgtgcaggaggagtctgatacatgtctgggtgggaagtggagcttcgatgattggtcggtacctccagtcctggaatag

SEQ ID NO: 27559 - DNA, 789 bp, synthetic construct
  misc_feature 1..789: note = Description of Artificial Sequence: Synthetic coding sequence
  source 1..789: mol_type = other DNA
atggcctcccgatcgaagaggagagcagtggagtcaggggttccccagcctcccgatccccctgttcaacgggatgaagaggaagagaaggaagttgaaaacgaagatgaagatgacgacgactctgacaaggaaaaagatgaggaagacgaagtgatcgatgaagaggttaatatcgaattcgaggcttattcattgagcgacaacgattacgatggtattaaaaagctgctccaacagctgtttttgaaagccccagtcaacaccgccgaactgactgacctgttgatccaacagaatcacattggaagtgttattaaggggacgcagtgcgtggaacagatccaggagttagttctgagattttgtgagaagaactgtgaaaaaagcatggtggagcaactcgacaagttcctcaatgataccaccaagcccgttggactgcttctgtccgagagattcattaacgttccaccccaaatcgcactccccatgtaccagcaactccagaaagagctcgccggtgcccaccgcaccaataagccttgtggtaagtgttacttctatctgctgatcagtaagacatttgtggaagcaggcaaaaacaactcaaaaaagaagcccagcaataagaaaaaagccgctttaatgtttgctaacgcagaggaagagttcttttatgaggagcaggggaagccggaggtgctgggtggacccgacacccgacgtggtctcgagcctgttcccatacaacacaacggctggtctgtcccacccgtgctggaatag

SEQ ID NO: 27560 - DNA, 1398 bp, synthetic construct
  misc_feature 1..1398: note = Description of Artificial Sequence: Synthetic coding sequence
  source 1..1398: mol_type = other DNA
atggtggaccccgtaggattcgcagaggcctggaaagctcaattcccggattcagagcctcctcgcatggaattgcgctccgtgggcgacatcgagcaagaattagaacggtgtaaagcttcgatcagaaggctcgagcaggaggtcaaccaagagcgatttcggatgatctacctgcagacattactcgctaaggagaaaaaaagttacgaccggcagcggtggggcttccggagggcagctcaggccccagacggggcaagcgaaccacgcgcttcagcgagccgccctcagccggctcctgccgatggggcagatccaccacctgcagaagaacccgaggctcgcccagatggcgaagggtcccccggaaaggccagaccaggcaccgccaggcgacccggagctgccgcatccggcgagcgcgacgacaggggaccaccggcatccgtggctgctttacgcagcaatttcgagcggataaggaagggccacggacaacctggggcagacgccgagaaaccattctatgtgaatgtcgaatttcaccatgagcgaggtctcgtaaaagtcaacgataaagaggtaagtgatcgcatttcatcgctggggagccaagccatgcagatggagcggaagaagagtcaacacggagcgggaagctcggtcggagatgccagccgcccaccataccgtggacgtagctccgagagcagctgcggggtggatggcgattacgaggatgccgagctgaaccctagattcctgaaggataacctgattgacgctaatggtggtagtcgcccaccctggccgcctctggaataccagccttatcagagtatttacgtcgggggaatgatggaaggggaagggaagggacctttgcttagatcacagagcacatccgagcaggaaaagaggctcacatggccacggaggtcttattcgcctcgctcctttgaagactgtggcggtgggtatacccccgactgtagtagtaatgaaaacctcacttcctccgaggaagacttttcctctgggcagtcttctcgcgtatcgccttcacccaccacttaccgtatgtttcgcgataagtccagaagcccaagccagaattctcaacaatcttttgattcatctagccctccaacccctcagtgtcacaaaagacaccgacactgccccgtcgtcgtgtctgaggcaaccatcgtcggtgtaagaaagactggacaaatttggcctaatgacggagaaggagccttccatggcgagcatccaggagccgctgaggaagtgttccagaagttgctcccggatatccgcggagcagcggacgcggatcagctggtttgcgagacacccgattgtccacagcacagtgcagatcaccaatag

SEQ ID NO: 27561 - DNA, 1377 bp, synthetic construct
  misc_feature 1..1377: note = Description of Artificial Sequence: Synthetic coding sequence
  source 1..1377: mol_type = other DNA
atggtggaccctgtcggtttcgctgaggcttggaaagctcagtttcccgacagcgaaccccctcgtatggagctgcgaagcgtcggcgacatagagcaggaactcgaaagatgtaaagcttccattcgcagactggagcaggaagtgaaccaggagcgctttcgtatgatttatctccaaaccctactcgcaaaggagaagaagtcctatgatcggcaaaggtggggtttccggcgagccgctcaggcaccagacggggcttcagaacccagagccagcgcttcccgtccgcagcctgctccagccgatggcgctgatcccccacctgccgaggaacccgaagccaggcctgacggggaggggagtcctgggaaggcccgtccaggtactgccaggaggccaggagccgctgccagtggggaaagggacgaccggggtccacccgctagcgtcgctgccctccggtcaaatttcgaaaggatcaggaaaggtcacggacagcccggagccgatgctgaaaaaccattctacgtgaatgtcgagttccaccatgagagaggcctggtgaaagttaacgacaaagaagttagcgaccgaattagttcactcggcagccaggccatgcagatggaacgtaaaaaaagccagcatggggctggatcgagtgtgggggatgcatctcgaccaccataccgtgggagaagtagcgaaagcagttgtggggtcgacggcgattacgaggacgcagagctcaaccccagattcctgaaagacaatcttattgacgccaacggcggaagcagacccccatggcctccactggagtatcagccgtatcaatctatttacgtggggggtatgatggagggagaaggcaaagggcctctcctgaggtcccagagcacatcagagcaggagaagcgactgacgtggccacgtcgctcttactctccacgcagcttcgaagactgcggcggaggctacactccggactgttctagtaacgagaatctgaccagttccgaggaagatttcagctccgggcagtcctcccgggtgtcaccgagtcccacaacctatagaatgtttcgtgacaagtcaaggagtccttcgcaaaattctcaacagtcatttgactcaagtagcccacctacccctcagtgccacaagcgccataggcattgtcctgtcgtggtttctgaggccaccattgttggagttagaaaaacaggccagatctggccaaacgacggcgagggggcttttcatggggatgccgatggctcctttgggaccccacctggctacggatgcctgtgcctcccggcatggccaagcggatgtacagccgcaactgccagagtgacccgatcatag

SEQ ID NO: 27562 - DNA, 3816 bp, synthetic construct
  misc_feature 1..3816: note = Description of Artificial Sequence: Synthetic coding sequence
  source 1..3816: mol_type = other DNA
atggtcgatcccgtggggtttgccgaagcatggaaagcacagtttccggacagcgagcccccacggatggagctgagatccgtcggggatatcgagcaagagcttgagcgctgcaaagcctccatcagacgactggaacaggaggtgaatcaagagcgattccggatgatctacttgcaaactttattggcaaaagagaaaaagtcctatgacaggcagcggtggggcttcagacgcgctgctcaagcacccgatggagcttctgagcccagagcctcagcttcgcgcccacagccagctccagccgatggagcagatccccctcctgccgaggagccggaggcccgtccagacggcgagggcagccccggtaaggccaggccgggaacagctcggcgacccggtgctgccgctagcggagaacgcgatgatagagggcctcccgcttcagttgccgctctaaggagtaattttgaaagaatcaggaaagggcacgggcagcctggggctgacgcagaaaagcccttctacgtgaacgtggagttccatcatgagcgcggactcgtcaaggtcaatgacaaggaggtctcggatcggatctcctctctcggctctcaggccatgcaaatggagcggaaaaaaagccaacatggcgctggatccagcgtcggcgacgcctcccgccctccatacagagggaggagctccgagtcttcatgtggggtggatggagactacgaagatgccgagctgaacccacgctttctgaaggacaatctgattgatgccaacgggggatctcggcctccttggcctcctcttgagtaccaaccctatcagagcatctatgttggcggaatgatggaaggggagggcaaggggcctctactacgctcccagagtaccagtgagcaggaaaaacgtctgacctggcctaggcgctcctatagccccaggtctttcgaggattgtggcggaggctacacgcccgactgcagttctaatgagaacctgaccagcagtgaagaggactttagttctggccagtctagtagagtgagtcccagccctacaacctaccgtatgttccgggataaaagccgtagtcccagccagaattcacagcagagcttcgactcatcctccccacctactccccagtgccacaaacgccacagacactgtcctgtggtagtctctgaggctacgattgtcggggtcaggaagacaggtcagatatggccaaacgacggtgaaggagcattccacggcgatgcagatgggtctttcgggacacctcccggttatggctgtgccgctgaccgagccgaagagcagaggcgccatcaggatggtttaccctatatcgatgactccccctccagctccccacacctctctagcaagggacggggatccagagatgcactcgtgagcggtgcccttgagtccaccaaggcctccgaactggatctggaaaaaggacttgaaatgcggaaatgggtattatcaggcatcctggcctccgaagagacctacctgagtcatcttgaggctcttctgttgcccatgaagcccctgaaagcggcagccacaacaagtcagccggtgctgacttcccaacagatcgagaccattttctttaaggtgcctgaactgtacgaaatccacaaggaattttacgatgggcttttcccaagggtccagcagtggagccaccaacagcgcgtgggagatctgttccagaagcttgccagtcagctcggagtataccgagccttcgtggataattacggcgtcgctatggagatggcagaaaagtgttgtcaagccaacgcgcagtttgcggagatttcggaaaatctgagggcacgcagcaataaggacgccaaagaccctacaacgaagaactctcttgagaccttgctgtacaagccggttgatagagtgacaagatctacactcgtccttcacgatcttctgaagcacacgcccgcatcccatcctgatcatccacttcttcaggacgccctgaggatcagccagaatttcctctcttccatcaacgaagaaataacacctagacggcagtctatgacagtaaaaaaaggtgaacaccggcagttactgaaggatagtttcatggttgaactggtagaaggtgccagaaaactgaggcacgtattcttatttaccgacttgttgttgtgtacaaaactgaaaaagcagtccgggggtaaaacacagcagtacgattgtaagtggtacatcccactaacggacctgagctttcagatggtagacgagctggaggccgtacctaatatccccctagtccccgacgaggaactcgatgctctgaaaatcaaaatatctcaaattaagaatgacatacagcgggagaaacgagccaacaaagggtccaaggcgacggaaagactgaagaagaagctgagtgagcaagagagtctactcctgctgatgtctccgtcgatggcgtttcgagtgcactcacgcaacggaaaaagttatacctttctgatctcctccgattacgagagggccgagtggagggagaatatcagagagcagcagaaaaagtgtttccggtcctttagtctgaccagcgtggagttgcaaatgttaaccaattcttgcgtgaagctccaaaccgtccattcaattccactgaccatcaataaggaagatgatgagagtcctggcttgtatggatttctgaacgtgatcgtgcatagcgcgacaggctttaagcagagctccaacttatactgtaccctggaggttgattcatttggatatttcgttaataaggcaaagacaagggtgtaccgggacacagctgagcctaattggaatgaagaatttgagatcgaactggagggcagccagaccctccgaattctctgttatgagaagtgctacaacaaaaccaaaatacccaaggaggacggtgagagcacggatcgtctgatgggcaagggccaggtgcagctggacccccaggcactccaggatcgcgactggcagagaaccgtgatcgcaatgaatggaattgaagtcaagctgagcgtgaagtttaactcccgggaattctcactcaaaaggatgccgtctagaaagcagaccggcgtgttcggggtaaagatagccgttgtcaccaagagggaaagatccaaggtgccatatatcgtcagacagtgcgtggaggagatcgaaaggcggggtatggaggaagttggaatctatagagtgtcgggcgtggccacagatatccaggccctgaaagccgcttttgacgtgaacaacaaggacgtaagcgttatgatgagtgagatggacgttaacgcaatcgccggaaccttaaagctgtacttcagagagttgccagagcctcttttcacagacgagttctacccaaattttgcagagggcatagcacttagcgaccctgtggctaaggaaagttgtatgcttaacctcttattgagcctaccagaggctaatcttctgacattcttgttccttctcgatcatttaaaaagagtggccgagaaagaggctgtgaacaaaatgtccctgcacaacttagcgactgtgttcggccctacactcctgaggcccagtgaaaaggagagcaagttgcccgctaatccttctcagccaatcaccatgaccgactcgtggagtctggaagttatgtcccaggtgcaagtgctgctgtacttcctacagctggaggccatcccagctccagacagcaagagacagagtattctgttttccaccgaggtctag

SEQ ID NO: 27563 - DNA, 2811 bp, synthetic construct
  misc_feature 1..2811: note = Description of Artificial Sequence: Synthetic coding sequence
  source 1..2811: mol_type = other DNA
ccatctgcccctagagtgtccacagtgggcctgctgtgttctggagccggacctcacttatgcccttgcgctgaagagggaactggaggactggaatcccagggtgagatcattccctctcgcggaagccgcaagccagacggcgtctccggctcccgcagactgttctctagtttgtgcaagtctcaggagggaagccgaaaagaatgtctacggaaacatcggcgattaggacccgctatgccagtgtcctcccctggtttccccggtcctctggcaaggtcagaacatcacttggacaccgctgcactacagacaggacagcggtctagcgctggaactaagatgggttgtcccacactgatgactaggccgcctcacaggcccacaagcgcagcacgcgctggggctgcagggatgcgctggtcaagagagccctggtcccctctgaagagatctgaactggatctcgaaaagggcctcgaaatgcggaagtgggtcctgtcaggaattctggcaagtgaggagacatatctttctcaccttgaggccctcctgttgcccatgaagccactgaaagccgcagctacaacgagtcagccagtcctcacaagtcagcagatcgaaacaatattctttaaagtaccagaattgtatgagattcataaggagttttatgacgggttatttcccagagtacagcagtggtcacatcagcagagggtgggtgatctatttcagaagctcgcctcccagctgggggtctacagggcatttgtcgataattatggtgtggcgatggaaatggccgaaaaatgctgccaggccaacgcacagttcgccgagatctccgagaacctgagagccaggtccaataaggatgccaaggatcctacgaccaagaacagtcttgagacactgctgtacaagccggtggatcgcgtgacccggtccacacttgtgctgcacgaccttctcaaacatactcccgcttctcaccccgatcaccccctactgcaggacgcattgcggatatcccagaactttctcagctctataaatgaggagatcacccctcgacggcagagcatgaccgtgaagaaaggcgaacataggcagctactaaaagacagtttcatggtggaactcgtggaaggggcaagaaagttgaggcatgtttttttattcaccgacctcctactctgtacgaaactgaagaagcagagtggaggcaaaacccagcagtacgactgcaaatggtacatccctctgacagacttgtcatttcagatggtggacgagctggaggccgttcccaacatccctctggtcccagacgaggaactcgacgccctcaagatcaaaattagtcagatcaaaaacgatattcaaagagagaagcgcgctaataaggggtctaaggccacagagagactgaaaaaaaagctgtcagaacaagaatctttgctactgttaatgagcccgagtatggcgtttagagttcactcacggaacggcaaatcctatacatttctcatctccagtgattatgaaagggccgagtggcgcgaaaatattcgcgagcagcagaagaaatgtttcaggtcctttagcctcacctcggtagaactccagatgttgactaatagctgtgtgaaactgcaaacagtgcattccatccccctaacgatcaataaggaggacgacgagtccccgggtctttacggatttctgaatgttattgttcatagcgctaccggctttaaacagtcatcaaacctgtattgtaccctcgaagtggactcttttggttacttcgtgaataaagcaaagacccgggtgtatcgcgatacagctgagccaaattggaatgaagaatttgagatagaactcgaaggttcccaaacgctccgcattttatgctatgaaaaatgctataataaaacaaagattcccaaagaagacggagagtccacagatcgactcatgggcaaaggccaggtgcagctggatccccaagcgctgcaggaccgagactggcaacgtacagtgattgccatgaatggcatcgaggtaaaattgtccgtcaaatttaattctagggagttcagcttgaagagaatgcccagcagaaaacagaccggcgtgtttggcgtgaaaatcgctgtggtcactaaacgagagagatctaaagtgccatatatcgtgcgccagtgcgtggaggaaattgagcgaagaggcatggaagaagttggcatatatagggtgagtggagtggctacagacattcaggcgctgaaggctgcattcgatgtgaacaataaggacgtctctgtgatgatgtcagaaatggatgtgaacgcaatcgctggaactttgaaactatattttcgagagcttcctgagccactcttcaccgacgagttttaccccaacttcgccgagggaattgcgttgagcgatccagtggctaaagaaagctgtatgttgaatctgctcctaagcctcccagaagcgaacctgcttacgtttctgttccttctggaccacctgaaaagggtcgccgagaaggaagctgtaaataaaatgtctctccataacttagcgacagtctttggaccgacactgctgaggccttctgaaaaggagtcaaagttgccagctaacccaagccagcccatcacaatgaccgactcctggtccctcgaagtcatgtcacaagtgcaggtgttactctacttccttcagctggaggctattcccgcacctgactccaagcgccagagcatcctcttctctacagaggtctag

SEQ ID NO: 27564 - DNA, 3684 bp, synthetic construct
  misc_feature 1..3684: note = Description of Artificial Sequence: Synthetic coding sequence
  source 1..3684: mol_type = other DNA
atggtggatcccgtgggattcgctgaggcctggaaagcccaatttccggattctgagcctcccaggatggaactgcggtccgtgggagatattgagcaggaactcgaacgttgtaaggccagtattaggcggctcgagcaagaggtgaaccaagaacgctttagaatgatttatttacagaccctgttggcaaaggaaaagaaatcatatgataggcaacgttggggattccggagagccgcacaggctccagatggtgcgtctgagcccagggccagcgcgagtagaccgcagccagcgccagctgatggtgctgaccctccaccagctgaggaacctgaggcccgacccgacggagaagggtcccctggaaaggcaaggcctggcaccgccaggcgaccgggagccgcagcatcaggcgagcgagacgatcggggtccacctgcatctgtcgcggcattgaggtcgaactttgagcggatccggaagggacacggacagccgggagctgacgctgagaaaccattttacgtcaatgttgagtttcatcatgaaagaggtctggtgaaggtcaatgataaggaagtcagcgacagaattagctcactgggaagccaggccatgcagatggagcggaaaaagtctcagcatggtgccggatcttctgtaggagacgcaagtcgacccccttacaggggccgttctagcgaatcatcttgcggtgtggatggtgattacgaggacgctgaactcaatccaagatttctgaaggataatctgatcgacgctaatgggggatcacgccctccttggccaccattagaataccagccctatcagagcatttacgtgggcggtatgatggagggagagggcaagggacctctcctacggagccagagcacatcagaacaggagaagagattaacatggcccaggaggtcgtactctccacgtagtttcgaagactgcggcggaggttatacaccggattgttcaagcaacgaaaatctcacatcttccgaagaagatttctcctcagggcagtcctcccgggtttccccgtcgcctaccacgtatagaatgtttcgagacaaatcacggtcgccctcgcagaactcgcagcaaagtttcgacagcagttctcctcccacgccccagtgccataagcgccacagacattgtcctgtggtggtctctgaggccacaatcgttggagtacgcaaaacaggacaaatttggcccaatgacggggagggcgcattccacggtgatgcggatggctctttcggaacccccccaggttacggctgcgcggcagaccgagcagaagaacagcgaaggcaccaggatggcctgccctatattgatgatagtcctagtagttccccgcatctgtcttccaaggggaggggttctcgtgatgccttggtgtccggggctttggagtcgactaaggcttccgaactggacttggagaaaggtttggagatgaggaagtgggtgttgagcgggatcctggcaagcgaggaaacatatctctcccacctagaggccttactgcttccaatgaaacctctgaaggctgccgcaacaaccagccagccagtgctcacatcccagcagattgagaccattttctttaaagtacccgaactgtatgaaatccataaggagttttatgatggactcttcccgagggttcaacagtggtcccaccaacagagagtcggggatctgtttcaaaagctcgcttcccagctgggcgtctacagggccttcgtggacaactatggcgtagccatggagatggcagagaaatgctgtcaggcaaatgcccagttcgctgaaatatctgaaaaccttcgcgcacgcagcaacaaagacgctaaggacccaactactaaaaacagcctcgagaccctgttatacaagcctgtagatcgggtgacccgcagcaccttggtgctgcacgatctactgaaacatacccccgcttcacacccagatcatcctctacttcaggacgcccttagaatttcccagaacttcctgtcttccatcaatgaggagattacccccagacgtcagtccatgacagtaaaaaaaggcgaacatagacagctgctgaaggattcttttatggttgagctcgtggagggagcacgtaagctaaggcacgtgtttctgttcaccgacctgctcttgtgtaccaagttgaaaaaacagagcggcggaaagacacagcaatatgattgcaaatggtacatacccctgaccgacctgagctttcagatggtggacgagctggaggctgtgcccaacatccccctggttccagatgaagagctggatgccctgaaaatcaagatctctcagatcaagaacgatatacagcgggaaaaaagagcaaataagggcagcaaggcgaccgagcggctgaagaaaaagctgtccgagcaggaaagtcttcttcttctgatgtcaccatccatggcatttcgtgtgcattcgcggaacgggaaaagctatacgtttcttatctcatcagattacgagagggccgaatggagggaaaatattagagagcagcagaagaaatgtttccgatcattcagtctcacatcagtggaactgcagatgctgactaactcttgcgtgaaactacaaactgtgcacagcataccacttactattaacaaggaagatgacgagagcccgggactatacggatttcttaacgtcatagttcacagcgccacaggcttcaaacagtcctccaatctctattgtaccctagaggtggatagtttcggttactttgtaaataaggctaagaccagagtttatagagatacagcagaaccgaactggaacgaactcgatccacaggctctgcaagacagggactggcagagaactgtgatcgctatgaacggcatagaagttaagctgtccgtgaagttcaattcccgcgagttcagtctcaaacgaatgccctctcggaagcagactggcgtgtttggcgttaaaatcgccgtcgtgactaagcgcgaacggtctaaagtcccctacatagtgcgacagtgcgtggaagagatcgaacgaagggggatggaagaggtaggcatctacagagtgtctggcgtggccaccgatatccaggctttgaaggccgcatttgatgtgaataataaagatgtgtcggtgatgatgtctgagatggacgtaaacgcaattgccggtactctcaagctgtattttcgcgaactcccagagccactgttcaccgacgagttctaccctaattttgcggaggggattgccctgtctgatcccgtcgccaaggaatcctgcatgttaaacctgctgctctctttgccggaggcaaacctcctgacgtttctgtttttactcgaccacttgaagagagtggcagagaaagaggcggtgaacaagatgagccttcataacttagcgacagtatttggcccaactctgttgcggccaagcgagaaagaatctaagctgcctgctaacccttcccaacctataacaatgaccgactcttggagccttgaggtcatgtctcaggtgcaggtactgctatacttcctgcagctggaagccatccccgcaccagactcgaagcggcagtctatacttttttctacagaggtgtag

SEQ ID NO: 27565 - DNA, 1404 bp, synthetic construct
  misc_feature 1..1404: note = Description of Artificial Sequence: Synthetic coding sequence
  source 1..1404: mol_type = other DNA
atggtggaccctgtagggtttgccgaggcctggaaggcccagtttcctgatagtgagcctcccaggatggagttaaggtcagtaggcgacattgaacaggagctcgagcggtgtaaggcttctattcgacgtttagaacaggaagtcaaccaagaacgcttcagaatgatatatttgcagacactcctggcgaaagagaaaaagtcctacgaccggcagagatgggggttcagaagggccgctcaggcacctgatggcgcttcagagccaagggcaagcgcttctaggccacagcctgccccagcagacggagccgatccaccacctgccgaggaaccagaggctaggcccgacggcgagggctcccccggaaaggcgagacctggaaccgcacggaggcccggagcggctgcttctggcgagcgtgacgatagagggcctcccgcaagcgtggccgctctacgttctaactttgagaggatacggaaaggacacggacagccaggagcagatgccgaaaagcctttctatgtgaacgtggagttccatcacgagcggggattggtcaaggtcaacgacaaagaagttagtgacagaatctcctcattagggagccaggccatgcaaatggagagaaaaaaaagccaacacggcgcaggatctagcgtgggagatgcaagtcgtccaccataccggggacggtccagtgagtcgagctgcggcgtcgacggagattacgaggatgcagagttgaacccaaggttcctgaaggataatctaattgatgccaacgggggttcccgccctccatggccacctctggagtatcagccataccagagtatctatgtgggtggaatgatggagggcgagggaaaaggaccccttctccggagtcagtctacatccgagcaggagaagcgtctgacatggccgagaaggagttattctccgaggagcttcgaagattgtgggggaggttacacaccagattgctcatctaatgaaaatctgacaagttctgaggaggatttttcatccgggcagagcagtagagtgtccccctccccgaccacgtacagaatgttccgggacaagtcccggagcccatcacagaactcccagcagtctttcgactctagcagcccgccaacacctcaatgtcacaaaagacatcgccattgtccagtagtggttagcgaagcaaccatcgttggcgttagaaagactggccaaatttggccaaatgacggtgagggcgctttccatggggacgccgttcttaaaacagaggtgcctcatcagggtgttagaagagctcggctgtctttagaggccttgggggaagatccgagctttttgtttcccgcttccgatggcccacgccatagttctacctggtag

SEQ ID NO: 27566 - DNA, 1365 bp, synthetic construct
  misc_feature 1..1365: note = Description of Artificial Sequence: Synthetic coding sequence
  source 1..1365: mol_type = other DNA
atggtggatcccgttggcttcgcagaggcatggaaggcccaattccccgattctgaaccacctcggatggagctgcggtcagtcggagatatcgagcaggaactggaacgatgtaaggcctcaatcaggcgcctcgagcaggaggtgaaccaggagcggttccgtatgatatacttgcaaactcttctggcgaaagagaaaaaaagctacgatcgccagcgatggggctttaggagagctgcacaggctccagacggcgctagcgaacctcgtgcaagcgcctcccggccacaaccagccccagcagacggggcagatccacctcctgctgaagagccagaagcacgaccagacggggaaggatcccctggtaaggcacgccctgggactgctcgcagaccgggagcagccgcttcaggcgaacgggatgataggggccctcctgcctccgtagctgccctcaggagtaattttgagcgcatcaggaaggggcacggacagcccggagcagatgctgagaagcctttctatgtgaacgtggagtttcatcacgagcgtggattggtgaaggtgaacgataaggaagtatctgaccggatctcttcactgggcagtcaggccatgcaaatggagcggaagaagagccagcatggggctggctcgtccgtaggggatgcatcaaggcccccttataggggccgatcttctgaaagcagttgtggtgttgatggcgattatgaggacgccgagctgaacccgagatttctgaaggacaatttaatagatgccaacggtggctcaaggccgccttggcctccgctcgaataccagccatatcagagtatctacgttggtgggatgatggaaggggagggcaaaggtcctctgctgagatcacagtccacaagcgagcaggaaaaaaggctgacttggccgagaaggtcttattctcctagatcctttgaggactgcggagggggatataccccagactgcagttctaacgaaaacctgacctcctccgaggaggatttctccagcggccagagctcccgcgtctcaccttcccctactacctatagaatgtttcgcgacaaatctaggtccccaagccagaactcccagcagtcattcgattcctccagccctccgacccctcagtgtcataagcgtcatagacactgcccggtcgtagtgtcagaggctactattgttggagtgaggaaaacagggcagatctggcccaatgacggggagggggctttccatggagacgccgacggttccttcggaactccccctgggtacgggtgtgcagctggccgaccccctcatcttactgagctcccagtccaacaccagtag

SEQ ID NO: 27567 - DNA, 4704 bp, synthetic construct
  misc_feature 1..4704: note = Description of Artificial Sequence: Synthetic coding sequence
  source 1..4704: mol_type = other DNA
atgaatgtggagaaagccgagttctgcaacaagtctaagcagccgggtttggccaggtctcagcataaccggtgggcgggttcgaaggagacatgcaatgaccggcgaacacctagcacagagaagaaagtggatctcaatgccgatcctttatgtgagcgaaaggagtggaacaagcaaaaattgccctgctcagaaaacccaagagacaccgaggacgttccctggatcaccctgaatagttcaatccaaaaggtgaatgagtggttttcgaggtccgatgaactcctgggctcagacgattcacatgacggcgagagtgagagcaatgcaaaggtcgctgacgtcctggacgtgctgaatgaagtcgacgaatattccgggtccagcgaaaagattgatctactggcaagtgatccacacgaggcactgatttgcaaatccgaacgtgtgcatagtaaaagcgtggaaagtaatattgaagacaagatcttcggtaagacttacaggaaaaaagcctcattgcctaacctgtcccacgtgacagagaaccttatcataggcgctttcgtgaccgagccacagattatacaggagcgaccactgactaacaagctcaagagaaaacgcaggcctacctcggggctccatccagaagactttattaagaaagccgatctggccgtccaaaaaaccccggagatgatcaatcaaggcaccaaccaaacagaacaaaacggacaggtgatgaatatcaccaattccggccatgaaaacaagactaagggggacagcattcagaatgagaaaaaccccaaccctattgagagtctggaaaaagagagtgccttcaaaaccaaggccgaaccgataagctctagcatatccaatatggagcttgagctgaatatccataactccaaggcccctaagaagaacagattgagacggaaatcatctacaaggcacattcatgcactcgaattggtggttagtagaaacctgtcaccacctaactgcacagagctccaaattgactcctgctcaagttccgaagaaattaagaagaagaaatataaccagatgcccgtcaggcatagccgcaatctgcagctcatggagggaaaggagccagccaccggtgcgaagaaaagcaataaacccaacgaacagaccagcaagcggcatgattcagatacattccccgagctgaagctcactaatgcgcctgggtcctttaccaagtgttcaaacacgtctgaacttaaagagttcgtaaatccaagcctacctagagaagagaaggaagagaagctggagaccgttaaggtatcaaacaacgctgaggatcccaaagatctgatgctgtcaggagagcgggtcctccagacggagcgaagcgtggagtcatccagcatttcactggtgccaggaaccgattacggaacacaggagagtataagcctcctggaggtgagtaccctcggtaaggccaaaacggagcctaataagtgtgtgtcgcagtgtgctgcatttgagaaccctaagggacttatccacggatgctctaaggacaataggaatgacactgagggtttcaaataccccctgggacacgaggtgaaccattcacgcgagacttcaatcgagatggaggaaagcgagctggacgcccagtacctccagaatacctttaaagtgtccaagagacagagtttcgcccctttctctaatccaggaaatgccgaagaggagtgtgccaccttctccgcgcatagcgggtccctgaagaagcagagcccaaaagtgactttcgagtgtgaacagaaggaagaaaaccagggaaagaatgaaagtaacataaaacccgtccaaacagtgaatatcacggctggctttcccgtagtgggacagaaagacaagccagtcgacaatgccaagtgtagcattaaagggggatcccgcttttgcctttcatctcagttcagaggcaatgaaactgggctgatcacccccaataagcacggcctgttgcaaaacccctaccggataccacccctgttccctattaagtcgttcgtgaagacaaaatgcaaaaaaaacttgttggaggagaactttgaggaacattccatgagcccagaaagagagatgggaaacgaaaatattccgtcgacagtaagcaccattagcaggaataacattcgcgaaaatgtctttaaggaggctagttcttctaacattaacgaggtgggcagttcaacaaatgaggtgggctcctccattaatgagatcggtagcagcgatgagaacattcaagcagagctgggacgtaatagagggccaaaactgaatgcaatgctcagactgggggtgctgcaacctgaagtctacaagcagtcactgcctgggtccaactgcaagcaccctgaaattaagaaacaggaatacgaagaggtcgtgcagactgtaaataccgattttagtccctatctgatctccgacaacctggaacaaccgatgggatctagccacgcgagtcaggtttgcagcgagaccccggatgacctcctggacgacggcgagattaaagaggatacttctttcgcagaaaatgacatcaaggaatcttccgctgtcttcagcaaatcggtccaaaagggagaattatcacgcagcccctccccatttactcatacccacttagctcagggctatcgtcggggagctaagaaactggagtccagtgaagaaaacttgtccagtgaagatgaagagttgccttgtttccagcatctgcttttcggcaaagttaataacatcccgagtcagtctactagacactccactgtggccacagaatgcctgagcaaaaatactgaagagaatttgctgtctctcaaaaatagcttgaatgactgctcgaaccaagtgatcctggcaaaggcatcccaagagcaccatctttccgaggagaccaaatgctctgcatcactgttcagttcccaatgtagcgagctagaggatctcacagctaacacaaatacccaggaccccttcctgattggcagctctaaacagatgaggcaccaatcagagagccagggcgtgggccttagcgacaaggaactggtttctgacgacgaagaacggggaaccggccttgaagagaataaccaagaagaacagagcatggattccaatttgggtgaagcggcatctggttgtgagtctgagacaagcgtttctgaggattgcagcggtctgagctcccagtcggacattttgaccacccaacagagagacaccatgcagcacaacctgataaaactccagcaggagatggctgagctcgaagccgtccttgagcagcacggctcccagccttcaaattcctacccctccattataagcgattcttccgcacttgaggacctcaggaacccagagcaaagtacttccgagaaggcagtcctgacaagtcagaagtcaagcgagtatcctatcagccagaacccagagggcctgtctgcggataagttcgaagtgtctgcggactcttctacctccaagaacaaggaacctggagtagagagatcaagccccagtaaatgtccgagtcttgacgacagatggtatatgcatagctgttcaggttccctgcagaatcggaattatccatcccaggaagaactcattaaggtagttgatgtggaggaacaacagcttgaagagtccggacctcacgacctgaccgaaacttcatacctgccacgccaagacctagaaggcactccctaccttgagtccggcatatcactgtttagcgacgaccctgagagtgatccatctgaagacagggctcccgaaagtgctcgcgttggtaacatcccgtctagcaccagtgctctcaaagttcctcagttgaaagtcgctgaatctgcacagtccccagccgcagcacatactacagacacagccggttataatgcaatggaggaaagcgtcagcagagagaagcccgaactcaccgcaagcacagagcgtgtgaacaagagaatgagtatggtggtgtcaggtctgacacccgaggagtttatgctggtgtataaattcgcccgtaaacatcacataaccctgactaatttaattacagaagaaacgacacacgtagtcatgaagactgatgccgagtttgtctgtgagcggaccctgaagtattttctgggcatcgcaggtggtaaatgggtggtatcctacttttgggttactcagagtatcaaagagcgcaagatgttgaacgaacacgattttgaagtgagaggtgatgtagttaacgggagaaaccaccaggggccaaagcgggcacgagagtcccaggaccgtaagatcttccgcggacttgaaatctgctgttatgggcctttcacaaacatgccaaccgaccagttggagtggatggtgcaactgtgcggagccagcgtggtgaaggaactcagtagctttacactgggcaccggagtccaccccatcgtcgtcgtgcagcctgatgcatggactgaagacaacggtttccatgctattggacagatgtgtgaagcgccagtagtgacacgcgagtgggtgctggattccgtagccctttaccagtgtcaggagctggacacatatctcatcccacagatcccgcacagccattactag

SEQ ID NO: 27568 - DNA, 4875 bp, synthetic construct
  misc_feature 1..4875: note = Description of Artificial Sequence: Synthetic coding sequence
  source 1..4875: mol_type = other DNA
atggatctgagcgccttgcgcgtggaggaggtgcagaacgtaattaatgccatgcagaaaatactggaatgcccgatttgcctggaactgataaaggaacctgtctccacgaaatgcgaccatattttctgtaagttctgtatgttgaaattgctgaatcagaagaagggcccatcacagtgccccctttgcaagaacgacataactaagcgctctctccaggagagtacccgctttagtcagctcgtagaggagctcctgaagatcatctgtgcctttcaactcgacactggcctggagtacgctaattcatacaattttgccaagaaagagaataactcacccgagcatctgaaagacgaggtctctatcattcagtccatgggctatcggaatagggccaaacggttgcttcagagcgaaccagagaatccttctttgcaggagacatctttgagcgtgcagctgtcaaacctcgggacagtacgcaccttgcgcaccaagcagcggattcagcctcagaaaactagtgtttacattgaattaggcagtgactcgtcagaagacaccgtaaataaggcgacatactgctctgtcggagatcaagaactgttgcagatcacccctcaagggactagagatgaaatcagtctcgactcagctaagaaagctgcgtgcgagtttagtgagaccgatgtcacaaacactgagcaccaccagccctcgaacaacgacctcaatacaaccgagaaacgggctgctgagaggcacccagaaaaataccagggctcttctgtgagcaacctgcatgtcgagccctgcggtaccaacacacacgcttcctctctgcagcacgagaactcttctctgcttttaaccaaagatcgtatgaacgtggagaaggccgaattttgtaacaaatctaaacagcctggtctggctaggtctcagcacaacaggtgggctggaagcaaagagacatgcaacgaccggagaactcccagtactgagaaaaaagtcgatcttaacgccgaccccctctgtgaaagaaaagagtggaacaaacagaagttaccatgttcagagaatccaagagacacggaggacgttccttggataaccttgaactcttccattcagaaggtcaatgagtggttcagtcgctctgatgaattactggggagtgatgacagccacgacggggagagcgagagtaatgcaaaagtagccgatgtgcttgatgtgctaaatgaagtggacgagtattccgggtctagtgaaaagattgatcttctggccagcgaccctcacgaagctctaatctgcaagagcgaaagagtgcatagcaaaagcgttgagtccaacattgaagataagatttttggtaaaacgtacaggaaaaaagcttcattgccaaacctttcccacgtgacagaaaatttaattatcggggctttcgtgactgaaccccagatcatccaggagcgacccctaaccaacaagctgaaacggaaaaggaggccaactagtggcctgcatcccgaggacttcataaaaaaagccgatttggccgttcaaaagactcccgaaatgattaaccagggcacaaaccagacagagcaaaatggccaggtgatgaacatcaccaattcaggccacgaaaacaagaccaagggtgatagtattcaaaacgaaaaaaaccctaatccaatcgaaagtctcgaaaaagagtctgcatttaagacaaaggcggagcctatatcgtcttctatttcaaacatggaactggagctgaatattcacaatagtaaagcccctaagaagaacagactaagaaggaagtcaagtacccgccacatccacgcccttgaactggtagtgagtaggaatttaagccctcctaactgcacagaattgcagatcgacagctgctctagcagcgaagagatcaaaaaaaaaaaatacaaccagatgccagtgagacatagtcggaacctacaactaatggagggcaaggagcccgcaaccggcgctaaaaagtcaaacaagccaaatgaacagacctccaagaggcacgatagcgatacctttcccgagctcaaactgacgaatgcacccggatcatttactaagtgttccaatacttccgagctgaaagagttcgtgaatccctctctgcccagggaggagaaggaggaaaaactcgaaaccgtgaaagtgtccaataacgccgaagaccccaaggacctgatgttatctggcgaaagagtactgcagacagagaggagtgttgaaagctccagcatcagtttggtgcctgggacggactatggcacccaggagagcatatcattgctggaggtctcgacactgggaaaggcaaagacagagccaaataagtgcgtctcccagtgtgccgcatttgagaaccccaagggtttaatccatggctgttcgaaggataacagaaatgatacagagggatttaagtatcccctggggcatgaggtgaaccacagtagagagaccagcatcgagatggaggagtcggagctggatgcccagtaccttcagaataccttcaaggtttcaaaaaggcaatccttcgctcccttcagcaaccccggaaacgcagaggaggagtgtgccaccttttcagctcacagcgggagcctgaaaaagcaaagcccaaaggtgacttttgagtgtgaacagaaggaagagaatcagggaaaaaacgaatccaacatcaagcctgtccagactgttaacatcaccgcgggtttcccagtggttgggcagaaagataaaccggtggacaatgctaagtgctccatcaagggtggtagtcgtttctgcctgtcctcgcagttcagaggcaacgaaaccggcctgattactccaaacaaacacgggctgctgcagaacccataccggatcccccctctgttccccatcaaatccttcgttaaaaccaaatgtaagaaaaacttgttggaggaaaatttcgaagaacatagtatgagtcccgagagagagatgggcaatgagaacattccctccaccgtcagtaccatcagccgaaacaacattcgggagaacgtcttcaaggaggcttcaagttctaacatcaacgaggtcggttcctcaactaacgaggtagggtcaagcatcaacgagattggttcttcagatgagaatatccaggccgagctgggccgtaacagaggcccaaaattgaatgcaatgctcagactcggcgtgctgcaacctgaggtgtataagcagtccctgcccggtagtaattgcaaacacccggagataaagaagcaggaatacgaagaagtggttcaaacagtgaacacagacttttcaccttacctcattagcgacaacctggagcagccaatgggctcatcacacgcttcccaggtgtgctctgaaacgcctgacgacttgctagacgatggggaaatcaaagaagatacctcatttgccgagaacgacattaaggaaagctctgctgtgtttagtaagagtgtgcagaagggtgaactcagcaggagccctagtccttttactcatacccacctcgctcaggggtatcgcaggggggctaaaaaactggaaagttccgaagagaatctgagttccgaagatgaggagctcccatgcttccagcaccttctatttggcaaggttaataacatcccatcccagagcaccaggcactcgaccgtggccaccgagtgtttatcaaagaacaccgaggaaaatctgttgagcctcaagaacagtttgaacgattgctcgaatcaggtgatcctggccaaagcttcccaggaacaccacttatccgaagagaccaaatgctctgcgagcttgttcagcagccagtgtagcgaactggaggacctcacagccaatactaacactcaggatcctttcctgattggttcctcaaaacagatgagacaccagtctgaatcccaaggggtgggtttaagcgacaaagaattggttagtgatgatgaggagcgtggcactggcttggaggagaataaccaggaggagcagtcaatggatagcaacctcggggaagccgcaagtgggtgtgaatccgagacttccgtatccgaagactgttcggggctcagctcacaatccgacattctgacaacccaacagagggacacgatgcaacacaacctgatcaagttacagcaggagatggccgaactcgaggcggttctcgaacaacacgggagtcagcccagcaattcgtacccgtccataatcagcgattctagcgccctggaggacttgcggaaccctgagcagtcgaccagcgagaaggacgccgaattcgtgtgcgaaaggacgcttaaatattttctgggtattgcgggtggcaaatgggtagttagctatttttgggtgactcagtccattaaagagcgtaagatgctcaatgagcacgactttgaagtgaggggagacgtggttaatgggcgaaaccaccagggacctaagcgagctcgcgagtcccaggaccgcaagatttttcgcggtttggagatctgctgctacggcccattcacaaacatgcctactgatcagctggaatggatggtgcaattgtgtggagcatctgtggtcaaggagctaagttcattcacactcgggaccggcgtgcacccaatcgtcgtcgtgcaacccgatgcctggaccgaggacaatggattccacgccattggccagatgtgcgaggctccagtcgttactagggagtgggtgctggattccgtagccctttaccagtgccaggaactggatacctacctgatccctcaaattccccactcccactactag

SEQ ID NO: 27569 - DNA, 2043 bp, synthetic construct
  misc_feature 1..2043: note = Description of Artificial Sequence: Synthetic coding sequence
  source 1..2043: mol_type = other DNA
atggacctctctgccctgcgggtggaagaagtgcaaaacgttattaacgctatgcaaaaaattctggagtgtcctatttgcctggagctgatcaaggagcccgtttcaacaaaatgcgatcatatcttttgcaaattctgtatgctcaagcttttgaaccagaagaaaggaccgtcccaatgccccctctgtaaaaacgatatcaccaaacggagcctgcaggaaagcacgcggttctctcagttagtggaggagttgctgaaaataatttgcgcattccagctggacaccggacttgagtacgctaatagctacaatttcgcgaagaaagaaaacaatagccccgagcacctgaaggatgaagtttctatcatccagtcaatggggtataggaatcgggcaaaacggcttctgcagtccgagccagaaaacccctctctgcaagagacatccctgtctgtgcagcttagcaatctgggcaccgttcgcaccctgagaacaaagcagaggatccagccccagaaaacatcagtgtacatcgaactgggtgaggctgctagcggttgcgaatccgagactagtgtctctgaagattgctctggcttaagcagtcagtctgatatacttacaactcaacagcgggacaccatgcaacataacttgattaagttacaacaggagatggcagagctggaggctgtgttggagcagcacggctcccagccttcaaattcatatccctccattatctccgactccagcgccctagaggacttaaggaacccagaacagtcaacctcagaaaaggctgtcctgacatcccagaaatcttctgaataccccattagtcagaatcccgaagggcttagcgcggacaaattcgaggtgtccgccgatagctccacatccaagaataaagagcccggagtggagcgatcctccccctccaagtgcccttcgttagacgaccggtggtacatgcattcgtgctctggcagtctgcagaatcggaactaccccagtcaagaggagttaatcaaagtggtagacgtggaggagcagcagctggaagaatcgggtccacatgatctgacagagacaagctatctgccaagacaggacctagagggcacgccatatctggagtctggcatcagcttgttctctgatgatcctgagagtgatccttctgaagatcgggcaccagaatctgccagagtgggcaacattcctagctctacttccgctcttaaggtgcctcaactcaaagttgcggagagcgcacaatcacccgcagccgcacacacaacagacacggctggctataacgctatggaagagtctgtcagcagggagaaacccgaactcacagccagcactgagcgggtgaataagcgcatgagcatggtggtgtccggtctgacaccagaagaatttatgttggtgtataagtttgcacggaagcaccatatcactctcaccaatctgattactgaggagactacgcatgtcgttatgaaaactgatgccgaattcgtgtgtgagagaactctgaagtactttctcggaatcgctggtggcaagtgggtggtgtcttatttctgggtgacccagtcaattaaggagaggaaaatgctgaatgaacacgacttcgaagtgcgtggggatgtggtgaacggtcgcaatcaccaaggacccaaaagagctcgggaatctcaggatcggaagatctttagaggactggagatctgttgttatggcccatttacaaacatgcctactgatcagctggagtggatggtgcagctgtgcggcgcttccgttgtgaaagagctgtctagttttacgctggggaccggtgtgcaccctattgtggtcgtccaaccggacgcttggaccgaagataatgggttccacgctatcggccaaatgtgtgaggccccagtggtgactcgtgagtgggtgctggactccgttgcattataccagtgtcaggaactggacacctaccttattccccaaataccccattctcattattag

SEQ ID NO: 27570 - DNA, 2166 bp, synthetic construct
  misc_feature 1..2166: note = Description of Artificial Sequence: Synthetic coding sequence
  source 1..2166: mol_type = other DNA
atggatttgtctgccttacgggtagaagaggtgcagaatgtgatcaacgccatgcagaagattttagaatgtcccatatgcctggagctcattaaggaacccgtctccacaaaatgcgatcacatcttctgcaaattctgtatgctgaagctgctgaaccaaaagaagggacccagccagtgtccactctgtaagaatgatattacaaagcgatccctgcaggaaagcacgaggttctcccaactggtcgaagagctgcttaagatcatctgtgctttccagctcgatactggacttgaatatgcgaacagctacaatttcgctaagaaagaaaacaattcccccgagcatttaaaggacgaggtatctataatacagagcatgggctatcggaaccgggcaaagcggctgctccagtcagaaccggagaacccaagcttgcaagagaccagcttgtccgtgcaattgtcaaatctggggacagtgagaacgttgcgtacaaaacagcggatacagccccaaaaaacttcagtctacattgaactcggctccgactcttctgaggacacggtgaacaaggcaacatattgttctgtgggcgaccaggagctgctacaaataacaccccagggcaccagagatgaaatctccctggatagtgccaaaaaaggggaagccgcatccggatgtgaatctgaaacctccgtctctgaggattgtagcggcctttcatcccagtccgacatactcacaactcagcagagggacactatgcagcacaacctcatcaaactccagcaggagatggccgagttagaggctgtgcttgaacagcacggaagccagccctctaactcatatcctagtataatcagtgactctagtgctttggaggacttgaggaacccagagcagagcacatcggagaaggccgttctgaccagtcagaagtcttctgagtatcccattagccagaatcctgaagggttaagcgccgataaattcgaagtgagcgccgacagctctactagtaagaataaggagcccggagtggagcgcagtagcccttcgaaatgcccaagtctcgacgaccggtggtatatgcacagttgtagcggttcactgcagaatcgaaattatccatcccaggaggagcttattaaggttgtggatgtggaggagcagcagcttgaggagagcggaccacatgacctgaccgaaaccagttacctccctaggcaggacttggaaggcaccccctacttagaatctggcatctcactgttttccgatgatccagagtccgacccatcagaggatagggccccagagagtgctagggtaggcaacatcccctccagcacctccgccctcaaggttcctcagctaaaggtggccgagagcgcgcaatccccagctgcagcccatacaaccgacacagccggttataatgctatggaagagtcagtgtccagggagaaacctgagctcaccgcatcgaccgagagggtgaataagcggatgagcatggttgtctcgggccttacgccagaggaatttatgttggtctataaattcgctagaaagcatcacattaccctgacaaacctcataaccgaagaaactacccatgtggttatgaagacagatgcagaatttgtgtgcgagcgtaccctgaagtatttcctcgggattgcaggcggtaaatgggtggtctcttacttctgggtcacccagtccatcaaggagagaaaaatgctgaacgaacacgacttcgaagtacggggtgacgtggtgaacggacgcaatcaccagggcccaaaacgcgctcgcgagagtcaagacagaaagatcttcaggggcctggagatttgctgttacgggcctttcacaaatatgccaacggaccagctcgaatggatggtccagttatgcggtgcttccgtcgtaaaggagctgagttccttcactctaggaacgggagtccatccaatcgtggtggtccagcctgacgcttggactgaggacaacgggtttcacgctattgggcaaatgtgcgaagcacccgtggttacacgggaatgggtcctcgacagtgtagccttataccagtgtcaggagctggacacgtacctgatcccacagatcccccatagtcattactag

SEQ ID NO: 27571 - DNA, 4797 bp, synthetic construct
  misc_feature 1..4797: note = Description of Artificial Sequence: Synthetic coding sequence
  source 1..4797: mol_type = other DNA
atggacttgtccgcacttagggtagaagaagtgcagaatgtcataaacgccatgcaaaagattttggagtgtccaatctgcttagaactcattaaagagcccgtgtcgacaaaatgcgatcacatcttttgcaagttttgtatgctgaagcttctgaatcagaagaaggggcctagtcagtgcccactgtgcaaaaacgacatcacaaaaagaagtctccaagagagcacccgcttttctcagttggtagaagagctcctgaagattatctgcgccttccagctggacacaggacttgaatacgctaacagttataatttcgcgaagaaggagaataactctcccgaacacctgaaagatgaagttagtattattcagtcaatgggctaccgtaaccgcgctaaacgtctcctccagagcgagcctgagaaccctagcctgcaggagacgagtctcagtgtgcagctgtctaatcttgggactgtgcggactcttcgcaccaaacagaggatccagccccagaagacctccgtgtacatcgagctgggatctgactcctccgaggacaccgtcaacaaggccacctactgtagcgtgggagatcaagagctcttgcagataactccacagggcacacgcgacgaaatttcactggactcagccaagaaggccgcttgtgagttttctgaaaccgatgtgaccaacaccgaacaccaccagccgtccaataatgatctcaacactacagagaaacgcgctgcagagcgacaccctgagaagtatcaggggtcttccgtttctaacctccacgtagagccttgtgggacaaacacgcatgccagctccctgcagcacgagaacagctcactgttgcttactaaagataggatgaacgtcgagaaagccgagttttgcaacaagagtaaacagcctggactggccagatcccagcacaatcgatgggccggaagcaaggagacctgcaatgatcggagaaccccttccactgaaaagaaagtggacctgaacgccgatcctctgtgtgagcgaaaagagtggaataagcagaaactcccctgcagcgaaaaccccagagacactgaggatgtgccttggataaccctgaacagttcaatccagaaagtaaacgagtggtttagcagatcagacgaacttctgggaagtgacgattctcacgatggggaatcagagagtaatgctaaagtggcagacgtgctggacgtcttgaatgaggttgacgagtacagcggctcatcagagaaaattgacctgcttgcatcagaccctcatgaagcactgatctgcaaatccgagagagttcatagcaaatctgtggaaagcaacatcgaggataaaatctttggaaaaacgtaccgcaagaaagccagccttccaaatctgagtcatgtgaccgagaacctaatcatcggggcatttgttactgaaccgcaaataatccaggaacggcctctgaccaataaactgaaacggaagcggagacctacaagcggcctgcaccctgaggattttattaagaaggctgatctggctgtgcagaaaacccccgagatgattaatcagggaactaatcagaccgagcaaaatggccaggtgatgaacataacaaacagcgggcatgagaataagacaaagggcgacagcattcaaaacgagaagaatcccaatccgattgagagtctagaaaaagagtccgccttcaaaaccaaagccgagcctatttcaagtagtatctccaatatggagctcgagctcaacatacacaactctaaggccccaaaaaaaaacagactgaggcgaaaatctagtactcggcacatccacgctctggaactggtcgtttcgcgcaatctatcaccccctaattgcaccgagctccaaattgatagctgcagttcttccgaagaaatcaagaagaagaagtataaccagatgccagtccggcactcacggaatctccagctgatggagggtaaggagcctgctactggcgctaagaagagcaataagcccaacgagcagacctccaagcgtcatgactctgataccttcccagaactgaaactaaccaatgcacctggttcttttacaaaatgttctaatacgtccgaactgaaagagtttgtcaatccttctctgccgagagaagaaaaggaagaaaaattggaaaccgtcaaagtgtcgaacaacgccgaggatcctaaggatctgatgctctccggagagcgggtactacagaccgaaaggtccgtggaatccagctctatctcactagtgccagggacagactatggaacacaagagtcaataagcctgctggaggtctctacactggggaaagccaagactgagccaaataagtgcgttagccagtgcgccgcattcgaaaacccaaagggactcatacacgggtgtagcaaagacaacagaaatgacacggagggatttaagtacccgcttggacacgaagtaaaccatagtcgagaaacgtctatagaaatggaagaaagcgagttggatgctcagtatcttcagaatacatttaaggtcagcaaaagacaatcttttgcacccttctcaaacccgggtaacgccgaggaagagtgtgcgactttttctgcccattctgggagcctaaagaaacagtcaccaaaggttaccttcgagtgcgagcagaaagaagagaaccaagggaaaaatgaaagcaatataaaacctgtgcagactgtgaatattaccgccggattccctgtggtggggcagaaggataagccagtcgacaatgcaaagtgctccatcaagggcggaagcaggttttgcctgtctagtcaatttcgagggaacgaaaccggactaatcacccccaacaaacatggactgttgcaaaatccctaccggatcccgccactttttcccatcaaatccttcgttaaaaccaagtgcaagaagaaccttctcgaagaaaatttcgaggagcatagcatgtcacccgaacgcgaaatgggaaatgaaaacatccctagtaccgtcagcactataagtagaaacaacattcgggaaaatgtcttcaaggaagcatccagcagcaacatcaacgaagtaggaagtagtactaatgaagtcggcagttctatcaatgaaataggctcatcagacgaaaacattcaggccgaattggggagaaacaggggtccaaagctgaatgcaatgctgagattgggcgttttacaacctgaggtctataagcagagcctgccagggtctaactgcaagcacccagagattaaaaaacaggagtacgaagaggtcgtgcaaactgtaaatactgacttctccccttatctgattagtgataacttagaacagcccatggggtcgtctcacgcttcccaggtctgttccgaaacacccgacgacctgttagatgatggagaaatcaaagaagacacttcctttgcagagaacgatataaaagagtcttctgccgtgttcagtaagtccgtccagaaaggggagctgagtaggagtccatctccattcacccacacgcatctggcacagggatatcggaggggggcaaaaaaacttgagagttctgaagaaaacctgtccagtgaagacgaggagctgccttgcttccagcacctgctgttcggcaaggtcaacaatattccctcacagtccactcgacattctacagttgccacagagtgtctatcaaagaataccgaagagaacctcctgtcactgaagaactcccttaatgattgttccaatcaagtcatcctcgctaaggccagtcaagagcaccatctgtcggaggaaacaaagtgttccgcctctctgttctcatcacaatgcagcgagctggaggacctgacagccaacactaatacccaggacccttttctgatcgggtccagcaagcagatgcgtcaccaatccgaatcccaaggggtcgggcttagcgacaaggagttggtgtccgatgatgaagagaggggaaccggcttggaagagaacaatcaagaagagcaatccatggatagcaatcttggtgaagctgctagtggatgtgagtcagaaaccagcgtatctgaggactgcagtgggttatcttcacagagtgacatcctcacgactcagcagagagataccatgcagcataatctgatcaagctgcagcaggaaatggcggagcttgaagcagtgctcgaacaacacggcagtcaacctagcaattcttacccatccatcataagcgactccagcgcgctagaggatctgagaaacccagagcagtccacttcagagaaaggcgtaacccagagtatcaaggagcggaaaatgctgaatgaacacgactttgaagtcagaggcgacgtcgtaaacgggaggaaccaccagggccctaaaagagctcgcgagagtcaagatcggaagatcttcagggggctggagatctgctgctacggtcccttcactaatatgcctactgaccagctggagtggatggtgcagctatgcggagccagcgtggttaaagagctctcaagctttacattgggtacgggagtccacccgatcgtggtcgtacaacccgatgcttggaccgaggacaatggattccatgccatcggccaaatgtgcgaggctcccgtcgtgactagggaatgggttctggactcagtggccttataccagtgccaggagctagatacttacttgattccacaaatcccacacagtcattactag

SEQ ID NO: 27572 - DNA, 5591 bp, synthetic construct
  misc_feature 1..5591: note = Description of Artificial Sequence: Synthetic coding sequence
  source 1..5591: mol_type = other DNA
atggacctctccgcgctccgagtggaggaggtccagaacgttattaatgcaatgcagaagatcctggaatgtcccatatgcctggaactcattaaagagccagtgtctaccaaatgtgatcacatattctgcaagttctgcatgctgaagctgcttaaccagaagaagggaccctctcagtgcccactatgcaagaatgatattacaaaaaggtcattacaggaatccacacggttctcccagcttgttgaagagctgcttaagattatctgtgcgtttcaactagataccgggctggagtacgctaattcttataacttcgccaaaaaggagaataactccccagaacacctgaaagacgaggtgtccataatccaatcgatggggtacagaaaccgggcaaagcggctattgcagagtgagcctgaaaatccatccttgcaagagacatccctgtcggtgcaactcagtaatctggggaccgtaagaaccctgaggactaaacaacgcatccagccccagaagaccagtgtatatatagaactaggcagcgattctagtgaggacacggtgaacaaggccacatattgcagtgtcggtgatcaagagctcctgcaaatcacgccccagggcacgcgcgacgaaatttcattggattcagccaaaaaagctgcttgtgaattttctgaaacggacgtgacaaacaccgaacaccatcaaccctccaacaatgatctgaacactaccgaaaagagggccgctgagagacaccccgagaaatatcaaggatcctccgtgtctaaccttcacgtagagccgtgtgggactaacacccacgccagctcgctgcaacatgaaaacagctccctgcttctcaccaaggaccgaatgaacgtagaaaaagcagagttttgcaataagtccaaacagccgggactggccagatcacagcataatcgctgggccggaagtaaagagacgtgtaacgatagaaggacaccaagcaccgagaagaaggtggatttgaatgccgatcctctatgtgagcgcaaggagtggaacaagcagaagttgccttgtagcgaaaaccctcgagacaccgaggacgtcccttggattaccctgaacagctctatccagaaggtgaacgagtggttctcccgatcagatgagctgctggggtcggacgattcacatgacggggagtctgagtccaacgccaaagtcgcggatgtgctcgatgtgcttaacgaagtcgacgagtattccggctcttcagaaaaaattgacctcctggccagcgatccccacgaggcactgatatgcaaaagtgagcgggtgcacagtaaatcagtagagtccaatattgaggacaaaatttttggtaagacctacagaaaaaaggcgtcacttccaaacctgagtcacgtgacggaaaaccttatcattggggcattcgtaaccgaaccccagatcatccaggagaggcccttgactaataagttgaagagaaaacgaaggcccacctctggactgcacccagaggacttcatcaagaaagcggacctggcagttcagaagaccccagaaatgataaatcagggaactaaccagacggaacaaaacgggcaggttatgaatatcactaacagtggtcatgagaacaagaccaagggagactccattcagaacgagaaaaatcccaaccccatcgagtcacttgagaaggagagtgcctttaaaaccaaggccgagcccataagctcatcaattagtaatatggaactcgaactcaacattcacaattctaaagcgccaaagaaaaaccggctccgccgaaagtcttctacccgtcatatacatgcgttagagctcgttgtcagcagaaacctttccccgcctaattgcacagaactccaaatcgacagctgcagcagcagcgaggagatcaagaagaaaaagtataatcaaatgccagttcgccactccagaaatctgcaactcatggagggcaaagaacctgccaccggggctaaaaaaagcaataagcctaatgagcagactagcaagcgccacgattcagacactttccctgaactgaagctgaccaatgctcctgggagtttcactaagtgctctaacacctccgagctgaaagagttcgtgaatccttccctcccaagggaggagaaggaggaaaaattggagactgttaaagtgagcaataacgccgaggacccaaaggatctgatgctttcaggagagcgggtgcttcagacagagaggagtgtggaaagctccagcattagcttggtacccggtacagactatggcacccaggagtctattagcctgcttgaagtctccactttgggaaaagccaagaccgagccgaacaagtgcgtgagccagtgcgcagcatttgagaatcccaagggcctcatccacgggtgttcaaaggacaaccgaaatgacaccgaggggttcaagtatcctctgggacacgaggtgaaccactccagggagacaagcatcgaaatggaggagtctgaactggatgcccagtacctgcaaaacaccttcaaagttagcaagcgacaaagctttgcacccttcagcaatcctggaaacgccgaagaggagtgcgctaccttttcagcccattctggctctttgaaaaaacaatctccaaaggtgacatttgagtgcgaacagaaggaagagaaccaggggaagaacgaatccaacatcaagcccgtccagacggtaaacataactgcgggattccctgtggtggggcagaaggacaaacccgttgacaacgccaaatgtagtataaaaggagggagtagattttgcctctccagtcagttccggggaaacgaaactggactcatcactccaaataaacatgggctcttgcagaacccataccgtatccctccgctctttccaatcaagagtttcgtgaagaccaaatgcaaaaaaaaccttctagaagaaaacttcgaagagcactccatgtcaccagagcgcgaaatggggaacgagaacataccttccactgtgagtaccataagtagaaataatattagagagaacgtttttaaggaagcctcttcttctaacattaatgaggtggggagttctactaatgaggtggggagttccattaacgagattggttcctccgacgagaacattcaggcggaactgggtagaaacagaggccctaaacttaacgccatgctgaggttgggggtccttcaacccgaagtgtataaacagtctctgccaggatcaaactgtaagcatcctgagatcaaaaaacaagaatatgaggaagtagttcaaacagtcaacacggacttttccccctacctgatttccgacaacctggagcaaccaatgggtagttctcatgccagtcaggtctgttcagagacacctgacgacctcctcgacgacggggaaatcaaggaagacacttcttttgctgagaacgatatcaaggaatcatccgcggtattttccaaaagtgtacaaaagggggaactgagccgttctccatctcctttcactcacactcacctggcccaggggtatagacgaggggcaaaaaagctggagtcgtcagaggaaaacctctcctcggaagacgaggaactgccatgtttccaacacttactcttcggcaaagtgaacaatataccaagtcaaagtaccaggcacagcacggtggccactgaatgtctgagcaaaaatactgaggagaatctgctctctctgaagaacagtttaaacgattgttccaatcaggtcatcctagccaaggcttcgcaggagcaccacttgtcagaggagaccaaatgctccgcgtctctgttttctagccagtgctccgaactggaggatctgaccgctaataccaacacccaggaccctttcctcatcggtagctccaagcagatgagacaccaaagtgagagccaaggggttggactgtctgataaagagttggtgtccgatgacgaggaaaggggtacagggctggaggagaacaatcaggaagagcaatccatggacagcaatttaggggaggctgcgagcgggtgtgaaagcgagaccagcgtctctgaggattgtagcgggttgtcatcacaaagtgacattctgactactcagcagcgcgatacgatgcagcacaatctgatcaaactgcaacaggaaatggccgagctcgaagccgtgcttgagcaacacggaagccagccatctaatagctatcctagcattatctccgatagtagcgcactcgaagacctgcgaaatcctgaacagtcaacaagtgagaaggccgtccttacatcccagaagtcgagcgagtatcccatttcccagaaccctgaaggtctgtctgcagacaagttcgaggtctccgctgactcttcaactagcaagaacaaagaacccggagtcgagaggagttccccgagtaagtgcccctctctggacgaccgctggtacatgcacagttgttcgggaagcttgcagaaccgcaactacccttcccaggaggagctgatcaaagtcgtcgacgtggaagagcagcaactggaggagagcggtccacacgatctcactgaaacgagttatctacccagacaggatttagaaggaactccttatcttgaatcaggcataagcctcttctccgacgatccggaatccgatcccagtgaagatcgtgcacctgaatctgcacgggtaggaaacatccccagcagcacctcggcgctcaaggtgccccagcttaaggtcgcggagtctgctcagtctcccgctgcagcccacaccacggataccgccggatacaacgccatggaggaatctgtgtcaagggagaaaccagagctaaccgcttctaccgagagggtgaataaacgcatgtctatggtcgtaagcggactgacacccgaggagttcatgctcgtgtataaatttgcacggaaacaccacattaccctgactaatcttatcacggaggaaacaacccacgtggttatgaaaaccgatgccgaatttgtgtgcgaacggaccctaaagtatttcttggggattgctggagggaaatgggtcgtgagctatttttgggtcacacagtctatcaaggagcgcaaaatgctgaacgagcacgactttgaagtccgcggtgatgtggtcaatggcagaaatcaccagggcccaaaaagggcccgtgagtctcaggaccgcaagatcttcagaggcctcgaaatctgctgttacggaccttttacgaacatgcccaccgatcagctcgaatggatggtgcagctgtgcggcgctagcgtggtcaaggagctgtcctcctttacactcggcaccggtgtacatccaatcgtggtggtgcagcctgatgcctggacagaagacaatggtttccacgcaatcggccaaatgtgtgaggctccagtggtgaccagggaatgggtcttggatagtgttgctctctaccagtgtcaggagctagatacctacctgattccacagatccctcatagccactacta

SEQ ID NO: 27573 - DNA, 2139 bp, synthetic construct
  misc_feature 1..2139: note = Description of Artificial Sequence: Synthetic coding sequence
  source 1..2139: mol_type = other DNA
atgttaaaacttctgaaccagaaaaagggcccttcacagtgtccactgtgcaagaacgatataacaaagagatcattgcaggaatctactaggttttctcaactcgttgaagagctcctcaagatcatctgcgcgttccaattggatacgggcctggaatacgccaactcatacaatttcgcaaagaaggagaataacagtcccgagcatctcaaagatgaggtgtcaataatccagtccatgggatacaggaacagagccaagcgcctgctgcagagcgagccagagaatccgtcactgcaagagacgagcctgagcgttcagctttccaacttgggcactgtgcggaccctgaggacaaaacagagaatccaaccccaaaagaccagcgtgtacattgagcttggcagcgattcctctgaagatactgttaataaggctacgtattgctctgtaggcgaccaggaactcctgcagatcacaccacagggcacacgtgacgagatatccctggactcggctaagaaagccgcatgcgagttttcggagacggatgtcactaatacagagcatcatcagccatctaataatgatctgaataccacagaaaaaagagctgccgagcgccacccagagaaatatcaaggggaggctgccagtggatgcgagagcgagactagtgtctctgaggactgctccggtctcagctcacagtcagatatcctaacgactcagcagcgggatactatgcagcataatttaatcaagctccagcaagagatggctgagttggaggcggtattagagcagcatggatcccaacccagtaatagctatccatcaatcatttcagatagcagtgctttggaggatctcagaaaccccgaacagtccaccagtgaaaaagtcctgacctcacagaaatccagcgagtaccccatcagtcagaacccagaaggattgtccgcagataagttcgaggtttcagccgatagcagtactagtaagaataaagagccgggtgtcgaacggtcatctccgtctaaatgcccatcattggatgaccggtggtacatgcactcgtgctcaggcagcctgcagaacagaaattacccgtcccaggaggaattgatcaaagtggtcgatgtggaagagcagcagctggaggagagtgggcctcacgatttaacggagacaagttatttacccaggcaagacctagaaggcacaccatatctggaaagcgggatctcgctgttcagcgacgacccagaaagcgacccaagtgaggaccgggctcccgaatccgctagagtgggaaacataccaagctccaccagcgctctgaaagtgccccaactgaaagtcgccgaatccgcgcagtcccctgctgccgctcacactaccgatacggccggatacaacgctatggaggagtctgtgagcagagagaagccagagctgaccgctagtacagaaagagtgaataaacgcatgtcaatggtggtatcaggcctcacccccgaggaatttatgttagtttacaaatttgctagaaaacatcacattacactcactaacctaataaccgaggagacaacccacgtggtcatgaaaacagacgccgaattcgtctgcgagcgcaccttgaagtactttctgggcatcgcgggaggcaaatgggtcgtgtcttacttttgggtgacacagtctattaaggaaagaaagatgctgaatgagcatgattttgaggtgaggggggacgtcgtaaatggcaggaaccaccagggacccaagagagcacgcgaaagccaggatcgaaagatattcaggggcctcgagatatgttgctatggccctttcacaaacatgcctaccgaccagctggagtggatggtgcaactgtgtggcgcttctgttgtcaaggagctgtcctcctttacgctgggcaccggcgtgcacccaatagtggtcgtgcagcccgacgcatggaccgaagacaacggcttccacgcgatcggtcaaatgtgcgaggcaccagtcgtaacacgagaatgggtgttagacagtgtggctctctatcaatgtcaggagttggatacatacttaataccacagattccacatagtcactactag

SEQ ID NO: 27574 - DNA, 5654 bp, synthetic construct
  misc_feature 1..5654: note = Description of Artificial Sequence: Synthetic coding sequence
  source 1..5654: mol_type = other DNA
atggacctttctgcactgagggtggaggaggtgcaaaacgtgattaatgcaatgcagaaaattttggagtgcccgatttgtttagagttgatcaaggagccagttagtacaaaatgcgatcacattttctgcaagttctgcatgttgaaacttctcaaccagaagaaaggacctagccagtgtccattgtgcaagaacgacatcaccaaacgctcattgcaagaaagcaccaggttttcacaattggtggaagagctgctgaagattatctgcgccttccagctcgatacgggtttagaatacgcaaattcctataatttcgccaagaaggagaataacagtcctgagcatttgaaggatgaggtgtccatcatccagagcatgggctaccggaatcgtgctaaaagattattacaaagtgagccagagaacccttctctgcaggagactagtttaagcgtacagcttagcaatttgggcacagtgcgcacactgaggactaaacagagaatccagccccagaaaacttcggtttatatcgaactgggctctgactcgtccgaggacacagtgaataaagcaacttattgtagcgtgggtgaccaggaactcctgcaaatcaccccacagggaacccgagatgagattagcctggactcagcaaaaaaagcggcatgcgaatttagcgaaacggatgttacaaacactgagcaccatcagccatccaataacgacttgaacaccaccgaaaagagggcggctgaacgccatcccgagaaataccaaggctcttcagtgagcaacttacatgtcgagccctgtgggactaacactcatgcctctagtctgcagcatgagaactcgagcctgctgcttaccaaagaccgcatgaatgtggaaaaagccgagttttgcaacaaaagcaagcagcccggtctggcccgatctcagcacaatagatgggcgggatctaaggagacatgcaatgataggagaactccatctactgagaaaaaggtggatctgaacgccgatcccttgtgtgagcgaaaagaatggaacaaacagaagctcccatgttctgagaatccccgtgatacggaggacgttccatggattaccctaaattcgtcaatccagaaggtgaacgagtggttcagtcgatctgatgaactgctggggtccgacgatagccacgatggcgaaagcgaaagcaatgctaaagtcgccgatgtgctggatgtgctgaacgaggtggacgagtactctggctcctctgagaagatcgacctactggcctctgaccctcacgaggctctgatctgtaagtcggagcgggtgcattccaagtctgtcgaatcgaacatcgaggacaaaattttcggcaaaacttaccggaagaaggctagtctgcccaacctcagtcacgttacagagaatctcatcattggtgcctttgtgacagagccccagattatccaggaacgcccattgacaaataagcttaagcgaaaacggaggccaacttctggactgcatccggaagacttcatcaagaaagccgatctggccgtccagaagacacctgagatgatcaaccagggaactaaccagacagaacagaacggccaggtaatgaacatcaccaacagtgggcatgagaacaagacgaaaggggactccatacagaatgaaaaaaaccccaatccaattgagagccttgaaaaggaatctgcgtttaagaccaaagcagagcctatcagctccagtatcagcaacatggaattggaactgaacattcacaattctaaagctccgaaaaaaaacaggctccggaggaagtcgagcactagacacatccacgcactcgaactggttgtgtctcggaacttgagcccccctaactgtactgagctgcagatcgactcttgttccagctccgaagagatcaaaaaaaagaagtacaatcagatgccagtgcggcattcaaggaacctgcaactcatggaaggcaaggaaccagccactggggcaaagaagagcaacaagcccaatgagcaaacgtccaagcggcatgacagcgatacgtttcctgaacttaagctcactaacgcaccgggttcctttaccaagtgctccaacacatccgagctgaaagagtttgtgaatccttcgctgccgagggaagagaaagaagaaaagttagagaccgttaaggtgtcgaataatgccgaagacccgaaagacctgatgctgtcaggtgagagagtcttacagactgagaggtccgtggagtcttcttcaatttcactggtacctggcacagattatggaacacaggaatcaataagcctcctcgaggtctctaccttgggcaaggcgaaaacagagcccaacaaatgtgtctcccagtgtgcagccttcgagaatcctaagggtctcatccatggctgcagcaaggataatagaaacgatacggagggcttcaagtaccctcttggacacgaagtgaatcattctagggaaacgtctatcgagatggaggaatccgaactagatgcccaatatctgcagaacaccttcaaagttagtaaacgccagagctttgccccttttagtaaccccggaaacgccgaggaggagtgcgccacattcagcgctcattccggatcactgaagaagcagtcacctaaagtgactttcgagtgtgagcagaaggaagaaaaccaaggcaagaatgagagtaacatcaagccagtgcagactgtgaacattaccgccggattccctgtggtgggacaaaaggacaaacctgtcgataatgcaaagtgttcgatcaaggggggatccaggttttgtctgtcctcgcagttccgcggaaacgaaactgggctgattactcccaacaaacacggtctgttacaaaatccttacaggattccaccactctttcctatcaaaagtttcgtgaagaccaaatgcaaaaagaatcttcttgaggagaatttcgaggaacattcaatgtcaccagaacgcgaaatggggaatgaaaacatcccttcaacagtatctaccatcagcaggaacaacatccgtgagaatgtctttaaggaggctagctccagtaacatcaacgaagtaggttcatcaacaaatgaggtcggaagcagtatcaatgaaattggatcctcagacgaaaatattcaggccgagctcgggagaaatcggggaccaaaactaaacgctatgctgcgactgggtgtgctgcagcccgaagtatataaacagtcacttcccggttccaattgcaagcatcctgaaatcaagaaacaagagtatgaagaagtggttcaaacggttaatacagatttttcaccatacttgatcagtgacaacctcgaacagcccatgggcagctcacacgctagccaggtgtgttccgagaccccagacgatctgctcgacgatggggagattaaggaggacacatcctttgcggagaatgacatcaaagagagctcagccgtttttagcaaatccgtacaaaaaggtgagctaagtaggtccccgtctccctttacccacacccatctcgcgcagggctaccggaggggggctaaaaagctggagagtagcgaggagaacttaagctccgaggatgaagagcttccgtgcttccagcacctcctgttcggcaaggtgaacaacattcccagtcagagcactaggcactccacagtggccactgaatgtctgtctaagaatactgaggaaaatcttttaagcctcaaaaactccctgaacgactgtagcaatcaagttattctagcaaaagcatcgcaggagcaccatctcagtgaagaaaccaagtgctccgcgtccctattttcttcgcagtgttcagaactggaagatctaacagccaatactaacacacaggacccatttctgattggttcctcgaagcagatgcggcaccagtcagaaagccagggagtaggactgagcgataaggagctggtttccgacgatgaagagagagggaccggtctcgaagagaataaccaggaggagcagtcaatggattcaaatctcggagaggctgcttccggctgtgagagtgagacgtcggtctccgaggattgttccggcctgagtagtcaatctgacatcctcacaactcagcagcgcgatactatgcagcacaaccttattaagctccagcaagagatggccgagctggaagccgttctcgagcagcatggctcccaaccctctaactcatacccttccatcatctctgactcttcagccctcgaggatctgagaaacccggagcagagtacttctgagaaagacagccacatccatggccaacgaaacaattcaatgttttccaaaaggcctagggagcacatttctgtgctgacttcacagaagtcctcggaatatccgatcagccagaatcccgaagggctgtccgccgataaattcgaggtgtctgccgactcatccactagcaaaaacaaggagccaggggtggagcggtcatctccaagcaaatgcccgtccttagatgataggtggtacatgcattcctgctcaggcagcttgcaaaatcgcaactacccctcccaggaggagctgattaaggtcgttgatgttgaagagcaacaactagaagagagcgggcctcatgacctcactgagacctcctacctgcccagacaggatctcgaaggcacaccatacttggagtccggaatcagcctgttcagcgatgatcccgagtctgaccccagcgaggatcgcgcacccgaatctgccagggtcggtaatatcccaagtagcactagtgctcttaaagtgccacaattgaaggttgccgagtcagctcagtctccggctgccgctcatactactgacactgctggctacaacgccatggaagaatcagtgagcagggagaaaccagagctgaccgctagtacggagagggtgaacaaacgaatgtccatggtcgtttcaggcctcactcctgaggagtttatgctggtgtacaagttcgctagaaagcaccacattacgcttaccaacctcattacagaggagacaacacacgtggtgatgaagaccgatgccgagtttgtgtgcgaaaggacactgaagtatttcctgggaatcgcaggcggtaaatgggttgtgagctacttctgggtgactcagtccatcaaagagaggaaaatgctgaatgagcatgacttcgaagtgaggggggatgtggtcaatggaagaaaccatcaagggccaaagcgagctcgagagagtcaggaccgaaagatattcagaggattggagatctgctgttacggcccttttacaaacatgcctaccgatcagttagaatggatggtgcagctgtgcggggctagtgtcgtaaaggaattatcttcctttactcttggaaccggagtccacccgatagtggtcgtgcagcccgatgcctggactgaggacaacggatttcacgccataggtcagatgtgtgaagctcccgtagtcaccagggagtgggtcctggactctgtagcattgtaccaatgtcaagagctggatacctacctgatccctcaaattccacactcccactacta

SEQ ID NO: 27575 - DNA, 192 bp, synthetic construct
  misc_feature 1..192: note = Description of Artificial Sequence: Synthetic coding sequence
  source 1..192: mol_type = other DNA
atggacctctccgccctgcgggtggaggaggttcagaatgtgatcaatgccatgcagaagattctcgaatgtcccatctgcctcgagctcattaaggagccggtgagcacaaaatgcgatcatatcttctgtaagttttgcatgctgaagctcctcaaccagaagaaggggcctagtcagtgccccctgtag

SEQ ID NO: 27576 - DNA, 192 bp, synthetic construct
  misc_feature 1..192: note = Description of Artificial Sequence: Synthetic coding sequence
  source 1..192: mol_type = other DNA
atggacttatccgcattacgggtcgaagaagtgcagaacgtgataaacgctatgcaaaagatcctcgaatgtccgatctgtctggaattgatcaaagaaccggtgtcgacgaaatgcgaccacattttctgcaaattttgcatgcttaaactattgaaccagaagaagggccctagtcagtgtccgctctag

SEQ ID NO: 27577 - DNA, 2100 bp, synthetic construct
  misc_feature 1..2100: note = Description of Artificial Sequence: Synthetic coding sequence
  source 1..2100: mol_type = other DNA
atggacctatcagccttacgggttgaggaggtgcagaacgttatcaacgccatgcagaagatactggagtgcccaatctgcctcgagctgatcaaagagccagtttccaccaaatgcgaccacattttctgcaagttctgcatgcttaaactgttgaaccagaagaagggtccctcccaatgtcccttatgtaagaatgatataacaaagcgctcactccaggaatccacgcgttttagccagctcgtcgaggaactccttaagatcatttgcgcctttcagttggacacaggccttgaatacgccaattcctataacttcgcaaaaaaggaaaataacagccctgagcatttgaaagatgaggtctccatcatccagtcgatgggctatagaaatagggctaagaggttactgcagtctgagccagagaacccgtctctgcaagagacgtccctgagcgttcagttatcaaacctgggcacagtgagaaccctgcgcaccaagcagagaatacagcctcagaaaacttcagtgtatatcgaacttggttctgacagctcggaggacacagtgaacaaggcaacctactgctcagtgggggaccaggagctgctgcagatcacccctcaggggacaagagatgagatttccttggattccgctaagaaagcagcctgcgaatttagcgagaccgatgttaccaacaccgagcaccaccagccctccaataacgatctcaatacaactgagaagcgggcagccgaaaggcatcccgagaaataccagggggaagcagcttccggctgtgagagtgaaacgagcgttagtgaagattgtagcggcttgtcctcacaatctgatatactcaccacacagcagcgtgacacaatgcaacataaccttattaaactgcagcaagagatggccgaactggaagcggttttagagcagcacggtagccagccatcaaattcttacccttccatcatctcggacagtagcgcgcttgaagatctacgcaaccctgagcagtcgaccagcgagaaggtcctcacgtcccaaaagtcctcagagtatcccatttcccaaaaccccgaaggactgagcgcggacaagtttgaggtgtccgccgacagctcaaccagcaagaacaaagagccaggagtggagcgctcctcaccctctaaatgtccatccctagatgatcgatggtatatgcactcatgttccggcagcttacaaaaccggaattaccctagtcaggaggaacttataaaagtggtagacgtagaggaacaacagcttgaagaatccgggcctcacgacctaactgagacatcctacctgccaaggcaagacctggaaggcacaccatacttagagtctggcatctcactattcagcgatgatcccgagagcgacccgtctgaggaccgggctccagagtccgccagagtgggcaacatcccttcctccacgagtgcgctgaaggtcccacaattgaaagtagcagaaagcgcacagagccccgcagctgctcacactaccgatacagcgggttataatgccatggaagagtctgtgagcagagaaaagcctgagcttactgccagtactgagagggtgaataagcggatgtctatggtggtttctggtctgacaccagaagaattcatgttggtgtataaattcgcgagaaaacatcacatcaccctcaccaacctgattacagaagagactacccacgtggtgatgaaaacagacgcggaatttgtttgtgaacggactcttaagtactttctcggcattgcagggggtaaatgggtggtttcctatttttgggtgacccagagtattaaagaaaggaagatgctgaacgagcacgactttgaggtgcgcggagacgtagtgaatggtcggaaccaccaggggcctaaaagagcccgagagtcccaggatagaaagatctttcgaggcctcgagatctgttgctacggcccattcactaacatgcctaccggctgtccaccaaattgtggctgtgccgcacgatgtctggatcgaggccaatggctgccgtgcaactgggcggacgtctag

SEQ ID NO: 27578 - DNA, 1950 bp, synthetic construct
  misc_feature 1..1950: note = Description of Artificial Sequence: Synthetic coding sequence
  source 1..1950: mol_type = other DNA
atggatctcagcgccctgcgtgtggaggaggttcagaacgtcataaatgcgatgcagaaaatccttgaatgccccatttgtctggaactaattaaagaaccagtgagcacaaagtgcgatcacatcttttgtaaattttgcatgctgaagctgcttaatcagaaaaaaggcccatcacagtgcccgctctgcaaaaacgatattaccaagaggtcgctccaggagtcaacacgcttctctcagttggtggaggaactactgaagattatctgtgcatttcagcttgataccgggctggagtacgcaaactcttataactttgctaagaaggagaataactccccagagcatctgaaagacgaagtgagtatcattcagtccatgggataccgcaatagagcaaaacggctgctgcagtctgagcctgaaaacccaagtttacaggagacatccctcagtgtgcaactgagtaacttggggacagtacgcactcttcggactaagcagcgcatccaaccccagaaaaccagcgtctatatagagctcggatccgatagctcggaggataccgtgaacaaggccacatattgcagtgtaggcgatcaggaactcttgcagattacaccccagggtactagggacgaaatctctttggattctgctaaaaaggccgcttgcgagtttagcgagaccgatgtgaccaacacggaacaccatcagcctagcaataatgatttaaacaccacggagaagagagcggctgaacggcacccggaaaaataccaagggagctcagtatccaatttgcatgtcgagccttgtggaactaacacgcatgcgagttcactgcagcatgaaaacagtagtttgctgctgactaaagacagaatgaatgtagaaaaggccgagttttgtaacaagagcaaacagcctggtctggccagaagtcaacacaataggtgggctggatcaaaagagacgtgcaacgatagaaggacccccagtactgagaaaaaggtcgacctgaacgccgacccactttgcgagagaaaggaatggaacaagcaaaaactcccctgtagcgaaaacccgcgtgacactgaagatgtcccctggattaccctgaactcttcgatacagaaggtcaacgagtggttttccaggtccgacgaacttctcgggtccgatgattcccacgacggagagtcagaatccaatgcaaaggtggccgatgtcctggatgtacttaacgaagtggatgagtactcaggtagtagtgagaaaatcgatctattggccagtgacccccacgaagccctgatttgtaaatcagagcgggtacactccaagagcgtggaatcaaatatagaagacaagatttttgggaagacctatcggaagaaagcctctctacccaacctttcgcatgtaacagaaaatctgatcattggcgcattcgtgactgaaccccagattattcaggaacgacccttgactaacaagctaaagcggaaaaggcgacccacatccgggctgcacccagaagatttcataaagaaggccgacctcgcagtgcagaaaacgcccgagatgattaatcagggtaccaaccagacagaacagaacggccaagttatgaatatcactaactcaggtcacgaaaataagactaaaggcgatagcatccaaaatgaaaagaatccaaatcccattgagagcctggagaaggagagtgctttcaagactaaagcagagcctatctcatcatctattagtaacatggagctcgagctgaacatccacaattcaaaggctcctaagaagaaccgactgcggagaaaatcttctacgcgccacatccacgcccttgagcttgtggtaagcagaaacttgtccccaccaaattgtaccgaattgcagatcgactcctgttcttccagcgaagaatag

SEQ ID NO: 27579 - DNA, 5657 bp, synthetic construct
  misc_feature 1..5657: note = Description of Artificial Sequence: Synthetic coding sequence
  source 1..5657: mol_type = other DNA
atggacctgtccgcgctaagggtggaagaagtccaaaatgtaatcaacgcaatgcaaaagattcttgaatgtcccatctgtttggaacttattaaggaacccgtatcaaccaagtgcgaccacatcttctgtaagttctgcatgctcaagctcctcaatcagaagaaaggcccatctcaatgtccactgtgtaagaacgatatcactaaaagaagtctgcaagagagcacccgcttctcccaactcgtcgaggagctgctcaaaattatttgcgcgtttcaattagatacaggcttggagtacgctaactcatacaatttcgccaaaaaagaaaataacagtcccgaacacttgaaagacgaagtttctattattcagagtatggggtaccggaatcgggcaaagcgcctgttacagtctgagcccgaaaacccttctctgcaggagacgagcctgtcagtccagctatcgaatcttggtacagtcaggaccctgcggacaaagcagcgtatccagccacagaagacctctgtctacattgaactcggttctgactccagtgaggacaccgttaacaaggcgacatattgtagtgtgggcgatcaggagctcctgcagatcaccccacagggaacaagggatgagataagtcttgatagtgcaaagaaggcggcatgcgaattttccgagacagacgtcactaatactgagcaccaccagccgagcaataacgatctgaatacgactgagaagagggccgcagagagacaccccgagaaatatcaggggtcttctgtaagcaacctgcacgtcgaaccctgcggtaccaacacgcacgcaagcagtctgcaacacgagaattcttccctcctattgacaaaagataggatgaatgtagagaaggccgagttctgcaataaaagtaagcagccagggttagcacgatcacagcataataggtgggcagggagtaaagagacttgcaatgacagacgaactccatctaccgaaaagaaggtggacctgaatgccgatccattgtgcgagcgcaaggagtggaacaaacagaagttgccctgcagcgaaaaccctagggacacagaagatgtaccctggattacactcaatagctctattcagaaagtgaacgagtggttctctagaagcgacgagctgctgggctcagacgacagtcatgatggtgagtctgaatcgaacgccaaagttgccgacgtattggatgttctgaatgaagttgacgagtattccggttcttctgagaaaatcgatctgctggcaagcgatccgcacgaggccctgatttgtaagtccgaacgagtccactcaaaaagcgtggagtcgaatatagaggacaaaatctttgggaagacatatagaaaaaaagccagcctgcctaatctgtcacacgtaacagaaaacctgatcatcggtgcttttgttacggaaccccagattatacaggaacggccactgactaacaagctgaaacggaaaagaaggcctacttcgggtttgcaccccgaggacttcattaagaaagccgatctggctgtgcaaaagacgccagagatgattaaccagggaaccaaccagacagagcagaatggccaggtgatgaatatcactaattcgggacatgaaaacaaaacaaaaggcgattctatccaaaatgaaaaaaaccccaaccctatcgaatcattggagaaggagagcgcattcaagaccaaggctgaaccaattagttcatctatctccaatatggagttggagctcaacattcataatagcaaggcacctaagaaaaacaggctcaggagaaaaagtagtacccgccatattcacgcactagagttggtcgtgagccgaaacctatctcccccaaactgtaccgaactgcaaatcgattcctgctcctcctcagaagagatcaaaaagaagaaatataatcaaatgccagtccgacacagtcgcaacctccagctgatggaaggcaaggagcctgctacaggcgcaaaaaagtctaacaagcccaacgagcagacgtcaaaaagacacgactctgatacatttcctgagctcaagctgaccaatgcacccggaagtttcactaaatgttccaatacatctgagctgaaagagttcgtgaacccgtcccttcccagagaagagaaagaagagaaacttgaaactgttaaagtttccaataacgctgaggacccaaaggatctcatgctatccggggaaagggtgctgcaaaccgaaagaagtgtggaaagttcatccatctctctcgtcccagggactgactatggcacacaggaaagcattagcctgttagaggtgtccacacttggcaaggccaagaccgaacctaacaagtgcgttagccagtgcgctgcattcgaaaatcccaaaggactcattcatggatgtagtaaggataatagaaatgacaccgagggtttcaagtacccactgggacacgaagtgaatcattccagagaaaccagcatagaaatggaggagtccgagctcgacgcccaatacttgcaaaacacgtttaaagtttctaaaagacagagctttgccccttttagcaatccgggtaatgcagaagaagaatgcgcaacatttagtgctcacagtggcagtctaaaaaaacagtctcccaaagtaacatttgagtgtgagcagaaggaagagaaccaggggaagaacgagagcaacattaagcccgtacaaacagtgaatattactgctggcttcccggtggtgggacaaaaagacaaaccagtcgataatgcgaagtgtagtatcaagggtgggtctcgtttttgcctgtccagtcaattccgaggtaatgaaaccggactgatcactcccaacaaacatgggttactgcagaatccctaccggatccctcctctgttccctatcaagagtttcgtgaaaacaaaatgcaagaaaaacctgctggaggagaacttcgaggaacactctatgtcacccgaacgggaaatgggcaacgaaaacatccctagtactgtatctaccatttctaggaacaatattagagagaatgtgttcaaggaggcgtcctcttccaatatcaatgaagtcggttcgtcaaccaatgaggtgggaagcagtattaatgagatcggctcctccgatgaaaacattcaggcagaactgggccgaaatagagggccaaaattgaacgccatgctccgattaggcgttctgcagcctgaggtttacaaacagagtctgccgggtagcaactgcaagcacccggagattaaaaaacaagaatacgaggaagtggtacagaccgtaaatacggatttctctccttatctcatctcagacaacctggagcagccaatgggttcatcccacgcctctcaggtgtgctctgaaacccccgatgacctgctggacgatggagagatcaaagaggacacaagcttcgcagagaacgatatcaaagagtcatccgcagtcttctcaaaatctgttcagaagggggaactgagtcgtagtccatcaccgtttacccacacccaccttgctcagggttacagaagaggagctaagaaattagaatccagtgaggagaacttatcttcagaggacgaggagctcccctgctttcagcatttgcttttcggcaaggtcaataacattccaagtcagagcacgcgtcacagtactgtagccaccgagtgcttatcaaaaaatacagaagagaacctgctgagtctgaaaaatagcctgaatgactgtagtaatcaggtgattctggcaaaagctagtcaggagcatcatttgagcgaagagaccaaatgttcagctagcttatttagtagccagtgtagcgaactggaagacctcaccgcgaatactaacacccaggatcctttccttatcgggtcttcaaagcagatgcgccaccaatccgaatctcagggggtaggacttagtgataaagaactagtgagtgatgatgaagagagaggaactggtctggaggagaacaatcaggaggagcaaagcatggactctaacctgggtgaggccgctagcggctgtgaatcggagaccagcgtgtcggaggactgctcagggctgagcagccagtcagacatacttacaacccaacaacgcgacactatgcaacataacttgataaaactgcagcaggaaatggcggagcttgaggccgtattggagcagcacgggtcacagccatctaacagctacccctctattatctcagatagttccgcactcgaggatttaaggaatcccgagcagtccacatcggaaaaggactcccatatccatggccagagaaacaattccatgttcagtaagcgcccacgtgaacatatctcggccgttctcaccagccagaaaagttccgaataccccatttcccagaatccggaaggtctgtcggctgataaatttgaggtctccgccgacagcagtacctcgaagaataaggaaccgggagtcgagcgctctagccctagtaaatgcccttcactggatgatcggtggtacatgcactcatgcagtggctccttgcagaacagaaactatcccagccaagaggagttaataaaagttgtagatgtcgaagaacagcagctggaggaaagtggtccacacgacctcaccgagaccagctacctaccacgtcaggacctcgagggaactccctaccttgaatcaggaatcagcctttttagcgacgatcctgagtccgacccttccgaagacagggcaccagagtcagctagggttggcaacattccatcatccacctctgcccttaaagtgccccaactgaaggtggccgagagcgcccagtcgcccgcagctgcccatacgaccgatacggcaggctacaatgccatggaagaatcggtaagcagagagaagcccgaattgaccgcctcgactgaacgcgtgaacaagcgtatgtccatggtggtttcaggtctgacaccagaggagtttatgctcgtgtacaaattcgcccgaaaacaccacattactttgacaaatctcattacagaggagaccacacacgtggtgatgaagaccgacgctgagtttgtctgtgaacgcactttgaaatatttcctgggaattgctggcggaaagtgggtggtaagctatttttgggttacccagtctataaaggaaagaaagatgctgaatgaacacgatttcgaagtcagaggagatgtggtcaacggaaggaatcaccagggacctaaacgagcccgagaaagtcaggacaggaaaatcttccgtggcctggagatatgttgctatggaccatttaccaatatgcccaccgaccaattggagtggatggtgcagctgtgtggcgcttcagttgtgaaggaactgtcttcattcaccctcggaacgggcgtgcatcctatagtcgtggttcagcctgacgcctggacggaggataacggctttcatgctattggtcaaatgtgcgaagccccagttgtgaccagagagtgggttctcgacagtgtggcgttgtaccagtgtcaggagttagacacctacctgatcccccagatccctcattctcattacta

SEQ ID NO: 27580 - DNA, 669 bp, synthetic construct
  misc_feature 1..669: note = Description of Artificial Sequence: Synthetic coding sequence
  source 1..669: mol_type = other DNA
atggacctgtccgctctacgcgtggaggaagtgcagaatgtgattaacgccatgcagaagatcctcgagtgtcctatttgcctggaactcattaaggagccagttagtacaaaatgtgatcacatattctgtaaattttgcatgctcaaactgctgaatcagaagaagggaccatcccagtgtcctctgtgcaaaaacgatatcacaaaacggtccttacaggagtccacaagatttagccagcttgtcgaggaactattaaagatcatttgtgcatttcagctggacacagggctggagtacgccaatagttacaactttgccaagaaagaaaataactccccagaacacctgaaggacgaggtttccattatccagtcaatggggtaccggaatagagccaagagactattgcagtcagaacccgaaaacccatcactggaaacttcactgagcgtgcagttgagcaacctcggtacggtgcgcacactccggacaaagcagcgcattcagcctcagaaaaccagcgtgtatattgaattaggatctgactcttccgaggacacggtcaataaggcgacctattgcagtgtgggggaccaggagctgctacagatcaccccccaggggaccagggacgaaatctccctggatagcgcgaagaagtag

SEQ ID NO: 27581 - DNA, 1869 bp, synthetic construct
  misc_feature 1..1869: note = Description of Artificial Sequence: Synthetic coding sequence
  source 1..1869: mol_type = other DNA
atggacctttccgctcttagagtcgaagaggtgcagaacgtaattaatgctatgcagaagattctcgaatgccctatatgccttgagctgatcaaggaaccggtttccaccaagtgtgatcacatcttttgtaaaagtttacaggaatccaccagattctcccagctggtggaggagctgctgaagatcatttgcgcatttcagctggatacggggctggagtacgctaattcctacaactttgccaaaaaagagaataattcacccgagcatctgaaagatgaggtgtccattattcagtcgatggggtacaggaaccgcgctaaacggttattacagagcgaacctgaaaaccccagtctgcaggagacctctctgagcgttcaactgagcaacctgggcaccgtccggacgctcagaactaaacagagaattcaaccccagaaaacatctgtgtacatcgaacttggaagtgatagctctgaggataccgtaaataaggctacttactgcagcgtgggcgaccaggagctgctgcagatcacccctcaggggacaagggatgagatatctctggactctgccaagaaggctgcatgcgagttttcagaaaccgacgtgacaaatactgaacatcatcagccctcaaacaacgacctgaatacgacagagaaacgcgcagcagaacgtcatcccgaaaaatatcaagggtctagcgtgtctaacctgcacgtggaaccctgcggcactaacacccacgcctccagtcttcagcacgaaaacagttcactgctgctcacaaaagatcgtatgaacgtggaaaaggcagaattctgcaacaagtccaaacagcccggtttggccaggagccagcataacaggtgggcgggtagcaaagagacttgtaatgacagaaggaccccatcaacggaaaaaaaggtggatctgaatgccgatcccctgtgcgagcgtaaagaatggaataaacagaagttgccttgctccgagaatccacgtgataccgaagatgtcccctggataacactgaatagcagcattcaaaaagtgaatgaatggttctctagaagcgacgagctgctcggctcagacgactcccacgatggagagtccgagtcaaacgctaaggtggcggacgttctagacgtgcttaacgaggtcgatgaatattcaggtagcagtgagaaaatcgacctcctggcatccgatcctcatgaagccctgatctgcaaaagtgagagggtccattcgaaatccgtggagtccaacatcgaggataagatttttggcaagacgtatcgtaaaaaagcatcccttccaaacctttcgcatgtcaccgagaatctgatcataggcgcattcgtgactgaacctcagatcattcaggaacggcctctcaccaacaagttgaagcggaagcgcaggccgacatctggattgcacccagaagatttcattaaaaaggccgatttggcggtgcagaagacccccgagatgatcaaccaaggtacaaaccagacagagcagaacggccaggtgatgaacatcactaacagcggccatgaaaataagacgaagggagatagtatccagaacgagaagaatccgaatcccatagagtccctcgaaaaggagtccgcctttaagacgaaggcagaaccaatctcgtcttctatcagtaatatggaactggagctgaacattcacaactctaaggccccaaagaagaaccggcttcgacgcaagtcctctacccggcatatacacgcgctggaactggtggtctcaaggaatcttagcccacccaactgcacggagctgcagattgacagttgttcatcctcagagtag

SEQ ID NO: 27582 - DNA, 1872 bp, synthetic construct
  misc_feature 1..1872: note = Description of Artificial Sequence: Synthetic coding sequence
  source 1..1872: mol_type = other DNA
atggatttgagtgccctccgagtcgaagaagttcaaaatgtcattaacgcgatgcagaagattctcgaatgtcccatttgtcttgaactgatcaaggagccagtgtctacgaagtgcgatcacatcttctgtaaattttgcatgctcaaactgcttaatcagaagaagggaccctcccagtgccctctttgcaagaacgacattaccaagcggtcactgcaggaaagtacaagatttagccagctcgttgaagaactcctgaagatcatatgcgctttccagttagatacagggctggagtacgccaactcctacaacttcgctaaaaaggaaaataatagccctgagcacctgaaagatgaggtgtcaatcatccaaagcatgggctatcggaatcgggctaagcgcctactccaatcagaaccagagaatccctctctagaaacctctctgtctgtccagttgtctaacttaggaacagtccggacgcttaggaccaagcagaggatacagcctcagaaaacatctgtgtatatcgaactgggaagcgatagcagtgaggacacagttaataaagctacatattgctcagtcggcgaccaggaactgctgcaaataaccccacaagggactcgcgacgagattagtctggatagtgcgaagaaagctgcgtgtgagtttagtgagacagacgtgaccaacactgaacaccatcagccatcgaacaatgacctaaacactacagagaaaagagccgcagaacggcaccccgaaaaataccagggcgaagctgcaagcgggtgtgagtcagaaacatctgtctctgaagactgtagcggactatcttcccagtcagatatcttgaccacacagcagcgagataccatgcagcacaatctgatcaaactgcagcaagagatggccgaattggaggcggtgctagagcagcacggtagtcagccatcaaactcgtacccatccataataagcgatagtagcgcactagaggacttacgtaatcctgaacagtccaccagcgaaaaggctgttcttacatcacaaaaatctagtgagtatcccattagtcagaatccagagggactcagcgcagacaagtttgaggtctcagccgactcctccacatcaaaaaacaaggagcctggcgtcgaacggagctccccttccaaatgtcccagtctggacgatagatggtacatgcacagttgttccggttcgctacagaatcggaattacccaagccaggaagagctcattaaggtcgtggatgtggaagagcaacagttagaggagtcaggaccccacgatctgaccgagacctcatacctacccaggcaggatttggaggggacaccataccttgaatctggcatcagcctgtttagcgacgaccccgagtccgatccctccgaagatagagccccagagtctgctcgcgttggaaatatcccgagtagtaccagcgcactgaaagtgccccagcttaaggtagccgagtcagcccaaagcccagctgccgcacacactacagatactgcaggatacaacgccatggaggaatctgtctctcgtgagaaaccagagcttacggcgagcaccgaacgagtgaacaaaagaatgtctatggtggtcagcggactcacgcccgaagagttcatgctggtctacaagtttgcacggaagcaccatatcacactgacaaacctaatcaccgaagagaccacccatgtcgtgatgaaaacggacgccgagtttgtgtgcgagcgcacactgaaatactttctgggaatcgccggagggaagtgggttgtttcttatttctgggtcacgcagagcattaaagagcggaaatag

SEQ ID NO: 27583 - DNA, 1497 bp, synthetic construct
  misc_feature 1..1497: note = Description of Artificial Sequence: Synthetic coding sequence
  source 1..1497: mol_type = other DNA
gagttacttaaaattatatgtgccttccagctggatacagggctggaatatgcaaattcatataacttcgcaaaaaaggaaaacaatagtccagaacacctgaaagatgaggtgtccatcattcagagtatgggataccgcaacagagccaaaaggttgctccagagcgaaccagagaatcccagtctggagacttcactttccgtgcagctatccaacttagggaccgttcggactttgagaactaagcaaaggattcagccacaaaaaacaagtgtctatattgaactggccgcatgtgagttcagtgaaactgacgtgacaaacacggaacatcatcaaccgtctaataacgatctgaatactactgaaaagagggctgcagagcggcacccggaaaaatatcagggggaagcggcatctggttgtgaatctgagacgagcgtgagtgaggattgctctggcttgagctcacagtcagacattctgactacgcagcagagggatactatgcaacacaatttaataaagcttcagcaagaaatggccgagcttgaagccgtgctggagcaacacggctcacagccctcaaattcatacccttctataattagtgatagcagtgcattggaggacctgcggaaccccgaacaaagcacgtctgaaaaagccgtgctcacgagccagaaaagcagcgagtaccctatatcccagaatccagaagggctctccgcagacaaatttgaagtgtcagcggatagcagcacaagcaaaaataaggaacccggagtagaaagaagctccccgtccaagtgcccgagtctcgacgaccggtggtacatgcacagctgctctggctcactccagaataggaactacccgagtcaagaggaactgattaaggttgtagacgttgaggagcagcagctggaggagtcggggccacacgaccttacggagacctcttatctccctagacaggacctggaggggacaccctacctggaatccgggatttccctgttcagtgacgatccagagtccgatccttccgaagatcgggctcccgagtcagcgcgagtcggaaacataccctctagtacgtcagcgctcaaagtgccccagttgaaagtggcggaatcggcccagtcacctgctgctgcgcatacaaccgacactgccggatacaacgcgatggaggagagtgtctcacgtgaaaagcctgaactcacggcctcaaccgaaagagtgaacaagcggatgtctatggtggtttccggactcacacctgaagagttcatgttggtgtacaagtttgctagaaagcaccacatcacacttaccaacctgattacagaggagactacccacgtcgtgatgaagacagacgcggagttcgtgtgcgaaaggactctgaagtactttctgggaattgccggagggaaatgggtggtgtcctacttttgggtcacccagagcatcaaggagcggaagtag

SEQ ID NO: 27584 - DNA, 297 bp, synthetic construct
  misc_feature 1..297: note = Description of Artificial Sequence: Synthetic coding sequence
  source 1..297: mol_type = other DNA
atggatctgtccgcactccgggtggaagaggtccaaaacgtgataaatgcaatgcagaagatattggaatgccccatctgcttggagttgatcaaagaacccgtgagtaccaagtgtgaccatattttttgcaaatcactgcaggagtcgaccaggttcagccagctggtggaagagttgcttaagatcatctgcgcctttcagctcgataccgggctagagtatgctaacagctataatttcgccaagaaagagaataactccccggaacatctgaaggatgaggtgagtatatag

SEQ ID NO: 27585 - DNA, 2280 bp, synthetic construct
  misc_feature 1..2280: note = Description of Artificial Sequence: Synthetic coding sequence
  source 1..2280: mol_type = other DNA
atggacctcagtgccctgagggtggaggaggtacaaaatgttataaatgcaatgcagaagatcctggaatgtccaatctgtctggaattgatcaaagagcccgtttcgactaaatgcgaccatattttttgcaagttttgcatgcttaaactactgaaccagaaaaaagggccatctcagtgccccctgtgtaagaatgatatcaccaaacgttctctacaggaatccacccgcttcagtcagttagtggaggagttgttaaaaataatctgcgcatttcagctggatacaggccttgagtatgccaatagttataacttcgccaagaaggaaaacaactctccggaacatctgaaagacgaagtgtcaattatacaatctatgggctatagaaatcgggctaaacgtttgctgcaatcggagcctgagaatccctccctccaggagacttccctgagcgtgcagctgagcaatctaggcactgtcagaaccctgcggacaaaacagcgaattcaacctcaaaaaacctcagtgtatattgaactggggagtgatagctctgaagataccgtcaataaggctacctactgttcggtaggtgatcaagaactgttacagattactcctcagggaacccgtgacgagatcagccttgactcagccaaaaaggccgcatgtgaattctccgaaaccgacgtgaccaacaccgaacatcatcagccgtcgaacaacgacctgaacacgactgaaaagagagccgcagagcgccaccctgagaagtaccagggcgaggccgcttccggctgtgagtctgaaacttctgttagtgaagattgctccgggctgtcctctcaatccgatatcctgaccacccaacaacgggacaccatgcagcataatctgattaaactgcaacaagaaatggcagaactggaagccgtgctagagcagcacggctcccagcccagcaactcttacccgtctatcatatctgattccagcgcactggaggatctaaggaaccccgagcaatccacctctgagaaggtgctaacgtcccagaagagctccgagtacccaatctcccagaaccctgagggtctgagtgcagataagtttgaggtcagcgcagactccagcacatctaagaataaagaacctggcgtggagcggagctcccccagtaagtgcccctctctggatgacagatggtatatgcattcgtgtagcgggtctttacagaaccgtaattacccatcacaggaggaactcataaaggttgttgacgtagaagaacagcagctggaagaatcaggaccccacgacctgaccgaaacatcatacctcccgcgacaagatttggagggcacaccctacctggagagcggcattagccttttcagcgacgaccctgagtctgacccttccgaagaccgggcacccgaatccgccagagtgggtaacataccatcttctacttctgccctgaaagtcccccagctgaaggtggccgaaagcgcccagtcccctgccgcagcacatacaaccgatactgctggatacaacgctatggaagaatctgtgagccgggagaaacccgaactgactgccagcaccgaacgagtcaacaaaaggatgagtatggtagtgagtggcctgacacctgaagagtttatgttggtgtacaaatttgccagaaaacaccacatcacgctgaccaatctaatcacagaggaaacgacacacgtagtcatgaaaacagatgcagaattcgtgtgtgaaaggaccttgaagtatttcctgggcatagcaggaggcaagtgggtggtgagttacttctgggttacccagtcaatcaaggaacgcaagatgttaaatgaacacgatttcgaggtgagaggagacgtagtcaacggacgtaatcatcagggcccaaagagagcccgagaaagccaggacaggaaaatcttccggggactggagatctgctgctatggcccatttaccaatatgcccacagaccagctcgagtggatggtgcagctctgtggagcgtcagtggttaaagagctttcctctttcactctgggcaccggcgtgcatcccattgtggtcgtacaacctgatgcatggacagaagataacggctttcacgcaataggacagatgtgcgaagcacccgtggtaactagagagtgggtcctggactcagtggccctataccagtgccaggagctggacacgtatctaattcctcagataccacattcacactactag

SEQ ID NO: 27586 - DNA, 180 bp, synthetic construct
  misc_feature 1..180: note = Description of Artificial Sequence: Synthetic coding sequence
  source 1..180: mol_type = other DNA
atggatctgtcagctctgcgagtcgaagaggttcaaaatgttataaacgcgatgcaaaaaattttagaatgccccatctgcctcgaactgatcaaagagccagtttcaacgaaatgcgatcatattttttgtaaagtgttactctgctgcccatcttggtccacagtggtcaggtcttag

SEQ ID NO: 27587 - DNA, 5450 bp, synthetic construct
  misc_feature 1..5450: note = Description of Artificial Sequence: Synthetic coding sequence
  source 1..5450: mol_type = other DNA
atgctgaagctgctgaaccagaagaagggaccatcacaatgcccgctctgtaaaaacgacatcaccaaacgttccctacaggaaagtacccggttctcgcaattggtcgaggagctgttgaagataatttgtgcatttcagctagacactggcctggaatatgcgaactcttacaatttcgcaaagaaggagaacaatagccccgaacacctgaaggacgaagtcagcatcatccagtccatggggtaccggaatagggcgaagcgcttgctccagtccgagcccgagaatccttcactgcaggagacaagcctgagtgtccagctgtcgaatcttggcacggtcagaacgctgcgtacaaaacagcgaatacagccccagaagacatctgtgtacattgaactgggctcagattcttctgaggatactgtgaacaaggctacgtactgttccgtgggagaccaggagttgctccagatcacgccacagggtacacgggacgaaatcagcctggattcagccaagaaggcggcatgtgagtttagtgagaccgatgtcacaaacactgagcatcatcagccctcaaataacgacctgaataccaccgagaaaagggctgccgaaaggcaccccgagaagtaccagggctctagcgtcagtaacctccacgtggagccatgtggcaccaatacccatgctagctctctccagcatgaaaacagcagcctgcttttaaccaaagatcgcatgaacgtggagaaggccgagttttgtaacaagagcaagcaaccgggacttgctcggtcccagcacaaccgttgggcgggatctaaggagacctgcaatgatcgcagaacccccagcacggaaaaaaaggtggacctcaatgctgatccactgtgcgagcgcaaagagtggaataagcaaaagctgccctgttcggagaatcccagggatacagaagatgtgccttggatcacgctgaattccagtatccaaaaggtcaatgagtggttttcccgctcagacgagctgctcgggagcgatgacagtcacgatggcgaaagcgagagcaacgccaaggtcgccgatgtactggacgttctgaatgaagtggacgagtatagcggaagctccgagaaaattgacctgttagcaagtgaccctcacgaagctctaatatgtaagagtgaacgcgtgcactctaaatctgtggagtccaatatcgaggataagatttttggaaaaacctaccgtaaaaaggccagtctgccaaatctctcccatgttactgagaatttgatcatcggtgccttcgtgacagagcctcagatcattcaggaacgaccccttaccaacaagcttaaacgcaagagaagaccgacaagtggactccaccctgaggatttcatcaagaaggccgatttagcagtgcagaagactcccgaaatgattaatcagggcacaaaccagactgagcagaacggacaggtgatgaacattaccaatagcggccacgagaataagaccaagggcgatagcatccaaaacgagaagaatccaaaccccattgagagtctagagaaagagagtgccttcaagaccaaggctgagccgataagttcatctatttctaatatggagcttgagctgaatatacataatagcaaagcaccaaaaaagaaccgcctcagacgcaaaagctctaccaggcacatccatgccctggagctggtcgtatcgcgcaacctgtcgccccctaattgtacggagctccaaattgatagctgtagcagctcagaggaaatcaaaaaaaaaaaatacaaccagatgccagtgaggcacagccgcaacttacagctgatggaggggaaggagcccgcaacaggcgctaagaagagcaacaagcctaatgaacagaccagcaagcggcacgatagtgacactttccctgagttgaagttgaccaacgccccaggcagctttaccaaatgttccaacacctcggagctgaaggagttcgtaaatccttccctgccaagagaagaaaaggaagaaaagcttgagaccgtgaaggtgtcgaacaacgctgaggaccccaaagatctgatgctgagcggcgaacgcgtgctccagaccgagcgctcagtggagagcagtagcatctctctcgtaccagggacagactatggaacccaggagtcaatttccctgctggaagtatctacattggggaaagcaaagacagagcccaataaatgcgtttcccagtgcgctgcatttgaaaatcccaagggccttatccatggctgttcaaaggataatcgtaatgacacagagggcttcaagtatcctctcggacacgaagtgaatcattcacgggagacgtcaatagaaatggaggagagcgagctcgatgcccagtatcttcaaaacactttcaaggtgtctaagaggcagtccttcgcgccattctctaatcctggtaacgcagaggaggagtgcgcaaccttttcagctcatagtggcagcctgaaaaagcagagtccaaaggtaacttttgaatgcgagcagaaagaggagaaccaaggcaagaacgagagtaatatcaagcccgttcagactgtgaatatcactgctggttttccagtggttgggcagaaagacaaaccagtggataacgcaaaatgtagcattaagggtgggtcccggttctgtttgtccagtcaatttcgcggaaatgagacgggcttgattacccctaataaacatggactgctgcagaatccgtatcgaatcccacccctttttcctattaagtcttttgtaaagacgaagtgcaagaaaaatcttctggaagaaaacttcgaggagcactctatgtcgcccgaacgcgaaatgggtaatgagaacattccgagcaccgttagcactatcagccgtaacaacattagagaaaacgtttttaaggaggcctcctcctccaacattaacgaagtagggtcaagcaccaacgaggtgggcagcagtatcaatgagattggctctagcgatgagaacatccaggccgagctggggagaaatcggggtcccaagctgaacgcgatgctgcggctcggggtgttacagccagaagtatataaacagtccttgccagggagtaattgtaaacatccggaaatcaaaaagcaggaatatgaagaggtggtgcagaccgtgaataccgactttagtccgtatctcataagcgataaccttgagcagcccatgggcagttctcacgcctcccaagtgtgctccgagacgcccgacgacctgctcgatgacggcgagattaaggaagatacttcttttgcagagaacgacattaaagaatctagcgctgttttctctaagtccgtgcaaaagggggagctctcccggtcaccttccccgttcactcatacccatctggcgcagggatacaggcggggtgccaagaagctggaaagtagtgaagaaaacctcagcagtgaagacgaagagctgccctgtttccagcacctgctcttcgggaaggttaataacattcccagtcagtccacaagacactccacggttgcaaccgagtgcttgtctaagaatacagaggagaacttgctgtcactgaagaattcgctaaatgattgtagtaaccaagtaatcttggcgaaggccagccaggaacaccatctttctgaagaaacaaagtgctctgctagcctgttttcgtcgcaatgttccgaactggaggacctgacagctaatacaaacacgcaggaccccttcctgattgggagcagtaagcaaatgcggcatcaaagcgagtcgcagggcgtggggctgtccgataaagagctcgtgtccgacgatgaggaacgcggaaccggcctggaggagaataaccaggaagaacagtctatggattcgaacttaggagaggccgcttctgggtgtgaatccgagacatctgtatccgaagactgtagcgggttgagctcccagagtgacattctcacaacccagcaacgcgacacaatgcagcacaatttgattaagctccaacaggagatggcagaactggaagctgtgttggaacaacacggatctcagccgtctaattcctacccttcgattatctccgattcaagtgctttggaagacctccggaatccagaacagagcacgagcgaaaaggcggtcctgacaagccagaagtcttcagagtatccaatttcgcagaatccagaagggctgtcggccgacaagtttgaggtgagcgccgattccagcacatccaagaacaaagagccaggggtggaacggtcgtcgccaagtaaatgtccaagtttggatgatcgatggtatatgcactcatgctctggaagtttgcagaataggaactatccatcacaagaggaacttattaaggttgtggacgtcgaagaacagcagctagaagagagcgggcctcacgacctgactgaaacttcctaccttcccaggcaggatctggaagggacaccgtatctagagtccgggatctccctgtttagcgacgacccagagtcagatccttccgaggaccgagccccagagagcgcacgtgtagggaacatcccaagcagcacctccgctctaaaggtacctcagctgaaggtagctgaatccgctcaatcccccgctgctgcgcataccactgataccgcaggttataacgctatggaggagagtgtgagtagagagaagcccgaactgaccgcgagcaccgagagggttaataaacgtatgtcaatggtggtaagtggtctgacgcctgaggaatttatgctggtgtacaagtttgcgagaaagcaccatatcaccctgaccaacctgattaccgaagaaaccacccatgtcgtcatgaagaccgacgctgagtttgtatgtgaaaggacccttaaatattttttgggtatagctggcggtaaatgggttgtgagctatttctgggtgacacagtctataaaggagcggaaaatgctgaacgaacacgatttcgaagtgaggggagatgtggtcaacggcaggaatcatcaaggccctaaacgggctagggaatcccaggatcggaagattttccgcggactggaaatttgttgctacggtcctttcacaaatatgcctacagatcaactggaatggatggttcagctgtgtggcgcttcagtcgtcaaggagctctcatctttcaccttggggactggcgttcatccaattgtggttgtccagcctgatgcatggaccgaggataatgggtttcacgccatcggtcaaatgtgtgaagcgccagtagtgacacgcgaatgggtgcttgactccgttgcactgtatcaatgtcaggagttggacacataccttattcctcagatcccccactcccactacta

SEQ ID NO: 27588 - DNA, 1719 bp, synthetic construct
  misc_feature 1..1719: note = Description of Artificial Sequence: Synthetic coding sequence
  source 1..1719: mol_type = other DNA
atgctcaagctcctgaatcagaagaagggtcctagtcagtgccccctttgcaagaatgacatcaccaaacgctccctccaggaatcgactcgatttagccagctggtggaggagcttctcaagatcatctgtgcatttcagcttgacacaggcttggaatatgccaattcctacaatttcgctaagaaagaaaacaacagtcctgagcatttaaaagacgaggtgtctatcatccaaagcatgggatatagaaaccgggcaaaacgcctgctgcagtctgagcctgaaaatccatctctgcaggaaacatcacttagcgtgcagctgtccaacctcgggactgtgcgcacccttcgcaccaaacaacgcatacagcctcagaagacgtctgtttatatcgaactgggaagcgattcatccgaggacaccgttaacaaggccacttactgctctgtcggagatcaggaactgcttcagataacccctcaaggcacgcgggatgaaatatcactagattcagcgaagaaagctgcatgcgaattcagcgagaccgatgtaaccaatactgaacaccatcagccgagtaacaacgatctgaatactacagagaagagggctgcagagcgccatccagagaaatatcagggggaagcagcgtccggttgtgagtccgagacttccgtatcagaagattgttccggcctttccagtcagagcgatatactgacgacacagcaacgcgataccatgcagcataaccttatcaaactccagcaggaaatggctgagctggaagctgttctggagcagcatgggagccagccctcaaacagctatccgagtattatctctgatagtagtgccctggaagacctacgaaacccggagcagtccacctctgaaaaagctgtgcttacctcccaaaagagtagtgagtatccgatttcccagaatccagaaggtctgagcgccgacaaattcgaggtcagcgcagatagcagcacttcaaagaataaggaaccaggggtcgagaggtccagcccaagcaagtgtccttcgctcgacgaccgatggtacatgcatagttgctcagggagtttgcagaatcggaattatcccagtcaggaggaactgattaaagtggtagatgttgaggagcaacagctggaggagtcaggccctcatgatctgacagaaacatcctacctccctagacaggatctagagggtactccatacctggagtccggtatcagtttgttttccgacgatcctgagagcgacccttccgaggatcgggctccagagagcgcccgtgttgggaatatcccaagctccactagcgcattgaaagtgccccaattgaaagtggctgaaagtgcccaaagccccgcagccgctcatactacggataccgccggatacaacgccatggaagaatcggttagtcgagagaagccagagctgaccgcttcaacggagcgggtcaataagcggatgagcatggtcgtctccggtctcacgcctgaagagtttatgctggtttataaattcgctagaaaacaccacatcacactgacaaaccttatcactgaagaaacaacccacgttgtcatgaagaccgatgcagagttcgtgtgtgagcggactttgaagtatttcctgggcattgctggaggtaagtgggttgtatcttacttctgggtgacccagagttag

SEQ ID NO: 27589 - DNA, 1422 bp, synthetic construct
  misc_feature 1..1422: note = Description of Artificial Sequence: Synthetic coding sequence
  source 1..1422: mol_type = other DNA
atggacctgtctgccctgcgagtagaggaggtgcagaatgtgattaatgccatgcagaagatccttgagtgccccatttgcttagaactgataaaagaacccgtgagtactaaatgcgaccacatcttttgcaaattttgtatgctgaagctcctgaatcagaaaaagggaccatctcaatgccccctttgcaagaacgacatcactaaacgttccctgcaggagagtaccagattttcacagctggtagaggagctgctgaagataatatgtgcttttcagctcgatacaggtctggaatacgctaacagctataatttcgctaagaaagagaacaattctcccgagcacctgaaagatgaggtaagcattatccagagtatgggttatagaaatagagcaaagaggctactgcagagtgaaccggaaaaccctagcctgcaagagactagcttgtccgtccagctgtccaatctggggactgtgagaactctgcggacaaaacagcgaatccagcctcagaaaacgagtgtctatatcgagctgggtagcgatagtagcgaggatacagttaataaagctacatattgttccgtgggcgatcaggagctgcttcagataaccccccagggtacacgtgatgagatttccttggatagcgccaaaaaagctgcctgcgaattcagcgagactgatgtgacaaatacggaacaccaccaaccgagcaacaatgatctgaacactacagagaaacgggctgcggaaagacatccagagaagtaccagggcagttccgtgtccaacctccatgttgaaccttgcgggacgaatacccacgccagcagcctgcagcatgagaacagctccctactcctcactaaagatcggatgaacgttgagaaggccgagttctgtaataaaagcaagcaacccggattagcccgaagtcagcacaacaggtgggcgggaagcaaggaaacttgcaacgatcggaggacaccttcaactgagaaaaaagtcgatctgaatgccgaccccttgtgcgagcgcaaggagtggaacaagcagaaactgccttgctcagagaacccccgtgacacggaagatgtgccttggattaccctgaatagctcaatccagaaggtgaacgaatggttcagccgctctgacgaactgctggggagcgatgactcacacgatggggaaagtgaaagcaatgcaaaagtggctgatgtactggatgtattgaatgaagttgacgagtatagcgggagttctgaaaagattgaccttctggcatcagatcctcacgaagctctaatctgcaaatccgagcgagtacattccaaatccgttgagtctaacatcgaggacaagattttcgggaagacctaccgcaaaaaggcttcccttcccaattag

SEQ ID NO: 27590 - DNA, 534 bp, synthetic construct
  misc_feature 1..534: note = Description of Artificial Sequence: Synthetic coding sequence
  source 1..534: mol_type = other DNA
atgaacgtggagaaagcagagttttgcaataaatcaaaacagccgggactggctagatctcaacacaatcgctgggccggaagtaaggagacttgcaacgaccgtcggaccccatcgactgagaaaaaagttgacctgaatgccgaccctctctgtgaacggaaagagtggaacaaacagaagttaccatgcagcgagaatccgcgagatacagaagatgtaccctggatcacgttaaacagctctatccagaaggtgaatgaatggttttcccgaagcgacgagctgctgggttcagacgattcacatgacggagagtccgagagtaatgccaaagtcgcagacgtcctcgatgtgctaaacgaggtagacgagtattctgggagcagcgagaaaatcgacttgctcgcttcggacccccacgaggcacttatctgtaagtctgagagggtacatagcaaaagtgttgaatcgaatattgaagataaaatcttcgggaagacttacagaaagaaggcctccctgcccaattag

SEQ ID NO: 27591 - DNA, 10257 bp, synthetic construct
  misc_feature 1..10257: note = Description of Artificial Sequence: Synthetic coding sequence
  source 1..10257: mol_type = other DNA
atgccaattggatccaaagagcggccaacattctttgagatcttcaaaacacgttgtaacaaggccgaccttggccctattagcctgaactggttcgaagagctttccagcgaggcaccaccctacaatagtgagccggctgaagagagcgagcataaaaataacaactacgagccaaacctattcaaaacaccacagaggaaaccatcctacaatcaactcgcctctacccctataatctttaaggagcagggcctcactctacctctctaccaaagtcctgttaaggagcttgacaaatttaagctcgaccttggacggaatgtgcccaattcacgccataaatcattgcggaccgtgaaaacaaagatggaccaggctgatgacgtgtcctgccccctcttaaactcctgtctatccgaaagtcccgtggtcttacagtgtacccacgtgactccgcaaagagataaatcggtcgtttgcgggtcactgttccacacccctaagtttgtgaaggggaggcagactcccaaacacatttccgagtccctaggagctgaagtggaccccgacatgtcttggtcctctagtctagctacacctccaactctgtcgtccacagtactgattgtgaggaatgaggaggcttcagaaactgtgtttcctcatgacacaactgcgaacgtcaaatcctatttttctaaccatgatgagagcctgaagaaaaacgaccgatttattgcttctgtgaccgattccgagaatacaaaccagcgagaggcagccagccacggttttggtaaaacttcagggaactcatttaaagtcaattcctgtaaagaccacattggtaaaagcatgcccaacgtcctggaggatgaggtttacgagacagtggttgacacttctgaagaggacagcttctcgctatgcttcagtaagtgccggactaaaaacctccagaaagtgcgcacctccaagacccggaaaaagatctttcatgaagccaacgccgacgagtgtgagaagtcaaagaatcaggttaaagagaagtactcgttcgtgtctgaggtggaacctaacgacactgatccactcgactccaacgtggccaaccagaagcccttcgaatctggttcagataagatctcaaaggaagtggtccctagcctcgcttgcgagtggtcccaacttacactttctggtctgaacggggcacaaatggaaaaaattccactgctacatatttccagctgcgaccagaacatttcggaaaaggatctgttagataccgagaacaaaaggaagaaggattttttaacttctgaaaacagcttgccacggataagctccctgcctaaaagcgagaagccgttgaacgaagagactgttgttaataaaagggacgaggaacaacatctagagtcccacacggattgtattctggccgtgaaacaggcaatctcgggaacatctcccgtggcaagcagctttcagggtattaagaagtccatattccggattagggagagcccaaaggaaacgtttaacgctagctttagtggccacatgacagatcctaattttaaaaaagagacagaggccagtgaaagtggtttggagattcatactgtgtgcagccagaaagaagatagtctatgtccaaacttgatcgacaacggcagttggcccgcaaccacaactcaaaatagtgtggctctgaaaaatgcaggactgattagcaccctcaagaaaaagacgaataagttcatttatgcaatccacgacgaaacctcatataaaggaaagaagattccaaaggaccagaagtccgagttgatcaattgtagtgctcagttcgaagctaacgccttcgaagcgcctctgacatttgctaacgctgattctggcttgcttcactccagcgtaaaacgttcgtgttcccagaacgattccgaagagcctactctctccctgaccagcagttttggaactattctccggaagtgcagtaggaatgaaacttgtagtaacaatacggtaatatctcaggacctggactacaaagaagctaagtgcaacaaggagaaactccagttattcatcactcctgaggcagacagtctgtcctgcctccaggaagggcaatgtgagaatgacccgaagagcaaaaaggtctcagatatcaaggaggaggtgctagctgccgcatgccatccagtgcagcactcaaaggttgagtattcagataccgacttccaatctcagaaatctctcctctacgaccacgagaacgccagcaccctaatcctgacccccactagtaaagacgtgctttccaacctggtcatgatcagcagggggaaagagtcttacaagatgagcgataaacttaaggggaataactacgagtctgatgtggagctgactaaaaacattcctatggagaaaaaccaggatgtgtgtgccctgaacgaaaactacaagaatgtggaattacttccccctgagaagtacatgcgggtcgccagcccaagcagaaaggtgcagttcaaccaaaacactaaccttagagtcattcagaagaaccaggaggaaactacgtcaatctctaagatcacggtgaatcctgatagtgaggagttgttctcagacaatgagaacaattttgtgttccaggtggcgaatgaaaggaataatctcgctctggggaataccaaagagttgcatgagaccgatctgacctgtgtcaacgaacccatctttaagaactctaccatggttctgtatggagacaccggggataaacaggctacacaggtttcaatcaagaaggacttggtttacgtcctcgcagaggaaaataaaaactcagtcaagcagcatatcaagatgaccctcggccaagacttgaagtctgacatctctctcaacatagacaagattcccgaaaagaataatgactacatgaataagtgggcaggactgctggggcctattagtaaccatagttttggcggttccttccggaccgcttctaataaagaaatcaagctttccgaacataatatcaagaagagtaaaatgttcttcaaagatattgaagaacagtaccctacgagtctggcctgcgtagagatcgtcaatactttagcgctggataaccagaaaaaattgagtaagccccaatccatcaacactgtcagtgcccacctccagagctctgttgtggtcagcgattgtaagaatagccacatcacacctcagatgttgttcagcaaacaggacttcaatagcaatcacaacctcacgccctcacaaaaggctgaaataaccgagctgtcaacaatcctcgaagagtccggcagccaatttgaattcacccagttcaggaaaccatcctacatcctccagaagagcacgttcgaggtgcctgaaaaccagatgacaatcctcaaaacaacttccgaagagtgcagggacgcggatctgcacgtgatcatgaatgccccatcaatcgggcaggtggactcaagtaagcagttcgaggggactgtggagataaaaaggaaattcgccggactgctgaaaaatgactgcaacaagtcagcaagtggctacctcactgatgagaatgaagttggctttcgcggattctatagcgcgcatggcacgaaactcaacgtttccacagaggccctccaaaaggctgtaaaactattttccgatatagagaatatctccgaggaaacatccgcggaggtccatcccatcagcctcagctcttctaaatgccatgatagcgtggtttccatgttcaagattgaaaatcataacgacaaaacagtgtccgaaaagaacaacaagtgccaattgatcttacaaaataatattgagatgacaaccgggactttcgtggaagagattaccgagaactataagaggaatacggagaacgaggataacaagtacacagctgcatcgcgcaatagtcataacttggagttcgatggaagtgattcctcaaagaatgataccgtttgcatccacaaagacgaaactgaccttctctttaccgaccaacacaacatatgcctgaaactctccggacagtttatgaaagagggaaatacacagattaaggaggacctgtctgatctcacttttctggaagtggccaaggcccaagaggcatgccatggtaatacctcaaataaagaacagttgactgcaaccaagactgaacaaaatatcaaggatttcgagacatccgatactttctttcaaacggcctctggaaaaaacatttccgtggctaaggagtccttcaacaagatcgtaaactttttcgatcagaaaccagaggaactgcataacttcagcctaaattctgagctgcattctgatatacggaagaataaaatggatattctgtcttacgaagagactgacattgttaaacataaaatattaaaggaaagcgttcctgtgggtacagggaatcaactggtcacgtttcagggccagccagaaagagacgaaaagataaaagaacccactttgctgggctttcacacagcaagcggtaaaaaagtgaagatcgctaaggagagtcttgataaggtcaagaatctgtttgacgagaaggagcagggtacttccgaaataaccagctttagtcatcagtgggcaaagactcttaagtacagggaagcatgtaaagatctcgaacttgcctgcgagaccattgagattaccgctgccccaaagtgcaaagaaatgcaaaattccctgaataatgataagaacctggtgagcatcgaaactgtcgtcccccctaaactactgagtgataacctgtgcaggcagactgagaatctgaagactagtaagagtatttttctgaaggtgaaggtgcacgaaaatgtggaaaaggagacagccaagagtcctgctacttgctacaccaatcaaagtccttactctgttatcgagaattctgcactggccttttacacttcatgctctcgaaagaccagtgtgtctcagacaagcttgcttgaggccaaaaagtggcttcgcgagggcatctttgacggacagcccgaacgtattaatactgctgactatgtgggtaattatctgtatgagaacaactctaactccaccattgcagaaaacgacaaaaaccatttatcggaaaagcaggatacatatcttagcaacagttccatgagcaactcgtacagttatcatagtgacgaggtctacaacgatagcgggtatctgagtaaaaataagttagatagtggtatcgaacccgtgctcaaaaacgttgaagatcagaagaatacctcctttagcaaggtcattagcaatgtgaaggatgctaatgcataccctcaaacagtgaacgaagatatctgcgtcgaagagttggtgacttcatcctcaccctgcaaaaacaagaacgccgctattaaactgtcaatttcgaattcaaacaactttgaggtagggccacccgctttccgcatcgcctccggcaagatcgtttgcgtctctcacgaaaccatcaaaaaagtcaaggatatctttaccgacagttttagcaaagtgatcaaggagaataatgagaataaatcaaagatttgccagaccaagatcatggcgggttgctatgaggcgctggacgattccgaggatatcctgcataatagtcttgacaacgacgagtgcagtacacatagccacaaagtttttgccgatatacagagcgaggaaattttacaacacaaccagaatatgtcaggcctggaaaaagtatccaaaatctctccatgtgacgtttcactagaaaccagtgatatatgtaagtgttccatcggtaaactgcacaagtccgtctccagcgcgaatacctgcggcatcttctccaccgcctcagggaagagtgttcaagtgagtgatgctagcttgcagaacgctagacaggtcttttctgaaatcgaggattccactaagcaagtgtttagcaaagtcctttttaagagtaacgaacactctgaccagctaaccagggaagagaatacggcaatacgcacgccagaacacctgatcagtcagaaggggtttagttacaacgtggtgaactcctctgccttctccgggttttcaaccgcctccgggaaacaagtctccatcttggagagctccctgcacaaggtgaagggggtactcgaggagttcgacctcatcagaacagagcacagtctgcattattctcccacgtcgagacagaacgtttcgaaaatcttaccaagagtagataaacggaatcctgaacactgtgtgaattccgaaatggagaaaacatgcagcaaagagtttaagctgtctaataatttgaacgtcgagggcggtagctcggagaataaccacagtatcaaagtgtctccttatttgagccagttccaacaagacaaacagcagcttgttctcggtacgaaggttagcctggtggaaaacatccatgtgctgggcaaagagcaggcctcaccaaaaaatgttaaaatggaaattggaaaaacagagacattttccgatgtacccgtaaagacaaacatcgaggtatgttccacatactctaaagattcagagaattacttcgaaaccgaggctgttgagattgccaaagcgtttatggaggacgatgaattgacggacagcaaactgccctcacatgctactcactcccttttcacctgccctgagaatgaggagatggtgctatctaacagccggattggcaaacgcagaggggagccactgatactcgttggcgagcctagcattaagaggaacctgctgaacgaattcgacaggatcatcgagaatcaggagaaatcgttgaaggcctccaagtctacaccagacggaaccataaaagaccggaggctctttatgcatcacgtcagcctcgagcccatcacttgcgtcccattccgcacgacaaaggaacggcaagaaatacagaaccctaatttcacagccccaggacaggagtttctttctaagagccacctgtatgagcatctaactttggaaaagtcctcatccaacctggccgtcagtggtcatccattttatcaggtctccgcaacaagaaatgagaaaatgcggcatctcattacaacaggtagacctactaaagtattcgttccgccttttaaaacaaaatctcatttccacagagtggaacaatgcgttcgaaacatcaacttggaagaaaaccgacagaaacagaacattgatgggcacggaagcgacgacagcaaaaataagattaatgacaacgagatccatcagtttaataaaaataacagtaaccaggcagtcgcagtcacattcactaaatgcgaagaggaaccactggacttaatcacatcgctccagaacgcgagagacatccaggatatgcgaataaaaaagaagcaacggcagagagttttcccacagcctggcagtttgtaccttgcaaaaaccagtactctccctcgaatctctctcaaggccgcagtggggggtcaggttccctcagcttgctctcacaagcagttatacacctatggcgtctcaaagcattgtatcaaaatcaatagcaaaaatgcagagagtttccagttccacaccgaggattatttcggcaaggagagtctttggaccggaaagggcatccaactggccgatggcggatggctgatcccctccaacgatggcaaggcaggaaaagaggagttttatcgcgcactgtgcgacacccccggagtggacccgaaattaatcagcaggatctgggtgtataaccattaccgttggattatctggaaactggccgctatggagtgcgccttccctaaggaatttgccaatcggtgcctgtcccctgagagggtacttctgcaactgaagtatcgatacgatactgagatcgaccgtagcaggcggagtgccattaagaaaatcatggaacgcgacgacaccgcggctaagactctcgtgctatgcgtttccgatatcatctcccttagtgcaaatattagtgagacctccagcaacaaaaccagcagcgccgacactcaaaaggtggctatcattgaactgacagacgggtggtacgccgtaaaagcccagcttgatcctcctcttttggccgtgctaaagaatggcagactaactgtgggccagaagattattctgcacggagctgaactggttggcagtccggacgcttgtacaccgctagaagccccagagagcctgatgctgaagatatctgctaactccactagacccgctcggtggtataccaaactggggttctttcctgatccgcgtccatttcctctgcctctgagtagcctcttctccgatggcggtaatgttgggtgcgtggacgttattattcagagggcctaccccatccagtggatggaaaagacatcctctgggctgtatatcttccggaatgagcgggaagaagagaaagaggccgcaaaatatgtggaggcccagcaaaaacgactggaggctctcttcactaaaatccaggaagagtttgaggagcatgaagaaaacaccacgaagccttacttgccgtcacgagccttaacccggcagcaggtcagagccttgcaggatggagccgagctgtacgaagctgtcaagaacgctgccgacccggcttacctcgaagggtatttttcagaagagcagctccgtgctctgaacaaccacaggcaaatgctcaacgataagaagcaggctcagatacagctggagataagaaaggctatggaaagtgctgagcaaaaggagcaggggttgagccgggatgttaccaccgtgtggaaactcaggatcgtgtcctatagtaaaaaagagaaagactcagttatcctgtccatctggcggccttctagtgatttgtactctttactcacagaaggaaaacgatatcgcatctaccatctggccactagcaaatccaaaagcaaatctgaaagggccaacatccagttggcagctacgaagaagacccagtatcagcagctgccagtttcagacgagattctgtttcagatctatcagccgagagagcctctgcacttttccaaattcctggatcccgattttcagccctcctgcagcgaggtggatttaatcgggtttgtcgtgtcagtggtcaagaaaaccggcctggcccctttcgtgtacctgagtgacgaatgttacaatctactggcaatcaaattttggattgacctgaacgaagatataatcaaaccacatatgctgatcgccgctagcaaccttcagtggcgaccagaaagcaaatccggcttgctgacattgttcgccggtgatttttccgtgttcagtgcctccccgaaggagggtcacttccaagagacctttaacaaaatgaagaatactgtggagaatatcgatatactctgtaacgaagccgagaacaaacttatgcatatcctgcatgcgaatgatcccaagtggagcaccccaacaaaggattgtactagcggaccttacacagcccagattatcccaggcacaggaaataaactgctcatgagtagccccaactgcgagatctattatcaatcacctttgtcactttgtatggccaagcggaagagtgtctccaccccagtgagcgcccagatgacgtctaagagctgcaaaggggaaaaggagatcgatgaccagaaaaattgtaagaagcggcgagctctcgactttctcagtcgcctacctctgccacctcctgtttctcccatctgcactttcgtttcgccagccgctcagaaggcctttcagccacctcgctcttgcggtactaagtatgagacaccgatcaagaagaaggagctgaacagtcctcagatgacgccgttcaagaaatttaatgaaatctctttgctggaaagcaattcaatagccgatgaagaactggctctgatcaatactcaagccctgctgtcaggcagtactggcgaaaaacagttcattagcgtttccgagtcgacaaggaccgcccctacgtcaagcgaagactaccttagactaaaaaggagatgtactacctctttaatcaaagaacaggaatcctctcaggcaagtaccgaagagtgcgaaaaaaacaagcaggatacaattactaccaaaaagtacatctac

SEQ ID NO: 27592 - DNA, 1809 bp, synthetic construct
  misc_feature 1..1809: note = Description of Artificial Sequence: Synthetic coding sequence
  source 1..1809: mol_type = other DNA
atgcctatcgggagtaaggaacggccaacgttcttcgaaatttttaagactagatgcaataaagcaggcccaattagccttaattggtttgaagaactttccagtgaggcaccaccctacaactcagaaccggcagaggagtcggaacacaagaacaacaattatgaacctaacctgttcaaaacaccacagcgaaaaccttcgtacaatcaactggccagtacgccaattatttttaaggagcagggtctgactcttcccctgtaccagtcccccgtgaaggaactcgataagttcaaactggaccttggcagaaatgtccctaactctaggcataagagccttagaacagtgaaaaccaagatggatcaggccgacgacgtgagttgccctcttttgaacagttgcctctcagaaagccccgttgtgttacaatgtactcacgtcacgccacagcgcgacaagagtgtggtgtgtggttcactgtttcacacacctaaattcgttaaggggaggcaaacaccaaagcacatatctgaatccttaggcgcagaggtggacccagatatgtcatggtcctcaagcctggccaccccaccaacactttcttcaaccgtccttattgtgaggaatgaggaggcttcggagacagttttcccgcatgatactacagccaatgtaaaatcttacttcagtaaccatgacgagagccttaagaagaatgaccgctttatcgcgtccgtgactgacagcgagaacaccaaccaaagggaagccgctagccacgggtttgggaagacatctggaaacagtttcaaggtgaactcctgtaaagatcatatcggaaagtcaatgcccaacgtcctagaagacgaggtgtatgaaacggtcgtagacacttcagaagaggactctttttctctgtgcttctcgaagtgtcgcactaaaaacctgcagaaagttaggacatccaagacaaggaagaagatcttccatgaggcaaatgctgacgagtgtgaaaaatctaaaaaccaggttaaagagaagtactccttcgttagtgaggtagagcctaatgacacagatcccttggactcaaacgtggcgaaccaaaaacccttcgagtcaggctcggataaaattagcaaggaagtggtgccctccctggcctgcgagtggagtcagctgaccctctctggactgaacggggcacagatggagaagataccactgttacacatcagctcctgtgaccaaaacatcagtgagaaggatttactcgatacggaaaataagcggaaaaaagactttttaaccagcgaaaactcactgccccgtatttcttccctgcccaagtctgaaaaaccactgaacgaggaaacagtagtaaacaagcgcgatgaggagcaacacttagagagccatacagactgcatactagctgtcaaacaagccatctcgggcacctcacctgttgcctctagttttcagggtattaagaaatctatctttaggatacgggaaagtccaaaggaaacctttaacgcctcattttccgggcacatgaccgacccgaacttcaaaaaagaaaccgaagcaagcgaatccggcctggagatccacaccgtgtgcagccagaaggaggacagcctgtgtcctaatcttatagacaacgggagctggcccgctacaacaactcaaaattcggtcgctctcaagaacgcaggcctaataagcaccctcaagaagaagacgaataaatttatctacgccattcacgatgaaaccagctataagggcaagaagtag

SEQ ID NO: 27593 - DNA, 10257 bp, synthetic construct
  misc_feature 1..10257: note = Description of Artificial Sequence: Synthetic coding sequence
  source 1..10257: mol_type = other DNA
atgcctatcggatccaaagagcgcccaaccttttttgagattttcaagacgaggtgtaataaagcagatctgggacctattagtctgaattggttcgaagagctttcctctgaagcgcctccgtacaattctgaacctgcggaagaaagcgaacacaagaataacaactatgagcccaatctgttcaagaccccccaacggaagcccagctataaccagcttgcctctaccccgattatcttcaaagaacagggactgacgctccccctgtaccagtctcccgtgaaggaactggataagttcaagctggacttaggacggaatgtgcctaactcacggcataaaagtctccgaactgtgaagacaaaaatggaccaggctgatgatgtgagctgtccattacttaattcctgcttatcagagtcaccggttgttctgcagtgcacccacgtcacccctcagagagacaaaagtgtagtgtgcggaagcctttttcacacgcctaaatttgtcaaggggaggcagactcccaagcatatttccgagtccctgggcgctgaggttgatccggacatgagctggtcctccagcctagctacacctccaaccttaagttccaccgttttaattgttagaaatgaggaggcgtctgaaaccgtgtttccacatgacaccaccgccaacgtaaagtcctacttctcaaatcatgacgaatccctcaaaaaaaacgacagattcatcgccagtgttaccgattcagagaatacaaatcagagagaagctgcctctcacggattcggtaagacttcaggtaacagcttcaaggtgaattcttgcaaagaccatatcgggaagagtatgccaaacgtcttggaggacgaagtttacgagactgtggtggatacctctgaggaggattccttttctctttgctttagtaagtgcaggaccaagaatcttcaaaaggttcgcacatctaaaacacgcaagaaaatctttcacgaggccaatgcagatgagtgcgagaaatccaagaaccaggtgaaagagaaatattccttcgtctctgaggttgagcctaatgatactgaccctctcgacagcaatgtagctaatcaaaagcccttcgagagcgggtcagataaaatcagtaaggaggtggtgcccagtcttgcctgcgaatggagccagttgacacttagtggtttaaacggcgctcaaatggagaaaatccccttattgcacatctcatcttgcgaccagaacatatcagagaaagacctcctggatacggagaacaagcgaaagaaggactttctgacttccgagaacagtctgccccgaatttcctcccttcctaaatcggagaaacctctcaatgaggaaactgtggtcaacaaaagagacgaggaacagcaccttgagagtcacacagattgcatcttggctgtgaagcaggcaatcagtggcacctccccagttgcaagcagttttcagggcattaagaaaagcatattccgtataagagaatctccaaaggaaacattcaacgctagcttttctggacatatgaccgatccgaatttcaagaaggagacggaggccagcgaatccggcctggagatccacacggtgtgctcacagaaggaggattcactctgtcccaacctcattgacaatggaagctggccggctaccacaacccagaattccgtggctttgaagaacgccggtctgatttccacactgaaaaagaaaaccaacaagttcatctatgctatccacgacgagacaagctataaagggaaaaaaatccctaaggaccaaaaatcagagttaatcaattgttctgcacaatttgaggctaatgcctttgaagccccacttacttttgcaaatgccgattccggactgctgcactctagcgtcaaaagatcctgctctcagaacgatagcgaagaacctacattgtctctgacgtcgtcttttggtactatcctcaggaaatgctcacgaaatgagacttgcagtaataacacagtgatatcccaagacttggattacaaagaggcaaaatgcaacaaggagaagttgcagctgtttattaccccagaggccgatagtttaagctgcctgcaggagggacagtgcgagaacgaccccaaatctaaaaaggtgtctgatattaaagaagaagtgctggctgcagcttgccatcccgtccagcactctaaagtggaatactccgatacggacttccaaagtcagaaaagtctgctgtatgaccacgaaaatgccagtaccttaattttgactcccacctccaaggacgtgctgagcaatttagttatgattagccggggtaaagagtcatataagatgtcagacaagttgaaaggaaataactatgagagtgacgtagagttgactaagaacatccctatggaaaagaaccaagacgtgtgcgccctgaatgaaaactacaaaaacgtcgagttgttacccccagagaagtacatgcgagtggcatcaccatccagaaaagtacagtttaaccagaacaccaatttacgcgtcatccaaaaaaaccaggaagaaactacgtcaatcagcaagattactgtaaatcctgatagtgaggagttgtttagcgacaatgaaaacaactttgtgttccaggtcgccaatgagaggaataacctggccctgggaaacactaaggagctgcatgaaaccgacttaacttgtgtgaacgaacccattttcaagaacagtacaatggtgctttacggggacactggagataagcaagccacacaggtctcaattaagaaggaccttgtgtacgtcctggcggaagagaacaagaacagcgtaaagcaacacattaaaatgaccctgggccaggacttgaaaagcgatatcagtttaaatatcgacaaaattcctgagaagaataatgattacatgaataaatgggccggactgctgggccctatctctaaccactcgttcggcggttcatttaggacagcatccaataaagaaattaagctgtctgaacataatattaaaaaaagtaaaatgttttttaaggacatcgaagaacagtacccaacctccttagcatgcgtcgaaattgtgaatacactcgcgttagacaaccagaagaagctgagcaaacctcagagtattaacacggtgtccgcccacctgcagtctagtgtggtggtgagcgactgcaagaacagccatatcaccccacagatgctgttttctaagcaggattttaactccaatcacaacctgacaccatcccaaaaagccgaaatcactgagttgtccacaattctggaggaatcaggcagtcaattcgaattcacccagtttcgaaaaccatcttatattcttcagaaatccacctttgaagtgcccgaaaatcagatgactatactgaagacaacttcggaggagtgtagggacgccgatctgcatgttattatgaacgctcctagcattggacaggtggattcttccaagcaattcgaaggcacggtggagatcaagcgcaaattcgcaggattattgaaaaatgactgcaacaagagcgcaagcggctatctaaccgacgagaatgaggtgggattcagaggcttttactctgcacacggaaccaagctgaacgtttccactgaggcacttcagaaggccgtaaaactttttagtgacatcgagaacatcagcgaagagacgagtgcagaggtacacccaatttctctgtcctcatctaaatgccacgactctgtcgtatctatgtttaagattgagaatcacaacgataagaccgtgtccgaaaagaataacaagtgtcagttgatcctgcagaataacatcgagatgactactggcacatttgtggaagagatcacagagaactataaacgcaacaccgagaacgaagacaataagtacacagccgctagccgcaacagccataatttggagtttgacggcagtgattcctctaaaaatgataccgtgtgtattcataaggacgaaaccgacctactcttcaccgaccaacacaatatttgtcttaagctgtctggacagttcatgaaggagggcaatacacagatcaaggaagatctctcagacctgacttttctggaggtcgcgaaggcgcaagaagcatgccatggcaacactagtaacaaggagcaactgaccgcgactaaaacagaacagaacatcaaagacttcgaaacttcagatacgtttttccagactgcttccgggaaaaacatcagcgtggctaaggaaagcttcaataagatcgtcaacttcttcgaccagaagccggaagaattacataacttttctctgaattccgagcttcacagtgatatccgtaagaataaaatggacatactgagctatgaggaaaccgacattgtaaagcacaagattctgaaggagtcagtgcccgtggggacaggcaaccaactggtgacttttcaaggacaacccgagcgtgatgagaagattaaagaacctacgcttctgggcttccatactgcctccggcaagaaggttaagattgccaaagaaagtcttgataaagttaagaatctttttgacgagaaggaacagggcaccagtgagataaccagtttttctcaccagtgggcaaagacattgaagtaccgagaagcctgtaaagacctggaactcgcatgtgagaccatcgaaatcaccgctgccccaaaatgtaaagagatgcagaactcactcaataatgacaagaatttggtgtcgatcgagacggtagtgcctccaaagctcctctctgataatctgtgcagacaaactgagaatcttaagaccagcaaatccattttcctaaaagttaaggttcacgagaatgttgagaaggaaaccgcaaagagccccgctacttgttacactaaccagagtccgtactctgtgattgaaaattccgcgctggccttctacacatcctgtagtaggaagacatcagttagtcagacatcattactggaggctaagaaatggctacgggaaggtatatttgatggccaacccgagcgcatcaataccgcagactacgttgggaactacctgtatgaaaacaatagcaactccactattgccgagaatgacaagaatcatctatccgaaaaacaggatacgtaccttagcaactccagtatgtccaactcatattcttatcatagcgatgaagtatacaatgatagtggctatctctccaagaacaagctggatagcgggatcgagcctgtgttaaaaaacgtggaagaccaaaagaacacgtcttttagtaaagtgatctctaatgtgaaggacgccaacgcgtacccacagacagtcaatgaagacatatgcgttgaagagctggtaacttccagctcaccctgtaagaacaagaacgctgccattaaattatctataagtaatagcaacaacttcgaagttgggccacctgctttccgcatcgcttcgggcaagattgtgtgtgtgagtcacgagaccatcaagaaagtgaaagacattttcaccgacagcttctctaaggtgatcaaggaaaacaacgagaataagtccaaaatttgtcaaactaagattatggctgggtgctatgaggcccttgatgacagtgaggacattctacacaattccttagacaacgacgaatgctctactcatagccacaaggttttcgctgatatacaatctgaagaaatattgcagcacaaccagaacatgtctgggcttgaaaaggtgtcaaaaataagtccttgcgatgtgtcactggaaacaagtgatatttgcaagtgctccatcggaaagctccataagagcgtgtctagcgcgaatacatgcggaatcttttctacggccagcgggaaaagcgttcaggtgtctgatgctagcctgcagaatgctagacaggtattctctgaaatcgaagacagcacaaaacaagtttttagcaaagtgctgtttaagtctaatgaacactctgatcagttgactcgagaagaaaacaccgccatcagaactcctgagcatttgataagccagaaaggcttcagttacaatgttgttaatagttccgccttcagtggtttttctacggcctctgggaaacaggtgtccatcctcgaaagcagccttcataaagtcaagggcgtcctggaagagttcgatctcatccgcacagaacatagtctccattactcacccacttccagacagaacgtgtctaagattctgcctcgcgtcgataagaggaacccggagcattgtgtcaattcagagatggagaagacctgtagcaaggaattcaaattgtctaacaacctcaacgttgaaggaggaagttcagaaaacaaccactccatcaaggttagcccctatctgtctcaatttcagcaggataaacagcagctcgttttgggcactaaagttagtttggttgaaaacatccatgttttaggcaaagagcaagcttcacccaaaaacgtcaaaatggaaataggcaagacagagaccttttccgatgtccctgtgaagacgaacatagaggtttgttctacatactctaaggattctgaaaactattttgagacagaagccgtggaaatagcgaaggcgtttatggaagatgatgagctgactgactcgaagctgccctcgcacgctacacattcccttttcacctgtccagaaaacgaagaaatggtgctctccaacagtagaatcgggaaacggagaggagaacccctcatactggtgggcgagccgtctatcaagagaaaccttctgaacgaattcgatcggatcatcgaaaaccaggaaaagtcactaaaggctagcaagagcacccctgacggaactatcaaggatagacggttgtttatgcaccacgtctctttagaaccgattacatgtgtgccctttcgcaccacaaaggagaggcaggagatccagaatcctaatttcacagcgcctgggcaggagtttttatcaaaaagtcacctttacgagcacttgaccctggaaaaatcgtcctccaacctggcggtgagtgggcatcccttttaccaggtctcagcaaccaggaatgagaaaatgcggcatctcatcacgacaggcaggcctaccaaggtcttcgtccctccatttaagacaaagtcacactttcaccgcgtcgagcaatgcgtgcgcaatattaatcttgaggagaatagacagaagcagaatatcgacggacacggctccgacgacagcaagaataaaataaatgacaacgagatacaccaatttaacaaaaacaattccaaccaggccgtggccgttacgtttaccaagtgtgaggaggagccgctggacctcataacctcccttcagaacgccagggatatccaggatatgcggataaagaaaaagcaacgccagagggtatttccacaaccgggaagcctctacctcgcaaaaactagcaccctgccacgcataagtctgaaagccgctgtggggggacaggtcccttccgcctgtagccacaagcagctgtacacctacggggtgtcaaagcattgtataaaaattaacagcaaaaacgccgaaagcttccagtttcacaccgaggattacttcggcaaggaatcactgtggaccggtaaggggatccagctggcagacggcggttggctcattccaagcaatgatggcaaagccggtaaggaagaattttaccgggctctgtgcgatactcccggagttgatcccaaattgatcagcaggatatgggtttataaccactatcgatggattatctggaaattggccgcaatggagtgcgcctttcccaaggaattcgctaataggtgcctgagcccggagagagtgctcctgcagctgaagtaccggtacgacacagaaattgataggagtagaaggtccgccattaagaaaatcatggagcgggatgacacagctgccaaaacactggtcctgtgcgtgtcagacattatttcactgagtgctaatatttctgaaacgtcaagcaacaaaacctctagcgctgatacccaaaaggtggccatcatagagttgactgatggctggtacgcagtgaaggcacagctggacccaccactcctggctgtgcttaaaaacggcagacttactgttggtcagaagattattcttcacggcgcagaactcgtggggagcccagatgcctgcaccccattggaggcaccggagagtctcatgctgaaaatcagtgcgaattccactcgcccagccagatggtataccaaactgggcttcttccccgatcctcggcctttccccctccctctgtcttctctctttagtgatgggggtaatgtgggctgcgtggacgtaatcattcaacgcgcttaccccatacagtggatggagaaaacaagctccgggctttatatattccgtaatgaacgcgaggaagagaaagaagcagccaagtatgtcgaggcacagcagaagagactagaagcactattcaccaagattcaggaagagtttgaagaacatgaagagaacaccacaaaaccatacctaccttctcgcgcactcacacggcagcaagttcgcgcactgcaggacggagccgaactttacgaagcagtcaaaaacgccgctgatcctgcctacttggagggctatttctcagaagaacagcttagagctctgaacaaccacagacagatgctcaatgacaagaagcaggcccagatacaactggaaatccgtaaggccatggagtcagccgagcagaaggagcagggtctgtcacgcgacgtcactacagtttggaaactacgaatcgtgtcatattctaaaaaggagaaagacagcgtgatcctgtctatctggaggccttctagtgatctctatagcctgctcacggaaggcaaacgatacaggatctaccatctagcgacctctaagtcaaaaagcaagtccgagagggccaacatccagcttgcggcaaccaagaagacacagtatcagcagctgcctgtctccgatgagattttatttcagatataccagccaagagaaccacttcacttttccaaattccttgaccctgactttcaaccatcgtgttccgaggtcgatcttatcgggttcgtggtgtccgtagttaagaaaacaggtttggccccttttgtatacttaagtgatgaatgttataacttgctggcaattaagttctggatagatctgaatgaagatatcatcaagccacatatgcttatcgccgctagcaatcttcaatggcggccagagtctaagagcggcttgcttacgctcttcgccggtgattttagtgtgttcagtgccagcccgaaagagggccattttcaggagaccttcaataagatgaaaaacacagtcgaaaacatagatattctgtgtaatgaggctgagaataagctgatgcacatcctgcatgccaatgatccaaagtggtcaactccaactaaggattgcacctccggcccatatactgcccagatcatacctgggacaggcaataaactgctgatgtcatcccctaattgcgagatatattatcagtcacctctgtcattgtgtatggcaaagcggaagtctgtctccacccctgtgtccgcacagatgacgagtaagtcatgcaagggggagaaggagatagacgaccaaaaaaattgtaagaagagacgcgcactggattttctgtcacggctgccactgcccccacccgtgtcccctatctgtacttttgtaagtcctgcagcacaaaaggcatttcagccccctaggtcctgcgggactaaatatgagacaccaattaagaagaaagagctgaatagccctcagatgacccccttcaagaagttcaacgaaatatcccttctggagtctaattcaattgcagatgaggagttagccctcatcaacactcaggccttactatcaggatccaccggggagaaacagtttatctcagtatccgaatcaacccgtacggcaccaacttccagtgaagactacctacgcctgaagcgacgatgcaccacaagccttattaaggaacaggaatcatctcaggcgtccacggaggaatgcgaaaagaataagcaggacacaattacaacgaagaaatacatatag

SEQ ID NO: 27594 - DNA, 2667 bp, synthetic construct
  misc_feature 1..2667: note = Description of Artificial Sequence: Synthetic coding sequence
  source 1..2667: mol_type = other DNA
atgcactgccctggagaggcgccactggctgcacccagacctaccccgaaggacccctgtctaaggaacgtactggccaaagcgctgtacgacaacgtggccgagagtccggacgagttgagtttcagaaagggggacatcatgacagtgctggagcaggacacgcagggccttgacgggtggtggctttgttcccttcacggcagacaagggattgtacctggtaatcggctgaagattctggtgggtatgtatgataagaaaccagccggacccggaccgggacctcccgctaccccagcacaaccccagccgggattacatgcacctgcgcctccggcatcccagtacacacccatgttacctaatacataccaaccgcagcccgacagtgtgtacttagtgccaactccaagcaaggcacagcagggcctgtatcaggtgccagggccatcaccacagttccagagtccaccagccaagcagacctcgacattcagcaagcagacaccccaccatcccttcccctccccagcgactgacttgtaccaggtgccacccggtccaggtggcccagcccaggatatttaccaggttcctccttctgccggtatggggcacgatatttaccaagtgccacctagtatggacactcgctcttgggagggcactaagccacctgccaaggtagtagtgcctacacgggtgggtcaagggtatgtctacgaggccgctcaacctgaacaagacgaatatgacatcccacgtcacctgttagcaccaggtccacaagatatttatgacgtcccgccagtgcggggtctgctacctagccagtacggccaagaggtctatgatacaccacctatggcagtgaaaggaccgaacgggagggatcctcttcttgaagtctatgacgtgcctccctccgtggagaaaggcctccctccctccaaccatcacgctgtctacgatgtgccaccttcagtttctaaggatgtcccggacgggccattgctccgggaggagacctatgatgtgccacctgctttcgcgaaggccaaaccctttgacccagcacggacgccccttgtgctcgccgcaccccctcccgattccccccctgcggaagacgtgtatgatgtccctccaccggcacccgatctctacgatgtaccacccggactacgtcgtcccggtcctgggacactgtacgacgtgcctagggaacgggtgctccccccagaagtagctgatggaggcgtggtggattcaggcgtttatgccgttcctccgccagctgaaagggaggccccagctgagggtaagcggttgtccgcctcttccactggttctacacggtcctcgcaatctgcaagtagtctggaagtggccggacccggtcgtgaacccctggagctggaggtggccgtggaagccctcgccagattacagcaaggtgttagcgctacagtcgcccatttgcttgaccttgcgggttccgccggtgccaccggctcctggcgatcacctagcgagcctcaagaaccgcttgtgcaggacttgcaggctgccgtagctgccgttcaaagcgccgtgcacgagctgctggaatttgcccgttcagcggtgggcaacgctgctcatacatctgatcgggcactgcacgcgaagttgtcccggcagctccagaagatggaagatgtccatcaaacacttgttgcccacggacaagcacttgatgcgggaagaggtggcagcggggcaacactcgaggacctcgaccgactggtggcctgctctagagcagtcccagaagacgctaaacagttagcctcctttctgcatgggaacgcctcactactctttcgaagaaccaaggcaactgcccctggccctgaaggcggaggcaccctccacccaaacccaaccgacaagacctcttccatacagtccagacctttacccagtcctccgaaattcacatcacaagattcgcctgatggacagtacgaaaattctgaaggcggatggatggaggattacgattacgtacatcttcagggcaaggaagaatttgaaaagacgcagaaggagctgcttgagaagggctcaattacccgacagggcaagtctcaacttgaactacaacaactgaagcaattcgagagacttgaacaggaggttagtcggccaatagaccacgatctagctaactggaccccagcacaacctctggcaccgggtcgaacaggaggcctgggaccctccgataggcagttacttctgttttatctggagcagtgtgaggctaatctgacaacactgacaaacgccgtggacgccttcttcacagcggtggccacaaaccagccccctaagatctttgtggcccactcgaaatttgtcatcctgagcgcccacaagttagtgttcattggagataccctttcgcgccaggctaaagctgctgatgtgcgatcccaggtcacacactacagcaatctcctgtgtgacctcttgcggggtatagtggctaccaccaaagctgccgcattgcagtacccctccccatctgctgcccaggatatggtggaacgagtgaaggaactggggcacagtacccagcaatttaggcgagtcctcggacagctcgctgccgcatag

SEQ ID NO: 27595 - DNA, 2613 bp, synthetic construct
  misc_feature 1..2613: note = Description of Artificial Sequence: Synthetic coding sequence
  source 1..2613: mol_type = other DNA
atgaatcacctgaatgtattagcaaaggcactttatgataacgtcgctgaaagtcccgacgagctaagtttccgaaagggcgacatcatgacagtgctggaacaagacacccaaggcctggatggctggtggctctgtagcctgcatggtaggcagggcatcgttcccggaaatcggctcaaaatccttgtgggcatgtacgataagaaaccagcaggtccaggccctgggccacccgctacccccgcacagccccagcccggtctgcatgctccagcaccgcctgcaagccagtatacccctatgctgcccaatacctatcaacctcaaccagacagtgtgtacttggtgcctaccccatctaaagcccagcagggattgtatcaagtgccaggacctagcccccaattccagtcacccccagctaaacagactagcacatttagcaaacagacgccccaccatccgtttcccagtcctgctacggatctgtatcaggtgccccctggaccaggcggtcctgcacaagatatttatcaggttccccctagtgccggaatgggacatgatatttaccaagtacctccatcaatggacacacgctcttgggaaggcactaaacctcctgccaaggtggtcgttccgactcgagtgggacaaggatatgtttatgaagccgctcaacccgagcaggacgaatacgacatccccaggcatcttctcgctcccggaccccaggacatatacgatgtgccaccagtcaggggacttctgccttcgcaatatggccaagaagtatacgacactccaccaatggccgttaaagggccaaacggaagggatccgctgctggaggtatacgacgttccaccatctgtggagaagggcctgcctccgagcaaccatcatgctgtctacgatgtcccaccaagcgtgtctaaggatgtacccgacggcccactcctgagggaggaaacttatgatgtgccgccagcattcgctaaagctaagcctttcgaccccgctcggacgcccctggtcctcgctgctccccctcccgacagtccccctgctgaggacgtctatgatgtgccacctcccgctccagatttgtatgacgtacctccaggtctgcgccgacccggacccggaaccctttacgacgtgccaagagagcgagtcctgccccctgaagtggcagacgggggagtcgtggactcaggcgtgtatgctgtgccgccacccgcagagcgagaagctcctgctgagggaaagcgtttgtctgcttccagcaccgggtccacaaggtccagccagtccgcgtcaagcctggaggtggccggaccgggacgggagccgttggaactggaagtggccgtggaagctttggccaggctccagcagggagtgagtgccacggtcgctcacctgctcgacctcgccggatcggctggcgctactggttcatggcgctcccctagcgaaccccaggagccgctggtgcaggacctgcaggctgccgtggccgctgtgcagtctgctgttcacgagctcctggaatttgccaggtccgccgtggggaatgccgctcacacttcagatagggccctgcacgccaagctgagccgtcaactgcagaaaatggaggacgtccatcaaaccttggtcgcccatggccaggccctggacgcagggcgtggtggcagcggagcgacgctggaagatctggatcgtctggtcgcttgctcccgggctgtaccagaggacgctaagcagcttgcttcttttttacacggcaatgccagtttgctctttcgaagaacaaaggcgactgcacctggtccggaaggagggggtaccctgcatccaaaccccacggacaaaacatcatctattcagagcagacctctgccgagcccgcctaagttcacctctcaggattcacccgacggccagtacgaaaactcagaaggcggttggatggaggactatgactacgttcatctccaaggcaaggaagaatttgagaagacccagaaggaactcctggagaagggctctattacccggcaggggaaatctcagctggaactgcaacagttaaagcaatttgaacggctggaacaagaggttagccgccctatcgaccacgacctcgccaattggacacctgcacagccactggcccctgggagaacagggggactgggccctagtgataggcagttgttgctgttctacttggagcagtgtgaagctaacttaacgactctaaccaacgccgttgacgcgtttttcactgccgtggctacaaaccagccgcctaagatctttgtggcccactctaaattcgttatcctgagtgcgcacaaactagtgtttataggcgatactttatctcggcaggctaaggccgctgacgtacgaagtcaggtaactcactactccaacctgctgtgcgacctgttgcgcggaatcgttgcaaccaccaaggcagcagccctacagtaccccagtccctcagctgcccaagacatggtcgaaagggtgaaagaactagggcattctacccaacagttcagaagagttctcggacagctcgccgcagcttag

SEQ ID NO: 27596 - DNA, 2667 bp, synthetic construct
  misc_feature 1..2667: note = Description of Artificial Sequence: Synthetic coding sequence
  source 1..2667: mol_type = other DNA
atgaaccacctcaacgtgctcgccaaggcactgtacgacaacgtggccgaatcacccgacgagctgagctttcggaaaggcgacatcatgacggtgctggagcaggacactcagggtctggacggctggtggttgtgctctttacacgggcgacagggcatcgtcccgggaaatagactgaagatactggtgggcatgtacgacaagaaaccggctgggccaggacccggaccacccgctacgccagcacagcctcagcccggtctgcacgcgccagccccaccagccagccagtacacaccaatgttgccaaatacctatcagcctcagccagatagcgtgtacctggttcctaccccctccaaggcacagcagggtctctaccaggttccaggccctagcccgcagttccagtcaccccctgctaagcaaacatccactttttccaagcagactccccatcatcccttccctagtcctgccacggacctgtaccaggtgcctccaggacccggaggccctgctcaggatatataccaagtgccgcctagtgccggaatgggccatgatatatatcaggtgcctcccagtatggatacaaggagctgggagggaaccaagcctccggctaaagtggtggttcctactcgtgtgggtcaggggtacgtttatgaggctgctcagccagagcaagatgaatatgacatcccaagacacctgcttgctccaggaccgcaggatatctatgatgtgccccctgtaaggggactgctgccaagccaatacggtcaggaagtgtatgatacaccaccgatggccgtgaaaggccctaatggcagggatcctctgctcgaggtctatgatgtccccccatcagtggagaaaggcttaccccctagtaatcaccacgccgtgtctaaatgccagggcaacgctagggcacggctgcggctgtggggggtgtgggtatacgatgtgcccccaagcgtgagtaaagacgttcccgatgggccattgctgcgtgaggagacctacgatgttccccctgcctttgcgaaggccaagccattcgacccggctagaacccccctagtgctcgccgctcctccccctgatagcccgccagcagaggatgtttatgatgtaccaccccctgccccagacctgtacgacgtaccacccggtctcagaagaccagggccaggcacactgtacgacgttcctcgtgagcgcgtgctgcctcccgaggtggccgatggtggggtggtcgatagtggggtttacgccgtgccacccccagctgaaagagaggcacccgcagaaggcaaacgcctgagcgcctcttcaaccggcagcactcgcagctcccagtctgctagcagcctggaagtcgctgggcctgggcgtgagcctctggaactggaggttgccgtggaggctctcgcacgtctacagcaaggcgtctctgcaaccgttgcgcacttactagatctggcaggatccgcaggcgctaccggatcttggcgatccccctctgagcctcaagaaccgttagtacaagacttacaggcggcagtcgcagcagtacagagtgctgtccacgagcttcttgaattcgcacgatcagctgtgggcaatgcggcacatacttcagatcgcgcactacatgcaaaactgtcaaggcagctgcagaagatggaagacgtgcaccaaacactggtcgcccacgggcaagctcttgatgccggtcggggaggatctggggctacattggaggatctcgatcggctggtcgcctgttctagagctgtacccgaggacgctaaacagctggcttcttttctgcacggtaatgcctccctcctgtttcgccgtacgaaagccaccgctcccggacccgagggtggcggtactctccacccaaaccccacagacaagacatcaagcatacaatctcgccctctcccctctccccctaaattcaccagccaagatagtccagatggacagtatgaaaacagcgaggggggatggatggaggattacgactacgtgcacctgcagggaaaagaagagttcgagaaaacccaaaaggagctactggaaaaaggcagcataacccgccaggggaagtcacagctggagctgcagcaactgaaacagttcgaacgactcgaacaggaggtctcccgacctatcgaccatgacctggccaattggactccagcacagccattggcccctggaaggactgggggactgggtccttccgacaggcagttactactgttctacctagaacagtgtgaggccaacctgaccactttgacaaacgccgtggatgcattcttcaccgctgtcgcaacaaaccagcctccaaaaatttttgtcgctcatagcaagtttgtgattctaagtgctcataagctggtttttatcggggataccctgagccgccaggcgaaggcggctgacgttcggtcacaggttacacattacagcaacctgttgtgcgaccttctgcggggtattgtggcgaccaccaaggctgctgcgctccaatatccttccccctcagctgcgcaagacatggtggaaagggtcaaggagttgggccattcaacccaacagttccgcagagtgttgggacagctcgccgctgcatag

SEQ ID NO: 27597 - DNA, 2751 bp, synthetic construct
  misc_feature 1..2751: note = Description of Artificial Sequence: Synthetic coding sequence
  source 1..2751: mol_type = other DNA
atgcccgcaaagccattcctctccagtgtgctcctgtcttggaaggtgctggatttcagcggacccggtccccaggggaccgggcagccttgttcatgtggccactgggcggaaggtcagggtgggcctccagagcccgctggcggacccaacgtactggctaaggctctgtacgataacgtggctgagtccccagatgagttatccttcagaaagggcgatatcatgacggtgctcgagcaggatactcagggcttagatgggtggtggttatgttctctgcacggtaggcaggggattgtgccaggtaacaggttaaaaattttagtgggtatgtatgacaaaaagccggcaggtcccggtccgggaccacctgcaaccccagcccaaccacaaccaggtttacacgcccctgctccaccagcctctcagtacactcccatgctccccaatacctaccagccacagcccgacagtgtctaccttgtccccacaccatccaaagctcagcaggggctgtaccaggtgccgggaccaagcccgcagttccagtcccccccagccaagcagacatccacattctcaaagcaaacaccccaccacccgtttccttcgcccgctacagacctgtaccaggttcctcccggtcccggaggacctgctcaggatatttatcaggtcccaccttcagcaggcatgggccatgatatctaccaagtgcctccttccatggacacacgtagttgggaagggactaaacctcctgctaaagtagtcgtgcctacacgcgttggccaggggtacgtgtacgaggctgctcagccagagcaggacgagtatgacataccacgccatctgctggctcctggtcctcaggacatctacgacgtgccaccggtgcgcggtcttctgccttcacaatatgggcaggaggtgtatgacacccctcctatggcagtgaaagggcctaatggaagagatccactgttagaagtgtacgacgtgccgccttcagtggagaagggtctcccgccttcaaaccaccacgcagtctatgacgtgcccccaagcgtgagtaaggatgttcctgacggacctctcctccgagaggaaacctacgatgttccgccagcttttgcaaaggcaaaaccgttcgacccagccaggaccccactggtactcgccgctcctccacccgattctcctcctgctgaggatgtgtatgacgtccccccaccagcacccgacttgtatgatgtgccccctggcttacgcaggcctggacccggtactctctacgacgtccccagagagcgggttctgcctccagaagtcgccgacggcggagtcgtcgatagtggggtctatgccgtacccccaccagctgaacgcgaggcaccagccgaaggaaagcggttgagcgccagcagcacagggagtacacgatcatcacaaagcgcaagtagcctcgaggtagccggaccaggcagggagcccctggaacttgaggtggcggtcgaagccctcgcacggctccagcaaggtgtgagtgctacagtggcccacttgttggacttagctggatctgctggtgcaacggggtcttggcggtcccccagcgaaccacaagaaccattggttcaggatctccaggccgcagtcgcggctgttcagagcgcagtccacgagctgctcgagtttgcaagatccgctgtaggcaacgcggcacacacctctgacagagcgctccacgcgaagctgtcgcgacagttgcaaaaaatggaagacgtgcaccagaccctggtggcccacggacaggctcttgacgcgggtcggggtggttccggggcaactctggaagaccttgaccgactggtagcctgtagccgggcagttcctgaggacgcaaagcagctcgcaagctttctccatggcaacgctagtcttctctttcggaggaccaaagccacggcaccgggtcccgaggggggagggacactgcaccctaaccccaccgataagacttcgtccattcagagtagacccttgccaagcccgcctaagttcacctcacaggactctcctgacggacagtatgaaaacagtgagggcggttggatggaagactacgactacgtgcacctgcagggaaaagaggagtttgaaaagacgcagaaagagctcctggaaaaaggaagtatcacaagacagggcaaatcccagcttgagctgcagcagctgaagcagttcgagcgactagaacaggaggtctcgcggcctattgatcacgatctcgccaactggaccccagcccaacccctggctccaggacgcaccgggggtctcggacccagtgatcgccagctgctgcttttctatctcgagcagtgcgaggcaaacctcaccactctgacaaatgcggtggatgcattctttaccgccgtggcgaccaaccagccacctaaaatatttgttgcacatagtaagttcgtgattttaagtgcgcacaagctggtgttcataggggatacactgtcacggcaggctaaggctgcagacgtaagatctcaggtcacacattattcaaatcttctttgcgacttgctgaggggtatcgtcgcaacgaccaaagccgcagccctgcagtatccatctccctctgccgcacaagacatggtagagagggtaaaagaacttggtcactctacacagcagttccggagggtcctggggcagctggcagcggcttag

SEQ ID NO: 27598 - DNA, 2667 bp, synthetic construct
  misc_feature 1..2667: note = Description of Artificial Sequence: Synthetic coding sequence
  source 1..2667: mol_type = other DNA
atgctgacccatcgcccacaggaagctgagcagagggggaggacgcccggaccatcattcgagtggaacgtcttggccaaagccttgtacgacaacgtggccgaaagccctgacgagctgtcatttcgtaagggagacatcatgactgtcttagagcaggacacacaaggccttgacggctggtggctctgtagcctacacggcagacaagggatagtgccaggcaatcgtctgaaaatactcgtgggaatgtatgacaagaagcctgccggacccggacctggcccaccggctactcccgctcagccacaacctggcctgcatgctcccgcacccccagccagtcagtatactcccatgttacctaatacgtaccagccacagcccgacagcgtgtatctggtcccaactccatctaaagcccaacagggcctgtaccaagtgcctggtccctctcctcaatttcagagcccgcctgcaaagcagacgagtactttcagcaaacaaaccccacaccacccgtttccttctcctgctaccgacctgtatcaggtgccccctggaccagggggtcctgcccaggatatttaccaggtacccccaagcgctgggatgggccatgatatttaccaggttcctcctagtatggacacccgctcttgggagggaaccaaacctcccgcaaaagtcgtagtgccgacacgagtagggcagggctacgtgtacgaggcagcccaacctgagcaagatgaatacgatattcccaggcatctgctcgcccctggtcctcaggacatctacgatgtgcccccagtgagagggctcctgccatcacaatatgggcaagaggtgtatgacaccccaccaatggccgtgaaggggcctaacggaagagaccccttgctcgaggtttacgacgttcccccatcagttgaaaagggcctgccacctagcaaccatcacgctgtgtatgacgttcctcctagtgtttctaaagacgtacctgacggtcccctgctcagggaagagacatacgacgtgcctccagcttttgccaaagctaaaccgtttgatccagctaggacccccctcgtgctggctgcacccccaccggattctcctcccgctgaagatgtgtacgatgtcccacctcctgcaccagatctgtatgacgtcccacccggactccgtcgacctggccctggaacgctgtatgatgtaccccgtgaaagagtgctcccccctgaggtggccgatgggggagtggtggattccggagtctatgccgtgccccctccagcagagagagaagcaccagcagaggggaaacggttgagtgcctccagtacaggaagcaccagaagcagccagtctgcgtcgtcactggaggtggcaggacctgggcgtgagcccctagagttggaagtggccgttgaggccttggcaagacttcaacagggcgtgtcggctaccgtggcgcatttgctggacttggctgggtccgccggagcaacaggcagttggaggagtccctctgagcctcaagaaccattggtacaggacttgcaagctgcagtagctgccgtgcagtccgcagttcacgagctcctcgagtttgcccgatctgctgtcggcaacgcagcccacacttcagaccgagctctccatgccaagctgagtagacagttgcagaaaatggaggatgtacaccaaacacttgttgcacatgggcaggctctggatgccggtcgaggcggatctggcgcaacattagaggacttggacaggctggtggcctgctcaagagcggtccccgaagacgctaagcaattggcatctttcctccacggcaatgcttccctgctgttcagaaggacaaaggctacagcccctggcccagagggtggcggaacgttacaccccaacccgaccgacaaaacttccagcattcagagccgccctctaccaagcccaccaaaattcaccagtcaggatagtcccgacggacagtatgagaactccgagggaggatggatggaggactacgactacgtgcacctgcagggcaaggaggagtttgagaagactcaaaaggaactactggagaagggcagcatcacgaggcaagggaagtctcaactcgagctgcagcagctgaagcagttcgagcggctcgagcaagaggtctccaggcccatcgatcatgacctggcaaactggacacccgctcagcctctggcgccaggcagaacaggcggattggggccaagtgaccgacagttactgcttttctacctggagcagtgcgaggccaatctcacaaccctaactaatgcagtcgatgctttctttacagcagtggccacgaatcagcctcctaagatcttcgtggcacatagcaagtttgtgattctcagtgctcacaaattggtattcatcggagacaccctgtcacgccaggccaaagcggcagatgttcgctctcaggtcacacactacagtaatctgctatgtgatttattgcggggtattgtcgccactacaaaggcagcggcactgcagtacccatctccctccgccgctcaggacatggtggaacgggtaaaagagcttgggcacagtactcagcaattccgcagagtccttggtcagctcgccgctgcctag

SEQ ID NO: 27599 - DNA, 2169 bp, synthetic construct
  misc_feature 1..2169: note = Description of Artificial Sequence: Synthetic coding sequence
  source 1..2169: mol_type = other DNA
atgcagggtaaaaatgtcttggccaaggctctgtacgacaatgtcgctgaatcaccagatgagctgagttttaggaaaggggacattatgaccgttctcgaacaagatactcaagggctagacgggtggtggttgtgcagtcttcacggcagacagggtatcgtgcccggaaatcggctgaagatactggtggttgtgcctacccgggtcggacagggctatgtatatgaagctgctcagcctgaacaggatgaatacgacattcctcggcacttactcgcgccaggtccccaggatatttatgacgtacctcctgtgcgaggcctgctcccctcacagtacggccaggaggtctatgacacccctcccatggccgtaaaaggccctaatggcagagatccgctcttagaggtgtatgatgtacccccaagtgttgagaaaggactccccccttcaaatcaccacgccgtgtatgacgtgcctccaagcgtgagcaaagatgtgccagacggccctctcctcagggaagagacctacgatgtgccccctgcctttgcgaaagctaaaccattcgacccggctaggactcctttggtgctggcagctccacccccagattctccaccggctgaagacgtctacgacgtgcctcctcctgctcctgatctgtatgatgtaccaccagggttacgaaggccaggacccggaacactttacgatgtgccacgagagcgtgttttaccacccgaagtggcggatgggggtgttgtcgacagcggcgtatatgcagtcccccctccagcagaaagagaagcaccagccgaaggaaagcgcttgagtgcgagctcaacaggatccacccgctctagccagtctgcatcctccttggaggtcgctggacccggtcgggagcctttggaattggaggtggccgtcgaggcgctggccagactccagcagggtgtgtcagctacggtggctcacttgctggatctggccggatctgccggagccacaggatcatggcgatccccaagcgaaccccaggagccattggtgcaagacctgcaggcggctgttgcggctgtgcagtctgcagtccacgagttgctggagttcgcacgctctgctgtcggcaatgccgcacacacaagtgacagagcgctgcatgccaagctctctaggcagctgcagaaaatggaggacgttcaccaaacgctggttgcgcacggacaggccttggatgctgggagaggagggtcaggtgcaacgctcgaagacttagatcgacttgttgcttgcagccgtgcagtgcctgaagatgcaaaacagttagcctccttcctgcacggcaatgcatccctgctctttcgcaggaccaaagcgaccgctcctggcccagagggagggggtacacttcacccaaatccgacggacaagacttcttccatacagtcccgccctttaccctctccccctaagtttaccagccaggatagccctgatggtcaatatgagaactccgaagggggttggatggaggactacgactatgtgcatttgcaaggaaaggaagaattcgagaaaactcagaaggagttgcttgagaaaggcagtatcaccaggcagggcaagtcacaactggagctgcaacaactcaaacagtttgagcgactggaacaggaagtgagccggccaatcgatcacgatctggcaaattggacccccgctcagcctctggctccaggcagaacaggaggccttggcccatcggataggcagttactgctattttacctggagcaatgtgaggccaacctcacaaccctgacaaatgccgtcgacgctttcttcacagcagtggcaaccaatcagccccctaagatttttgtagctcatagcaaattcgtaatcctgtctgcccataaattggtctttattggggacactctgagcagacaggccaaggcggctgatgtgcgaagccaggtgacgcactactctaatctgctgtgtgatctactcaggggcattgttgccactacaaaggcagccgctttacagtatcccagccccagtgccgctcaggacatggtggagcgagtgaaggagctgggccattccacccagcagttccggcgagtgcttggccagcttgcagccgcatag

SEQ ID NO: 27600 - DNA, 2613 bp, synthetic construct
  misc_feature 1..2613: note = Description of Artificial Sequence: Synthetic coding sequence
  source 1..2613: mol_type = other DNA
atgagcgtgcctaatgtccttgcgaaagccctctatgataacgttgcagagtctcctgacgagctgagcttccgcaagggtgacatcatgactgtcctggagcaggatacacagggtcttgatggttggtggctttgttcccttcacgggaggcaggggatcgtgcccggaaaccggctgaagattctggtcggcatgtacgataaaaagcccgctgggccaggtccagggcctcctgcaactcccgctcaaccacagccgggtctgcatgctcccgctccaccagcgagtcagtacacccccatgctgcccaatacatatcagccccagcccgactccgtgtatctagttcccacgccaagcaaggcccagcagggactgtatcaagtgcctggtccgagcccacaatttcagagcccccctgcaaagcagacctccaccttctcaaagcagaccccacaccatccttttccatcaccggctaccgacctctaccaggtgcctcccggaccagggggacccgctcaggacatttaccaggtcccaccaagcgctggcatgggtcatgacatctaccaggtgccgccttctatggacactaggtcctgggaaggaaccaagcctccagctaaagtagttgtacccaccagggtaggccagggttatgtgtatgaggccgctcagcccgagcaggacgaatatgacatcccccgacacctactcgccccaggcccacaagacatttacgatgtgccgcctgtacggggactgctacccagtcaatatggacaggaagtgtacgatacccccccaatggctgtgaagggtcctaatggcagagacccactcctggaggtttacgacgttccgccaagtgtggagaaaggtttgccaccctccaaccatcatgccgtttacgacgtgccgccatcggtatccaaggatgttccagacggtccactgctgagggaagagacatatgacgtgccaccagcatttgccaaggcaaaaccatttgaccccgcaaggactcctctggtcttggctgcaccgcctcccgatagcccacctgcggaggacgtgtatgacgtccccccacccgcaccagacctctatgacgtgccgcctggcttgcgacggcctggccctggtaccctctacgacgtgccacgtgagagggttctgccacctgaagtagccgatggaggagtcgttgactctggagtttatgccgtgcctccaccagctgagagggaggcacccgctgaagggaagcgcttgagcgccagttcaactgggtcaacacgttcctcacagtcagcctctagtctggaagtggccggaccgggtcgggagcctcttgagcttgaggtagctgtagaagcccttgcccgactgcagcagggcgttagcgctaccgtggcccatctgctggacctggccggaagcgcaggggctaccggtagctggcgaagcccgagcgagccacaggaacccctggtccaagacctgcaggctgcagtggcagcagtgcagtccgcagtccatgagttactggagtttgcacggtcagccgtcggcaacgccgctcacacatctgaccgtgcattgcatgcaaagctgagtcgtcagctgcaaaaaatggaggacgtgcaccaaaccctggtcgcccacgggcaagcactggatgcaggtcgtggtggctcgggtgcaaccctcgaggatctggatcgtctcgtcgcatgtagcagggctgtacccgaagacgccaaacagctggcgtccttcctgcacgggaatgcaagcctgctgtttaggaggactaaggccacagcgccaggccctgagggtgggggaactttgcatccaaaccctaccgacaagactagcagtattcaatccaggccactgcccagccctccaaagttcacgtcccaggactcaccagacggccagtacgagaatagtgagggagggtggatggaagactacgactatgtacatttacaggggaaggaggagtttgagaaaacgcaaaaggagctgcttgaaaagggttctattactcgacagggcaaatcccaactggagctccagcaacttaagcagttcgagagacttgagcaagaggtcagcaggccaatcgaccacgatctagccaactggaccccagcgcagccgctggcacctggaaggaccggcggactgggacctagtgacaggcaactactgctattttatctggagcagtgtgaggcgaacctgacgacgttgaccaatgccgttgacgcctttttcaccgccgtcgccaccaaccagccaccaaaaatattcgtggcacattccaaatttgtgatcctgagtgcacacaaattggtatttattggagatactctcagccgtcaggcaaaggccgctgatgtgcgctcacaggtgacccactacagtaacctattgtgcgaccttctgaggggcatagtggcgactactaaggccgctgccctacagtatccttcaccgtccgcggcacaggatatggtggaacgtgtgaaagagcttggtcattcaacgcagcaattcagaagggtcctgggccaactagcagctgcatag

SEQ ID NO: 27601 - DNA, 2607 bp, synthetic construct
  misc_feature 1..2607: note = Description of Artificial Sequence: Synthetic coding sequence
  source 1..2607: mol_type = other DNA
atggagaacgttcttgccaaggccctctacgacaacgtggcagagtcaccagatgagctctcttttagaaaaggggacatcatgaccgtactcgaacaggatacgcaagggctggatggatggtggctatgcagtttgcacgggagacaggggatcgtaccaggcaaccgcctgaaaattctggtgggaatgtacgataaaaaaccagccggtccaggtccgggacctccggctactcctgcgcagccacagccaggcctgcacgctcctgcacctcccgcaagtcagtataccccgatgcttccaaacacttaccagccccagcctgactctgtctatcttgtgccaactccatcaaaagcccagcaggggctgtaccaggtgcccggtccctctcctcaattccaatccccgcctgcaaaacaaacaagcacatttagcaagcagactccccatcacccatttccatcaccagccactgatctgtaccaggttccgcctggtccaggtggcccagctcaggacatttaccaggtgccaccatctgctggtatggggcacgacatctatcaggtgcctccaagcatggacacgaggagctgggaggggactaagccacccgcaaaagtagtggtacctacgcgagtggggcaaggctacgtgtatgaggccgctcagcctgagcaagacgagtacgacatacctaggcacctgttagcacctggtccccaggatatctacgacgtccctcccgtaaggggcctgttacccagccagtatggtcaagaggtgtacgacacaccacctatggccgtcaagggcccaaacggcagggatccactgctggaggtgtacgatgtcccgccttccgtggagaagggattgccgccatcaaaccatcatgcagtttatgacgtgcctccatcagtgtccaaggacgtacccgacggaccacttttgcgagaggagacatatgatgttccacccgcatttgccaaagccaagcctttcgaccccgctcgtacgcctctcgtgctagctgctcctccccctgatagcccacccgctgaggatgtgtatgatgtccctccacccgctccagacctttatgatgtccctccaggcctgaggaggccaggacccggaactttatatgatgtcccgagggagcgggtgctgccaccagaggtagccgacggcggagtcgtcgatagcggcgtttatgccgttccgcctcccgctgagcgcgaagccccagctgagggaaaacggctgagtgcctcctctactgggtctactcggagtagtcagtctgcaagcagtctggaagttgccggtccagggagggaaccgttggagctggaagtcgctgtcgaagccctcgcacgcctgcagcagggagtcagtgcaaccgttgcccacctcctggaccttgccggttccgcaggagcaacgggatcatggcgaagcccctccgagccacaggagcctttagttcaagatctccaagccgcagtcgccgcagtgcagtctgctgtgcatgagctcctggagttcgcacgctcggctgtcggaaacgcagcccacacatctgacagagccctgcacgctaagctctctagacagctgcagaaaatggaagatgtccaccagacactcgttgcccacgggcaagctcttgacgccggacggggaggatctggagctaccctcgaggatctggataggttagtggcctgttcgcgagccgtccccgaagatgcaaagcagctggcttcattcctacatggcaatgcctccctgctgttccgaaggactaaagcaaccgccccagggcctgagggtggcggtactctccacccaaaccctaccgacaagacgtccagcatccagtccaggcccctgccctcgccgcctaagttcaccagccaggactccccagatggtcagtacgagaactctgagggcggttggatggaggactacgattacgttcacctgcaggggaaagaagagttcgagaagactcagaaagaacttcttgagaagggctcaatcacaagacaggggaagtcccagttggagctgcagcagctgaagcagtttgagcggcttgaacaggaggtgtcgagacctattgatcatgacctggcaaattggacccccgcacagccgttggctccgggaagaactggaggactcggcccaagtgacaggcaactactgctgttctacctggagcagtgcgaagcgaaccttacgactttaacgaacgctgtagacgcattcttcactgccgtcgctacaaaccagccaccaaaaattttcgttgctcatagcaaatttgtgatcctgagcgcccataagctcgtgttcattggagacacgctcagtagacaagcgaaggctgccgatgtgcgcagtcaggttacccactatagcaatctcctgtgtgatctgttacgcggaatcgttgctaccactaaagcagctgccctccagtatccatctccttcagccgcacaggacatggtcgaaagagtgaaggaattgggtcattccacccagcagtttaggagagtgcttggacagctggccgctgcatag

SEQ ID NO: 27602 - DNA, 2526 bp, synthetic construct
  misc_feature 1..2526: note = Description of Artificial Sequence: Synthetic coding sequence
  source 1..2526: mol_type = other DNA
atgaccgtcctggaacaggacactcagggtttggatggctggtggttatgctcgcttcatggtcgccaaggaattgtcccgggtaacaggttaaagatcctcgttgggatgtatgataagaaaccggcaggcccaggccctggtccaccagccacccctgcacagcctcagcccggattacatgcccctgcaccacctgcgtctcagtatacgcctatgctacccaacacctatcaaccgcagcccgattccgtgtatctggtccccactccgtccaaggcccagcaaggactctatcaggttccaggacccagtccccagttccagtcacccccagctaagcagactagtacattctccaaacagactccgcaccatccatttcccagccccgctaccgacctgtatcaggtgcctccaggtcctggcggacccgcacaggacatataccaggtgcctccctccgctggcatggggcacgatatctatcaggtgccacccagcatggatacccgcagctgggagggcaccaagcctcctgccaaagtggtggttccaaccagagtggggcagggttacgtttacgaagccgctcagccggagcaagacgagtatgatattcctagacatttgcttgcaccgggacctcaggatatctatgatgtgcccccagttcggggactgttgccaagccagtatggacaggaagtttatgacactccaccgatggcagtgaaagggccaaatgggagggaccccctgctcgaggtgtacgacgtgcctccatcagtcgagaaggggctccccccttcaaaccaccacgctgtctacgatgtgcctccgtccgtcagtaaggacgtgccagacggacctttgctgcgcgaagaaacgtacgatgtccccccagcttttgcaaaggcaaagcctttcgaccccgcacgtacccctctggtcctagcggctccgcctcctgattctccaccagcagaggacgtgtatgatgtgccacctccagcccctgacctgtacgacgtgccgccagggttgcgtcggccaggccctgggactctgtacgacgttcccagggaaagagttctgcctccggaagtggcagacggcggagtcgtggactcaggtgtgtacgctgtgccaccaccagcagaacgagaagctcctgccgaagggaaaaggttgtccgcgtcttccacggggtccacacgcagctctcagagcgccagtagcctcgaggttgccggtcctgggcgtgagcctctcgagctcgaagtggccgtggaagcactagctcgcctgcaacagggcgtctccgctacggtggcccacttgctggacttagccggaagcgccggagccacaggcagttggcgtagcccctccgagccccaagaacccttggtccaagatttgcaagcagcagtcgcggctgtgcagtctgctgtccatgagctcctcgagtttgcaaggagcgctgtggggaatgccgctcacacaagtgatcgagcccttcacgccaagctgtcaagacaactgcaaaagatggaggacgtacaccagactctcgtggctcacgggcaggcactggacgccggtcgcggaggaagtggggctactctggaggacctggatcgcctggtcgcttgcagccgggctgtcccggaggatgccaaacagctggcttctttcctgcatgggaacgcgtctttactgttcaggagaactaaggcaacagcaccaggccctgagggcggagggaccctgcaccctaatccgacggataagactagctctatccagagtagacctctgcctagcccacctaagttcacctcccaggattcacccgacgggcaatatgaaaattcagagggcggatggatggaggattatgactacgtccatctacaggggaaggaggagttcgaaaaaacacagaaggagctgctagagaaagggagcataaccagacaaggcaagagccaacttgaactgcaacagctcaagcagttcgagagactagaacaggaagtctcaaggccaattgatcacgatctggcaaattggacgcccgcacagcccctggcccctggcagaaccggcggtctgggcccttccgacagacagttattattgttttacctggagcaatgtgaggctaatctgacaaccctcaccaacgccgtggacgcctttttcactgccgtggctacaaaccagccccctaaaatcttcgtggcccattctaagttcgtgatcctctctgctcacaagctagtgtttatcggtgacacactgagtcggcaggcaaaagctgctgatgtacgctctcaggtcactcactactcaaatctgctgtgtgatttactaagaggtatcgtggcaacgactaaggcggctgccctccagtacccaagtccctcggctgctcaagacatggtagagcgggtaaaagaactggggcatagcacccagcagttccggagagtgctaggacagctcgctgccgcttag

SEQ ID NO: 27603 - DNA, 741 bp, synthetic construct
  misc_feature 1..741: note = Description of Artificial Sequence: Synthetic coding sequence
  source 1..741: mol_type = other DNA
atgccagtgcaacccccatccaaggataccgaggaaatggaggctgagggcgatagcgcagctgaaatgaacggggaggaagaagagtccgaggaggagcgaagtgggagccagacagagtccgaagaagaaagttctgagatggacgatgaagactacgaacggagacggtccgagtgtgtgtctgaaatgctggatctggagaaacagttctctgaattaaaggaaaagcttttccgtgagcgcttaagccagcttcgcttaaggttggaggaagtgggcgcagagagagcgccagagtataccgaaccactgggaggccttcagagaagcctgaaaatccgaatacaggtcgcagggatctacaagggattctgcctggacgtgatccggaataagtacgagtgcgagttgcaaggcgcaaagcagcatcttgagagcgagaagttgctgctatacgacactctacagggagagctacaggagagaatccagaggctcgaggaagatcgacagtcactggacctatcctctgagtggtgggacgacaaacttcacgcacggggatcctcacgcagctgggatagcctgcctccgtctaagaggaaaaaagccccactggtttctgggccttacatagtttatatgctgcaggagattgatatactggaggactggacagctattaaaaaggctcgcgctgccgttagtccccagaagcgaaagtctgacggaccatag

SEQ ID NO: 27604 - DNA, 873 bp, synthetic construct
  misc_feature 1..873: note = Description of Artificial Sequence: Synthetic coding sequence
  source 1..873: mol_type = other DNA
atgcctgttcaaccgccaagcaaggacactgaggaaatggaggctgagggtgactcagccgcagaaatgaatggtgaggaggaggaatcagaagaagaacgctccggaagccaaacagaatcggaagaggagtcctctgagatggacgatgaagattatgaacggcgtcgctccgagtgcgtctcggaaatgctcgacctggaaaagcagttttcagagctcaaggaaaaattatttcgcgagcggttgagccaactcaggctgcgcctcgaagaagtgggcgcagaacgcgctcctgagtacacagagccactcggcggtctgcaaagaagcctgaagattagaatccaggtggccggaatctacaaaggcttttgccttgatgttattaggaataagtatgaatgtgaactccagggcgctaagcagcatttagaatccgagaagctgctgctttatgacaccctgcaaggcgaactgcaggagcgcattcaacgcctggaagaggaccggcagtccctagatcttagcagcgagtggtgggatgataagctccatgcacgcggaagctctcgttcatgggattccctgccacccagcaagcggaaaaaagctccactcgtgagtggaccctacattgtttatatgctgcaggagatagatattttggaagattggacagctatcaagaaggcccgagccgctgtgtctcctcaaaagcgcaagtcggatgacaggcgaacacaccgcccactgagggtgtgcccagctagactcctctggtgctgctgggcgctcccactgcatcttgccctggcctggactccccctctgccatcaagtaggccagctcagctttggccctggtcatag

SEQ ID NO: 27605 - DNA, 735 bp, synthetic construct
  misc_feature 1..735: note = Description of Artificial Sequence: Synthetic coding sequence
  source 1..735: mol_type = other DNA
atgccagtgcagcctccatccaaggataccgaggagatggaggccgaaggggactctgccgctgagatgaacggcgaggaggaagaaagcgaagaggagaggagcggatcccagaccgaatccgaggaggagtcgagtgagatggatgacgaggattatgaaaggaggcgatcagaatgtgtgtcagaaatgttagatttagaaaagcagttttccgagctaaaggagaaactttttcgagagcgcttgagccagctcaggctcaggctggaagaggttggagcggagagagcgccagagtataccgagccacttggtggattgcagcggtcgttaaaaatccgaatacaagtcgcaggcatctacaaagggttttgtttggatgttattagaaacaagtatgaatgtgagctgcagggtgctaaacagcatctggagagtgagaaactgctcctgtacgatacccttcagggagaactccaggaacgaattcagagactcgaagaggaccgccaatcattggacctgagctcagagtggtgggatgacaagttgcacgctcgcggatcctcgaggagttgggatagtctgccgccaagtaagcgtaaaaaggcgcctctagtttctggcccatatatcgtatacatgctgcaggaaatcgatatcttggaagactggactgccataaaaaaagcgagggcggcagtgtccccacagaaacggaagagcgactag

SEQ ID NO: 27606 - DNA, 1494 bp, synthetic construct
  misc_feature 1..1494: note = Description of Artificial Sequence: Synthetic coding sequence
  source 1..1494: mol_type = other DNA
atggccgagatgggctcgaagggcgttaccgcaggaaaaatcgcgtcaaacgttcagaagaaactgactagagcacaagagaaagtcctacagaagcttggcaaagccgacgaaacaaaggacgagcagtttgaacaatgtgttcagaacttcaacaaacagctcaccgaaggaaccaggctacaaaaggacctcaggacatatttagccagcgttaaagcaatgcacgaggccagcaaaaaattgaacgagtgcctgcaggaagtgtatgaacccgactggcctggccgtgatgaagccaataagatcgcggaaaataatgatttgctgtggatggattatcatcagaaattggtggaccaggccctactgacgatggacacttacttgggacagtttcccgacattaagtctcgcatcgcaaaacgaggaagaaaactagtggattacgattccgctcggcatcactacgaaagcctgcagaccgccaagaagaaggatgaggccaaaatagcgaaagcggaagaagaactcatcaaggctcagaaggtatttgaggagatgaacgtggacctccaggaagagcttcccagcctgtggaattcacgcgtgggcttctacgtcaacacttttcagtcgatcgctggactggaggagaactttcataaagaaatgtctaaactgaaccagaatctcaatgatgtgctggttgggctcgagaaacagcatggctcaaatacattcaccgtaaaggcgcagcccaggaagaaaagcaagctgttctcccgcctgcgtagaaagaagaattcagataacgctcccgcaaaagggaataagtctcccagccctcccgatgggtccccagcagctaccccagagatccgcgtgaatcatgagcctgagcctgccggtggcgctacacctggcgcaaccctccccaagtcaccgagtcagctccggaagggacccccagtgccccctcccccaaaacacacaccaagcaaggaggtgaaacaggagcaaatcttaagcctgtttgaggacactttcgtccccgagatcagtgtgactacaccctcacagcccgctgaagccagtgaggtggccggtggtactcagcctgccgctggagcacaggagcctggtgagacggccgcatcggaagctgccagcagcagcctgcctgccgtggttgtcgaaaccttccccgctactgttaacgggaccgtggagggcggtagtggggctgggaggctggatcttccccctggcttcatgtttaaagtacaggctcagcacgactataccgcaactgacacggatgagttacagctgaaagcaggagacgtggtgctagttatcccctttcaaaaccccgaggagcaagacgagggttggctcatgggcgtgaaggagtccgactggaaccagcataaagaactagaaaagtgcaggggggtatttcccgagaatttcactgagcgggtgccctag

SEQ ID NO: 27607 - DNA, 1782 bp, synthetic construct
  misc_feature 1..1782: note = Description of Artificial Sequence: Synthetic coding sequence
  source 1..1782: mol_type = other DNA
atggcagaaatgggctccaagggagtgactgctggcaagatcgcaagtaatgtgcagaagaaacttacccgcgcacaggaaaaggtcctacagaaactgggaaaagctgatgagaccaaagacgaacagtttgagcagtgcgtccagaacttcaataagcagctgactgaaggaactaggttgcagaaagaccttaggacctacctggcgagcgtgaaggctatgcatgaggcaagtaaaaaactcaacgagtgccttcaggaagtttacgagcctgactggcccggacgtgatgaggcgaataaaatcgccgaaaataatgatcttctgtggatggattatcatcagaaacttgtggaccaggccctcctgacaatggacacttatctcggccagttccccgacatcaaatcccggattgccaagcgcggtaggaagctcgtggattatgactccgctaggcatcattacgagtccctccagacagcaaaaaaaaaggatgaagccaagattgcgaagcctgtgagtctgcttgagaaagcggcaccccagtggtgtcagggaaaactacaggcacacttggtcgctcagactaatctgttgcggaaccaggcggaagaggagctgatcaaagcccagaaagtttttgaggagatgaacgtagatctacaggaagaacttcctagtttatggaacagtagagttggcttctacgtcaatacatttcagtcgatcgctgggctggaggaaaattttcacaaagagatgtccaagttgaatcaaaacttgaacgatgtgctggtgggactcgaaaaacagcatgggagtaatacctttaccgtgaaagcacagccgtccgacaatgctccagcgaaagggaataaaagcccctctccccctgacggaagccccgctgcgaccccagaaatcagagtgaatcacgaacccgaaccggcaggtggagccactcctggagcgaccctgcctaaatcaccttctcagctaaggaagggaccccctgttcctccaccacctaaacacacccccagcaaggaagtcaagcaagaacaaatcttatctctgtttgaggatacattcgtaccggaaattagtgtgactactccctctcagttcgaggcacccggaccgttttccgagcaggccagtctgctggatctggacttcgaccccctcccaccagtgaccagtcccgtgaaggctccgaccccctcaggccagagcattccctgggatctgtgggaacctacagagtcccccgctggatccctaccttccggtgagccaagcgctgccgaaggaaccttcgcagtctcctggcctagccagacggctgagcccggtccagcccagccggctgaggcttctgaggtggctggcggaacacaacccgctgccggtgctcaagagcctggggaaacagccgcttccgaggcagctagttcctccttgcctgccgtcgtggtcgagacctttcctgccactgttaacggcactgtcgagggcggatccggggctggcagattggatcttccccctggctttatgtttaaggtgcaggcccagcatgactatacggccacagacacggatgaacttcaattaaaagccggagatgtcgtcctggtgattccattccagaatccagaggagcaggatgagggttggttaatgggagtcaaggaaagcgactggaatcagcacaaggagctggagaagtgtcgcggagtttttccagagaattttaccgaacgggtgccatag

SEQ ID NO: 27608 - DNA, 1557 bp, synthetic construct
  misc_feature 1..1557: note = Description of Artificial Sequence: Synthetic coding sequence
  source 1..1557: mol_type = other DNA
atggccgaaatggggtccaaaggcgtgacagcaggcaagattgccagtaatgtgcaaaaaaagctgactagggcacaggagaaagtactgcaaaagctgggcaaagccgatgaaaccaaagacgagcagttcgagcagtgcgttcaaaacttcaacaagcagctgaccgagggaaccaggctccagaaggatcttcgtacataccttgcctccgtgaaggccatgcacgaggctagcaaaaaactcaatgaatgtctgcaggaggtctacgagcctgactggcctgggcgtgatgaagccaataagattgctgagaataacgaccttctgtggatggactaccaccagaaattggtcgatcaggccttacttacaatggacacttatctcggacagtttcccgatatcaaaagtcgcatcgccaagagaggcagaaagctggtcgattatgattctgctaggcaccattatgaaagtctgcagacagcgaagaagaaggatgaagctaaaattgctaaagcagaggaagaacttatcaaagcccagaaagtcttcgaggaaatgaatgtggatctgcaggaggagttgccctctttatggaattccagggttggattctacgtcaacaccttccagtctatcgctggactggaggagaactttcataaagagatgagcaaactgaatcagaacctcaacgatgtgctggtcggccttgaaaaacagcacggaagcaacacctttaccgttaaagcccagccatccgacaatgctcccgctaagggtaacaagtccccctccccccctgacggaagtcctgctgcaacaccagagatccgcgtgaatcatgaaccagagcctgcagggggagccacacctggagcaaccttaccaaaaagcccctctcagctgcggaaggggcctcctgttcctccaccacctaagcatacccctagcaaggaggttaagcaggagcaaattttgagcctgtttgaggatacgtttgtgcctgagatatctgttaccaccccatcacagcccacggaatcaccagcagggtctctcccctcaggggaaccttcggcagcagagggaacctttgccgtatcctggccctctcagacagctgaacctgggccagcccagcccgcagaggccagcgaggtcgccggtggaactcagcctgctgcaggggctcaggagcccggagagactgccgcatctgaagctgcctcatccagtcttcccgcagtcgtagtggagaccttccctgctacagtcaacggaaccgtggaaggcggatccggcgctggtagactggaccttccccctggctttatgtttaaggtccaggcacaacatgactacacagccactgacaccgacgaactccagctgaaggcaggcgatgtggtgttagtgattcctttccaaaacccagaggaacaagacgaaggctggctgatgggcgtcaaggagagtgactggaaccagcacaaggagctggaaaagtgcagaggagtcttccccgagaacttcaccgagcgggtgccttag

SEQ ID NO: 27609 - DNA, 1230 bp, synthetic construct
  misc_feature 1..1230: note = Description of Artificial Sequence: Synthetic coding sequence
  source 1..1230: mol_type = other DNA
atggcggagatgggcagcaagggggtgaccgcaggcaaaatcgccagtaatgtgcagaaaaagctgacgcgcgctcaggaaaaggttctacagaaattaggtaaagctgatgaaacaaaggacgagcagtttgagcaatgtgttcaaaacttcaacaagcagttgaccgaaggcacccgactgcagaaggatttgcgtacttatctggctagcgtaaaggcgatgcatgaagcctcaaaaaagttgaacgagtgcctgcaggaggtgtacgaacctgattggcccggaagggacgaggcaaacaaaatagctgaaaacaatgatctgttatggatggactaccatcagaagctggtggaccaggcactactaacaatggacacttacttaggtcagttccctgacatcaagtcgcgcattgccaaacgaggcaggaagctggttgattatgattctgcccgacatcactacgaaagtctgcagacagctaaaaaaaaggacgaggccaaaatcgctaaagccgaggaagagcttattaaggcccagaaagtttttgaggaaatgaatgtggaccttcaggaagaactcccttccctgtggaatagccgggtcgggttctacgtgaacactttccaatccatcgccggtctcgaggagaattttcacaaggaaatgtcaaagctgaaccagaaccttaatgatgtgttagtcggattagagaaacagcacggatctaatacctttaccgtcaaggcacagccatccgataatgctcccgctaaaggaaataagtcacctagcccaccagacggcagccccgctgccaccccagaaatccgagtcaaccatgaacccgaaccagcaggtggagctactcctggcgcaacgctgccaaagtcgccctctcagagctccctacccgcagtcgtagtggagacattcccagccactgtgaatggtaccgtggagggcggaagcggtgcaggcaggctcgacctgccccctggttttatgtttaaggttcaggcgcagcatgattacacagctacagatacagacgaattgcagttaaaagccggagatgtggtcctagtgatcccctttcagaatcctgaagagcaggacgagggatggctgatgggcgtcaaggagagtgactggaatcagcacaaagagttggaaaagtgtagaggcgtattccctgagaactttactgagagagtgccatag

SEQ ID NO: 27610 - DNA, 1521 bp, synthetic construct
  misc_feature 1..1521: note = Description of Artificial Sequence: Synthetic coding sequence
  source 1..1521: mol_type = other DNA
atggccgaaatgggatccaagggtgtcaccgccggaaagatcgccagtaacgtgcagaaaaaactgaccagggcgcaggagaaagttctgcagaagttgggaaaggctgacgagaccaaggatgaacaattcgagcaatgcgtgcagaattttaacaagcaacttactgaagggactcgcctacagaaagatctccgtacttatctggcctccgtgaaagctatgcatgaagcttctaagaagttgaatgaatgcctgcaggaagtctatgagccagactggcctgggagggacgaagcgaacaagattgcggagaataatgatcttttgtggatggattaccaccaaaaactggtggatcaggctctcttgaccatggacacctacttgggccagttcccagacatcaaatccagaattgccaagaggggtcgcaagcttgtggactatgacagcgcacgtcaccattatgagtctctgcaaacggcgaagaagaaagacgaggctaagattgccaagccagtgtccctccttgagaaagccgctccacagtggtgccagggaaaactccaggcccatcttgtcgcccagaccaacttactcaggaaccaggctgaggaggaactgatcaaagcacagaaggtcttcgaagagatgaatgtcgatcttcaggaagaactcccctcactgtggaacagtcgggtgggcttttatgtgaatacctttcagagcattgctggcctggaagagaactttcacaaagaaatgtctaaactgaaccaaaatctcaacgacgttctggtaggactggagaaacagcacgggtccaatacgtttaccgttaaggctcaaccatctgacaatgcccctgctaaggggaacaagtcaccctccccgcctgacggcagcccagcagccacccctgaaatccgagtgaaccatgagccagaacccgctggcggagccaccccaggtgcaaccctgcccaaatcaccaagccaacccacggaatcaccagctgggagtttgcccagtggcgagccttcagctgcagaggggacattcgcagtgtcatggccaagccagacagctgagcccggtccagctcagccagctgaggcatctgaggtggccggaggtacacagccagccgctggggctcaagaacccggagagactgccgcaagcgaagctgcatcaagctctctcccagcggtcgttgttgaaactttcccggcaacggtgaacgggaccgtggagggcggatccggagccggacgactggatcttccgcctggattcatgttcaaagttcaggcccagcatgactatactgccaccgatacagacgagttgcagctgaaagctggggacgtggtcctggtgataccttttcagaatcccgaagaacaagacgaaggatggctcatgggagttaaagagagcgactggaaccagcataaggagctcgagaagtgtcgcggtgtttttccagaaaattttaccgaacgggtgccttag

SEQ ID NO: 27611 - DNA, 1365 bp, synthetic construct
  misc_feature 1..1365: note = Description of Artificial Sequence: Synthetic coding sequence
  source 1..1365: mol_type = other DNA
atggcagaaatggggtcgaagggcgtcactgctggaaagatagccagcaatgtccagaagaaactaacacgggctcaggagaaggttctgcagaaactcgggaaggctgacgaaactaaagacgagcaattcgagcagtgcgttcagaactttaataagcagctgacagaaggtactcgcctccagaaggacctgagaacttacctggcctccgtcaaagctatgcacgaggcgtcaaaaaagcttaacgagtgtctgcaggaagtgtatgagcctgactggccaggaagggacgaggcaaataagattgcagaaaataatgaccttctttggatggattaccaccagaaactggtggatcaggccctgctcacaatggacacatatctgggtcaattccctgacattaagagcagaatcgctaagcgtggccgtaagctcgtggattacgatagcgcaaggcaccactacgagtctctgcagacagccaagaagaaggatgaggccaagatagctaaagccgaggaggagcttattaaggcgcaaaaagtgttcgaagaaatgaacgtcgatttgcaggaagagctgccgtccctatggaacagtcgcgtaggtttttacgttaacacatttcagagtatcgcagggttggaggagaacttccacaaggagatgtctaagctcaaccagaatttaaacgatgtgctggtaggcttagagaaacagcacggcagcaatacattcacggtgaaggcccagccacggaagaaatctaagctgttttccagactgcggagaaaaaaaaacagtgataacgctcctgcaaaagggaacaagtcgccctcccctcctgacggctcgccagccgcaacccccgagatccgcgttaatcatgagcccgagccagcgggaggagccacccctggggcaaccctccccaaatcaccatcccagccagctgaggcatctgaagtggcgggaggaacacagcccgctgccggtgcccaggaacctggagaaacagcagcttccgaagccgcatccagctctctcccggcagtagttgttgaaacctttccagcaactgtgaatgggacagtggagggtggctccggggcaggtcgcctagacctgcctcccggattcatgttcaaagtccaggctcaacatgattacactgctacggacaccgatgagctgcagcttaaggcgggagacgtggttctggttatcccatttcagaaccctgaagagcaagacgaaggatggctgatgggagtcaaggagtccgactggaatcagcataaagagttagaaaaatgccgcggtgtcttccctgagaattttaccgaaagagtcccttag

SEQ ID NO: 27612 - DNA, 1653 bp, synthetic construct
  misc_feature 1..1653: note = Description of Artificial Sequence: Synthetic coding sequence
  source 1..1653: mol_type = other DNA
atggcagagatgggctctaagggtgtgaccgctggcaagattgcaagcaacgtgcaaaagaaactgacacgtgctcaggagaaggtattacaaaaattgggtaaagctgacgaaactaaggacgagcagtttgagcagtgtgtgcaaaacttcaataagcagctgactgagggcactcggttacagaaggacctgaggacttacctggcctccgtgaaagcgatgcatgaggcaagcaagaagctgaacgagtgtctgcaggaagtctacgagccagattggcccggtagggacgaggcaaataaaatcgccgaaaataatgatctgttatggatggattaccaccagaagttggtggaccaggccctgctgactatggacacgtacctgggccaatttcctgatattaaaagtaggattgctaagagaggcaggaagcttgtcgattatgactcagctcggcaccactacgagtcattacagaccgcaaagaagaaagacgaggcgaaaatcgcaaagcccgtaagtctgttggaaaaagctgcccctcagtggtgccagggaaaattgcaggctcacctcgtagcccagacaaatctgttgagaaatcaggctgaggaagagctgatcaaggcacaaaaggtgttcgaagagatgaacgtggatcttcaggaggaactgccatccctctggaattctcgggtaggattttacgttaatacctttcagtctatcgcgggactggaggaaaatttccacaaggaaatgagtaaattaaaccagaatcttaacgatgttctcgtgggccttgagaaacaacacggttctaacaccttcacagtgaaggctcaaccgagcgacaatgcacctgcaaaggggaataaaagtccctcaccgccagatggttctccagccgcaacgccagagatccgtgttaatcatgagcctgagcccgcagggggtgctactccaggggcaacactacctaagtcccctagccagttcgaagcgccaggacccttctctgagcaggcaagcctgctagacttagactttgatccactgccccctgtgacgtcaccggtgaaagcccctacaccttccggacagtcgatcccctgggacctctgggaacctaccgagtcaccagccggaagcttgccgagtggggagccttccgctgctgaggggacctttgcggtatcctggcctagtcagaccgccgaaccgggtcccgcacaaccggctgaagctagtgaagttgctggcggtactcagccagcagccggagcacaggaaccaggagagaccgccgctagtgaggccgcatcatcttccttgcccgctgtcgtagtcgagactttcccagctaccgtcaatggaacggtggagggagggtcaggtgccggaagacttgacctgccccctgggttcatgtttaaagtccaggctcagcacgactacaccgccacagacacggacgaattgcagctgaaggcgggtgacgtagtcctggtgatacctttccagaatccggaggagcaggatgaggggtggttgatgggcgtcaaagaaagcgattggaatcagcacaaggagctcgagaaatgccgtggcgtgtttccagagaactttactgaaagagtcccctag

SEQ ID NO: 27613 - DNA, 1449 bp, synthetic construct
  misc_feature 1..1449: note = Description of Artificial Sequence: Synthetic coding sequence
  source 1..1449: mol_type = other DNA
atggctgagatgggatcaaaaggcgtaacagctgggaagatcgcctcaaatgtacagaagaagctgactcgggctcaggaaaaggtgctgcaaaaactgggaaaggccgatgaaactaaagacgaacagttcgagcagtgcgtccaaaacttcaacaaacagctgactgaaggcacccgccttcaaaaggacctgaggacctaccttgctagtgtgaaggccatgcatgaagcatccaagaagctgaatgaatgtctgcaggaagtctacgaaccagattggccgggaagagacgaagcaaataagatagccgaaaataacgatttgctgtggatggactatcaccagaagttagtagatcaggctttgcttacaatggatacttacctgggccagtttcccgatatcaagtccagaatcgccaagaggggtaggaaactggtggactatgacagcgcaagacaccattatgaatctctgcagactgctaaaaaaaaggatgaagcaaaaatcgctaaggctgaggaggagctcattaaggcccaaaaggtgtttgaagagatgaatgtggacctgcaagaagaactacccagtctgtggaattcccgcgtggggttttatgtgaataccttccagtcaatcgccggtctcgaagagaacttccacaaagagatgtctaaactgaatcagaacttgaatgatgtgctcgtgggcctggaaaaacagcatggatcaaatacctttacggttaaagcgcagcctagcgataacgcccctgccaagggaaataaatctccgagtccgcctgacggctcacccgcagctacgcctgaaatacgcgtgaatcatgagccagagcccgctggcggtgcaaccccaggtgccacattacccaagtctccgagccagttacgtaaaggtccgccagttcctccaccgccaaagcacaccccttccaaagaagtgaagcaggaacagattctgtctctttttgaggatacatttgtccccgaaattagtgtcacaaccccttcccaaccggcagaagcctcagaggtggcgggaggcacccaacctgccgcaggggcacaggagcctggggaaacagctgcgagtgaggccgcatcatctagccttcccgcagtcgtggtcgaaacttttcccgcaacagtcaatgggactgtcgaggggggaagcggcgctgggcgactggacttgccgcctggcttcatgttcaaggtacaggctcaacacgattataccgccactgacaccgatgagctgcaactcaaggccggagacgtagtccttgtgattccattccagaaccctgaggaacaggacgagggatggctgatgggagtgaaggaatctgactggaatcagcataaagagttggaaaaatgtcggggtgtgttcccggagaatttcaccgaacgcgttccatag

SEQ ID NO: 27614 - DNA, 1428 bp, synthetic construct
  misc_feature 1..1428: note = Description of Artificial Sequence: Synthetic coding sequence
  source 1..1428: mol_type = other DNA
atggccgagatgggctctaagggggtcacagccggaaaaattgctagcaatgtgcaaaagaaactgacccgcgctcaggagaaggttttgcaaaaactgggtaaagcggacgagactaaggatgagcagtttgagcaatgcgtacaaaacttcaataaacagctcaccgaaggcacccggcttcaaaaggatctgcggacctatctcgctagtgtcaaggcgatgcatgaggctagcaaaaagctgaacgaatgtctgcaggaggtgtatgagcccgactggcctggtagagacgaggccaacaagatcgccgaaaataacgatttactctggatggattaccaccagaagcttgtggaccaggccctcctgacaatggatacatatctgggccagttcccagatattaaatcacgcatcgcgaaaaggggtcggaagctcgttgactacgacagtgccagacatcactatgaatcattgcagaccgcgaaaaaaaaggacgaggctaaaatcgctaaagcagaagaggaactcatcaaagcgcaaaaggtgtttgaggaaatgaacgtggatctacaagaggaattgccttccttgtggaatagcagggtggggttctatgtaaataccttccagtccatcgcgggtcttgaggaaaattttcacaaggaaatgtcaaaacttaatcagaatcttaacgatgtcttagtggggctcgagaagcaacacggtagcaacaccttcacagttaaggctcaaccgtctgataacgcaccagctaagggcaataagagtccctcgccgcctgatggatcgccggcagccacacccgaaattcgggttaatcacgagcctgaacctgccggaggtgcaacccctggagccactcttcccaagtccccctcacagccaaccgagtcgccagccggtagcctaccaagtggcgaaccttccgctgccgaggggacatttgcagtgagctggcccagccagacagcagaacctggccctgcccaacctgctgaggctagtgaggtggccggagggactcagcctgctgccggagcgcaggagcctggggagacagcagcttccgaggctgcgagcagctctctgccagcagtagtggtcgagacgttccctgccaccgtgaatggaacagttgaaggtggtagcggggctggcagactggacctcccaccaggtttcatgttcaaggttcaggcccagcacgactatacggccaccgacacagatgaattacagttgaaggcgggtgacgtggtgctcgtgataccatttcaaaatccagaagagcaggatgagggatggctcatgggagtgaaggaaagtgactggaatcagcataaggaattggaaaagtgccggggagtctttccagagaactttacagagcgcgtgccctag

SEQ ID NO: 27615 - DNA, 1320 bp, synthetic construct
  misc_feature 1..1320: note = Description of Artificial Sequence: Synthetic coding sequence
  source 1..1320: mol_type = other DNA
atggccgagatggggagcaaaggcgtaacagctgggaagattgcttctaacgttcagaaaaagcttaccagggcccaagaaaaagtactacagaaactaggaaaggccgatgagacaaaagacgaacaattcgaacagtgcgtacaaaatttcaacaaacagctgacagagggtacacggctccagaaggatctgcggacatatctcgccagtgtgaaggcaatgcacgaagcctcaaagaagttgaacgagtgcctgcaggaggtgtacgagcctgactggcccggtcgtgatgaagcaaataaaatagcagaaaataatgacctgctgtggatggattatcaccagaagctggtagaccaagcgctactgacaatggacacatacttggggcagtttcctgatattaagtcccgcattgcgaagcggggacgaaagctggtagattatgatagtgcgagacaccattacgagtcccttcagactgcaaagaaaaaagacgaagccaaaattgctaaggcggaagaagagcttattaaggcccaaaaggtatttgaagagatgaacgtcgatctgcaggaggagctcccatcactttggaatagccgcgttgggttttacgtaaacacgttccagtctatcgctgggcttgaagagaattttcacaaagagatgtctaaactgaaccagaacctgaatgacgtcctagtcggactggagaaacagcacggatccaacacattcaccgtgaaggcgcagccatccgacaacgccccagccaaggggaataagagcccttcccctccagatggctctcctgccgcaacacctgaaataagagtgaaccacgagccagagccagccggtggcgcaacaccgggtgccacactgccaaagtctccaagccagccagcagaagcatccgaggtagctggtggcacacaacccgcagcaggagctcaggaacctggcgagactgctgcctctgaggctgcctcatcctcactacccgctgtggtagtcgaaacgttccctgctaccgtgaatggaaccgtagagggtggcagcggcgcaggccgattagacctccctccgggttttatgttcaaggtgcaagcacagcacgattacacagctacagatacagacgagcttcagttgaaggccggagatgtggttctcgtgatccctttccagaaccctgaggagcaggacgaagggtggctgatgggtgtcaaggagtcggactggaaccagcacaaagaactggagaaatgcaggggtgttttcccagaaaactttactgagagggtgccttag

SEQ ID NO: 27616 - DNA, 1956 bp, synthetic construct
  misc_feature 1..1956: note = Description of Artificial Sequence: Synthetic coding sequence
  source 1..1956: mol_type = other DNA
atggggaaaaagcacaaaaaacacaagagtgacaagcacctgtacgaagagtacgtggagaagccactgaaactggtccttaaagttggtggtaacgaggttacagaactgagcacaggaagttctgggcatgatagcagccttttcgaagataagaacgaccatgataagcacaaagatagaaagcgcaagaagcggaagaaaggagagaagcaaatccccggagaagaaaagggtcggaaacgaaggagagttaaagaggacaaaaagaagagggaccgtgatagagtggagaatgaggctgagaaagatctgcagtgtcatgcgcctgtccgactggatctgccacccgagaagcccctgactagctctctagcgaagcaggaagaggttgaacagacacccctccaggaagccctgaaccaactgatgcgacagctacagcggaaagatccgagcgcctttttttcatttcctgtaactgattttatcgcgcctggttatagtatgatcataaaacatcctatggatttctcaacaatgaaggagaagattaaaaataacgactaccagagcatagaggagcttaaagataactttaaactcatgtgtaccaatgcaatgatttacaacaagccggaaacgatctactacaaagcagcaaagaaacttttgcactcagggatgaaaattcttagccaggagcgaatccaaagcttgaaacagtctatcgattttatggcggacctgcagaaaaccagaaaacaaaaggacggaacagacaccagccagagcggcgaggatggtgggtgctggcaaagggaaagagaagactccggagatgccgaagcgcacgcctttaagtcacccagcaaggagaacaagaagaaggacaaggacatgctcgaggacaagtttaagagtaacaatctggagagagagcaggaacagctggatcgcatcgttaaagaatcgggcggaaagttgaccagaaggctagtgaattcccagtgtgaatttgaaaggcgtaagcccgatgggaccaccacactggggctgctgcaccccgtggatcccatcgtaggggagcccggatactgcccagtacggctagggatgaccaccggacgcttgcagtccggagtgaatacactacaggggttcaaagaggacaaacggaacaaggtaacacctgtcctctacttgaactatgggccatactctagctacgcccctcactacgactctacattcgcgaatatctccaaggacgactccgacttaatctattcaacctatggggaggactctgacctgccgtccgactttagcattcacgaattcctcgccacttgtcaggactacccatacgtcatggccgatagtttgttagatgtactgactaagggtggccacagccgcaccctccaggaaatggagatgagcttgcccgaagatgaaggccatacaagaactctggacaccgcgaaggagatggaaatcactgaggttgaaccgccagggaggctggatagcagcacacaggatagactcattgccctgaaagcagtcaccaatttcggggtgccggtcgaagtcttcgatagcgaagaggcggaaatcttccagaaaaagctggacgaaaccacacggctgctgcgagagctgcaggaagcccagaacgagagacttagcactcgaccacctccaaacatgatctgtcttctgggcccatcctaccgcgaaatgcatctggcagaacaagtaacaaacaacctcaaagaacttgcccaacaggtgacacctggcgacatcgtatccacttatggcgtgcggaaggctatgggtatatcaatcccatctcccgtgatggaaaacaactttgtcgacctgactgaggacaccgaggagcctaagaaaacagacgtggctgagtgcgggccaggcggatcctag

SEQ ID NO: 27617 - DNA, 1959 bp, synthetic construct
  misc_feature 1..1959: note = Description of Artificial Sequence: Synthetic coding sequence
  source 1..1959: mol_type = other DNA
atggggaaaaagcataaaaaacacaaatcagacaaacacctatatgaagagtatgttgaaaaacctctgaagttggtgctcaaagtgggaggaaatgaagtgaccgagctttctactgggtcttcgggccatgatagttccctttttgaggacaagaacgatcacgataaacataaggataggaaacgtaaaaaacgtaaaaaaggcgagaaacagattccaggggaggagaaggggagaaaacggcgtagagtgaaggaggataaaaagaagcgggatcgggacagagtcgaaaatgaagctgagaaggaccttcagtgccatgcaccagtgaggctggatctgccgcctgaaaagcctctaacaagttctctcgccaaacaggaggaagtggagcagactcctctccaggaagcgcttaatcagttaatgaggcaactccagcgtaaagacccttcggccttctttagctttcctgtgactgattttatcgctccaggttattcgatgataataaagcaccctatggacttctcaacaatgaaagagaaaatcaagaacaacgactatcaatcaattgaggaattgaaagataacttcaaactgatgtgcacaaatgccatgatttacaataagccagagaccatctattataaagcagctaaaaagttgcttcacagcggaatgaagattctcagccaggaaagaatccagagtctgaaacaatcaattgatttcatggccgacctgcagaagactcgtaaacagaaggatggaaccgatacgtcccagagcggcgaagatgggggatgttggcagagggaacgggaggatagcggcgacgcagaagcgcacgctttcaagtcaccttccaaggagaacaagaagaaggataaagacatgctagaggataagtttaaatcaaataacctcgaaagggagcaggaacaattggacagaattgtcaaggagagcggagggaagctcacccgccgactggtcaatagccagtgtgaatttgaacgacgtaaacctgacggaacgaccaccctagggctgttgcacccagtggaccccatcgttggggagcccggatattgcccagtgcggctcgggatgaccaccggccgactccaatcaggggttaacacattacagggctttaaagaagataagaggaacaaagttacacccgtcctttacctgaattatggcccatactcttcttatgcaccccactatgatagcacattcgccaacatttctaaggacgactccgatcttatatacagcacctacggcgaagatagcgacctcccctccgacttttcaatccatgagtttctcgctacttgtcaggattacccgtatgtcatggcggattctttactggatgtattgactaagggaggacattctaggaccttacaggaaatggaaatgagcttaccagaggatgagggacatacaaggactctggacacggccaaggagatggagcagatcactgaggtggaacctcccggacgcctagatagctccacccaagatcgcctcatagctttgaaggccgtcactaatttcggcgtccccgtggaggtgttcgattcagaagaggccgagattttccagaagaagctagacgagacaacaaggctcctcagggagctccaggaagcccagaatgagcgcctgtctactcgccctcctcctaatatgatatgtctgctgggcccttcctacagagagatgcacctcgcagagcaagttacgaataacttgaaagaactcgcacagcaggtgactccgggagatatagtgtcgacatatggtgttagaaaggccatggggatcagcattccctcacctgtgatggagaataacttcgtggacctcaccgaggacaccgaagagcctaaaaagaccgatgtcgccgaatgcggtcccggagggtcatag

SEQ ID NO: 27618 - DNA, 1959 bp, synthetic construct
  misc_feature 1..1959: note = Description of Artificial Sequence: Synthetic coding sequence
  source 1..1959: mol_type = other DNA
atgggaaaaaaacataagaaacacaaatcggacaaacacctctacgaagaatacgtggagaaacccctgaaactggtgctgaaggttgggggtaacgaggtcactgaactgtccacaggctcttctggccacgactcctctctgttcgaggataagaacgatcatgacaaacataaggaccgcaaaagaaaaaaaaggaagaagggcgaaaagcagattcctggcgaggaaaagggacgcaagcgaaggcgcgtgaaagaagacaaaaagaaacgcgatagagatagagtcgagaacgaagccgagaaggaccttcaatgtcacgccccagtcagactcgaccttccacccgagaaacctttaacctcttctctggcgaagcaggaagaagttgagcaaacccctctgcaggaagcgctgaaccagcttatgagacagctacagcgtaaggatccatcagcattcttcagtttcccagtgacagatttcatcgccccaggatatagcatgatcatcaagcatcctatggatttcagtaccatgaaagaaaaaatcaagaataatgattatcagtcgatcgaagagctcaaagacaactttaagctgatgtgtaccaacgctatgatctataacaagcccgaaacaatctactataaggccgcaaagaaactcctgcactccggcatgaagatcctgagtcaggaacgcattcagtcactcaaacagagcatcgactttatggcggatttacagaagactcggaagcaaaaggatggaactgacacaagtcaatccggcgaagatggcggttgttggcagcgagagagagaagatagtggagatgccgaagcacacgctttcaagtccccatccaaggagaacaagaagaaagataaggacatgttggaggacaaattcaagtcaaacaatctggaaagggagcaagaacagctcgatcgtatcgtgaaagagtctgggggtaagctgacacgccgattggtgaacagccagtgcgagttcgaaaggcggaaaccagatgggacgaccactttgggcttactacatcctgtcgatccaatcgtaggggagcctggctactgtccggtgcgacttggaatgacgaccggaaggcttcagtctggggttaatacactgcagggatttaaagaagacaagcgtaacaaagtaacacctgtattgtacctgaactatgggccttattcttcctacgcccctcactacgactccacgtttgccaacatatctaaggacgatagtgacctaatttactccacctacggcgaagattcagacttgccaagtgattttagcattcatgaattccttgcaacatgccaggattatccatacgtgatggccgattctttgctggacgtgctgaccaagggtggacacagcagaactctacaagagatggagatgagcctgccggaggatgagggccacacacgcactctggatacagctaaggaaatggaacagattacagaggttgaaccacctggccgacttgatagttccacccaggaccggttaattgcactgaaggccgtcactaatttcggcgtccctgttgaggtgtttgattccgaggaagctgaaatctttcagaagaagctagacgagactacaagactgcttcgtgaactccaggaagcccagaatgagcgcttgtctaccagacctcctcccaatatgatttgcctcttggggccatcgtatagagaaatgcatctcgctgagcaagtcacgaataacctgaaagagctagcgcaacaagtgactccaggggacattgtgtccacctatggagtcagaaaggcaatgggtatctctatcccaagcccggtcatggagaacaacttcgtcgacttgacggaggacacagaggaacctaaaaagacagacgtggccgagtgtggccctggcggtagctag

SEQ ID NO: 27619 - DNA, 1980 bp, synthetic construct
  misc_feature 1..1980: note = Description of Artificial Sequence: Synthetic coding sequence
  source 1..1980: mol_type = other DNA
atggccgctgttattttggaaagcatatttctgaagcgcagtcagcagaagaagaaaaccagtcccctaaactttaagaagcgcctgttcctcctcaccgtacataagctctcttattacgaatatgattttgagagagggaggagaggctcaaaaaaaggaagcatcgatgtggagaaaataacttgcgtcgaaactgttgtgcctgaaaagaacccccctccagagcggcagattccacgcaggggcgaggaatctagtgagatggaacagatctccatcatcgaacgcttcccataccctttccaggtagtatacgacgagggtcccttgtacgtgttcagcccaacagaggaactgcggaagcgctggatacaccagctgaagaatgtgatacggtataactctgacctcgtccagaagtaccatccttgtttctggatcgatggtcagtacttgtgttgcagccaaaccgctaaaaatgccatggggtgtcagatcctcgagaaccggaacgggagtctcaagccagggagttctcacaggaaaaccaaaaaaccccttcccccaacacccgaggaagatcaaattttgaaaaagcccttaccaccagagcccgctgccgctcctgtgtccaccagtgaactgaaaaaagtggtcgcactgtacgattacatgccgatgaatgcaaacgacttacaactgcgtaaaggcgatgaatactttatcctggaagagtccaacctaccctggtggagagcgagggacaagaatggccaggaagggtatattccctccaactatgtgaccgaagccgaagattccattgagatgtacgagtggtactccaaacatatgactaggtcccaggcggagcagctgctgaagcaagaaggtaaggagggaggatttattgttagagattcatccaaggccggaaaatacaccgtttcggtcttcgccaaatccacaggcgacccacagggagttatccgccattacgtagtgtgctccactcctcaatctcagtattatttggcggaaaagcacctgttttctaccatccccgaactcataaactatcaccagcataactccgccggattgataagccggttgaaatatcccgtatcacagcaaaacaagaatgcacccagtaccgctggactgggctacggctcatgggagattgatcccaaggatttgaccttcttgaaagaactcggaacaggacagttcggggtggttaaatatggaaagtggagaggtcagtacgatgtggcaatcaaaatgatcaaggaaggttctatgtcggaagacgagttcatcgaagaggcaaaggttatgatgaatttgtcacatgaaaaacttgtccaactgtacggcgtttgcaccaagcagaggccaattttcatcatcaccgagtacatggccaacggctgtcttctgaactatctacgtgaaatgcgccataggtttcaaactcagcagttgctggaaatgtgcaaggacgtgtgtgaggctatggaatatcttgagagcaaacagttcctgcatcgcgaccttgccgcacgcaattgtctagtgaatgaccagggcgtggtgaaggtgtccgactttggattgtctcgatacgtgcttgacgacgaatatacctcctcagtaggatccaagttccccgtacgttggagtccaccggaggtcctgatgtacagcaagttctcaagcaaaagcgacatctgggccttcggtgttctgatgtgggagatctactctctgggcaagatgccatacgagagattcacaaactccgaaactgccgaacacatagctcagggtctgcgtctttaccgccctcatctggcctccgagaaggtgtatacaattatgtacagctgttggcacgaaaaagcagacgaacgaccaactttcaagatcctattgagcaacatcttggacgtgatggacgaagagtcttag

SEQ ID NO: 27620 - DNA, 627 bp, synthetic construct
  misc_feature 1..627: note = Description of Artificial Sequence: Synthetic coding sequence
  source 1..627: mol_type = other DNA
gtaattagacactatgtcgtgtgcagcactccacaaagccagtactaccttgcagagaaacacctcttcagcactattcctgagctgattaattaccatcagcacaactccgccggtctgatcagtaggacccagcagctcttggaaatgtgcaaagacgtatgcgaggccatggagtatctggagagcaagcagtttctgcatagagatctagctgcacgaaactgtctggtcaatgaccagggcgtggtgaaagtgagcgatttcggtctaagcaggtacgtcttagacgacgaatacactagctccgtagggtccaagtttcctgtgagatggtcaccccctgaggtcctcatgtactccaaattcagcagcaagtccgatatctgggcctttggggtcttgatgtgggaaatctattcactgggcaagatgccgtatgaacgcttcactaacagcgaaacggcagagcacattgcccagggactgcgcctatacagacctcatctggcctctgaaaaggtctacactattatgtactcatgctggcatgagaaggccgatgaacggccaacttttaagatcctgctctcaaacatcctagacgtaatggatgaagagtcttag

SEQ ID NO: 27621 - DNA, 420 bp, synthetic construct
  misc_feature 1..420: note = Description of Artificial Sequence: Synthetic coding sequence
  source 1..420: mol_type = other DNA
gttattcgacactacgtggtctgttccaccccacaatcccagtactacctagcagagaaacacctgttttcaacgataccggaattaattaattaccaccagcacaactcagcgggattaatctcacgactcaagtaccctgtgtcgcaacagaacaaaaatgcgcctagcactgctggcctaggctatggagtcctgatgtgggaaatttacagcctgggcaagatgccatacgaaagatttaccaatagtgaaactgccgagcacatcgcgcagggcctacggttgtaccggcctcacctcgcctctgaaaaggtctacactattatgtactcttgttggcacgaaaaagcggacgagcgccctacctttaaaattttgctcagcaacatactcgacgtgatggacgaggaatcttag

SEQ ID NO: 27622 - DNA, 705 bp, synthetic construct
  misc_feature 1..705: note = Description of Artificial Sequence: Synthetic coding sequence
  source 1..705: mol_type = other DNA
cgccattacgtagtgtgtagcacaccccagtctcagtactatcttgctgagaaacacctgttttcaaccataccagaactaatcaactaccatcagcataacagcgccggtctgatcagtaggctgaaatatcccgtgagccagcagaacaaaaatgcaccttccaccgcgggtttggggtacggctcttgggagatcgaccccaaagacttaaccttcctgaaggaacttgggaccggccagttcggagtcgtgaagtacgggaagtggcgaggccagtatgatgtggccataaaaatgatcaaagagggaagtatgtccgaggatgagtttatcgaggaagctaaagtgatgatgtatgttctcgacgacgaatacacctcatccgtaggatctaaatttcccgtgcgatggagccccccagaggtcttgatgtactccaagttttcatccaaatcggacatttgggccttcggagtcttaatgtgggaaatctactccctcggaaaaatgccttatgagcggttcacaaacagcgagacagcagagcacatcgcgcaaggactgcgtctttaccggcctcaccttgctagcgaaaaggtgtacactatcatgtacagctgctggcacgagaaagccgacgaacggcctacatttaagatcttgctgagtaatattctggacgtcatggacgaagagtcttag

SEQ ID NO: 27623 - DNA, 225 bp, synthetic construct
  misc_feature 1..225: note = Description of Artificial Sequence: Synthetic coding sequence
  source 1..225: mol_type = other DNA
gtgatcaggcactatgtcgtttgttccactccacagagccagtattatctggctgagaagcacctcttcagtaccatccctgaactgatcaactatcaccaacataactcagctggactcatttccaggctgaaatatccagtttcgcagcaaaacaagaacgctccctccaccgctgggttgggctatgggatgtcctggatgatgaatacacaggcccagtag

SEQ ID NO: 27624 - DNA, 1452 bp, synthetic construct
  misc_feature 1..1452: note = Description of Artificial Sequence: Synthetic coding sequence
  source 1..1452: mol_type = other DNA
atggccgcagtaatcttggaatctatcttccttaaacggagtcagcagaagaaaaaaacatcccctctcaacttcaagaaaaggctgtttctcctaaccgtgcacaaactttcctactacgaatatgactttgagcggggaagacgcggaagtaagaagggctctatcgatgtagagaagataacctgcgtggaaaccgtggtgcctgagaaaaatccaccccctgagagacagattcccagaagaggggaggagagctctgaaatggaacagatctcaataatagaacggttcccctaccccttccaggtcgtgtacgacgagggacctctctatgtgttctctccaaccgaggagctgcggaagagatggatccatcagctgaagaacgtcatcagatataatagcgatctggttcaaaaatatcacccttgtttttggatcgacggccagtatctgtgctgtagccagacggctaaaaatgccatgggctgccagattctggagaatcgaaacggaagcctgaaaccgggatcaagtcatcgtaaaaccaagaagcctttgccacctacgcctgaagaggatcaaatcctgaaaaagcctctgcctccagaacctgcagccgctcccgtttccactagcgagttaaagaaagtggtcgcactgtacgattacatgcccatgaatgccaacgacttacagctccgcaaaggcgacgaatactttatactagaagaatccaatcttccttggtggcgggctagggataaaaacggacaggaaggctacattccatcaaactacgtgacggaggctgaggactcaatcgaaatgtatgaatggtactcaaaacatatgacaagatcacaggccgagcagttgttgaaacaggaggggaaggaaggtggatttatcgtgagggactcaagtaaggctgggaaatacacggtgtcagttttcgccaagtctactggcgaccctcaaggggttatcagacactacgtagtgtgctctactccacagagtcagtattacttagccgctcggaactgccttgtgaacgaccagggcgtcgtgaaggtatcagacttcggactgtcacgctacgttttagatgacgaatatacatcgtcggtggggtctaaatttcccgtgaggtggtctccacctgaggttctgatgtattctaaattctcttctaagtccgatatctgggcattcggtgtcttgatgtgggaaatttattctctgggcaagatgccctatgagcgatttaccaatagtgaaactgcggagcacattgctcaggggcttcgcctgtatcggccacaccttgcaagcgaaaaggtgtacacaatcatgtattcgtgttggcatgagaaagctgacgaaaggcctaccttcaagatcttgctgagtaatatcctcgacgttatggatgaagagagctag

SEQ ID NO: 27625 - DNA, 519 bp, synthetic construct
  misc_feature 1..519: note = Description of Artificial Sequence: Synthetic coding sequence
  source 1..519: mol_type = other DNA
gtgatccggcattatgttgtgtgtagtaccccacagtcacagtactaccttgccgaaaagcacttgtttagcactattccagagctcatcaattaccaccagcacaattcagcgggtctgatctctcggcttaagtatcccgtttctcagcagaacaaaaatgctccctctactgccggactgggctacggctcgtgggaaatagatcccaaagacctgacatttctcaaggaactcggcaccggccagttcggtgtggttaaatatggcaagtggaggggccaatatgacgtagccatcaagatgataaaggagggatccatgagcgaggatgagtttatcgaagaggcaaaagtcatgatgaatctgagtcacgaaaagcttgttcagctctacggggtttgtaccaaacagcggccaatctttatcatcaccgagtacatggccaacggttgccttccatgtacagtggcaggaatgcgcaagcaaatgtcagtccccctaagtaagtttttctag

SEQ ID NO: 27626 - DNA, 594 bp, synthetic construct
  misc_feature 1..594: note = Description of Artificial Sequence: Synthetic coding sequence
  source 1..594: mol_type = other DNA
gtgatcagacactacgtggtgtgctccacaccacagagccagtactatctagcagagaaacatttattctcaactattcctgaactgatcaattaccaccaacacaacagcgccggtctcatttcgaggttgaagtatcccgtgagccagcagaataagaatgcacccagcaccgcaggactgggctatggctcatgggagattgaccccaaagatttgacctttcttaaggaactcggaaccggtcaattcggagtggtcaagtacggtaaatggcgcggacaatatgacgttgccatcaaaatgatcaaagaagggtcgatgtccgaagatgaatttatagaggaagcaaaagtcatgatgaacctgtcccacgaaaagcttgtccagctttacggagtctgtacgaagcagcggccaatcttcatcatcacagaatatatggcaaatggctgtctcctcaattacctgcgggagatgaggcaccgcttccagacccagcaactgttggaaatgtgcaaagatgtatgcgaagctatggaatatcttgagagcaaacagttcctgcacagggatctagtgtgccccggatag

SEQ ID NO: 27627 - DNA, 156 bp, synthetic construct
  misc_feature 1..156: note = Description of Artificial Sequence: Synthetic coding sequence
  source 1..156: mol_type = other DNA
attcggcactacgttgtttgttccactccgcaatcccagtattacctcgcagaaaagcatctttttagtaccataccagaactgatcaactaccaccagcacaacagtgcaggggaagacagcgccgctgcacgagatgtgcaggggtgtctgtag

SEQ ID NO: 27628 - DNA, 891 bp, synthetic construct
  misc_feature 1..891: note = Description of Artificial Sequence: Synthetic coding sequence
  source 1..891: mol_type = other DNA
atgaagaatgagattgccgcagtcgtcttctttttcacaagattagtgcggaaacatgacaaactaaagaaggaagcagtggaaagatttgccgagaagctgacactgattttgcaggaaaaatataagaatcattggtatccagaaaaacctagcaaaggtcaggcttaccggtgtattagggtgaacaagttccagagggtggatcccgacgtgctgaaggcatgtgaaaattcttgcattctttattcagacttgggcctccctaaggagctgaccttatgggtggacccttgcgaggtgtgttgtagacgcgatggcgtgagtccatgctggcctgattgctctcagactccagacctggtcatccgtcccccttggcccccaaaggccctggactatcgcagggagcccctccggccagcatcctcttttctgataatgtatggcgagaagaataacgcttttatcgtggctagcttcgaaaataaagatgagaataaagatgagataagtcgcaaagttactagagcccttgacaaagttacgtcagattatcactctggttcctccagttcagacgaagagacttcaaaagaaatggaggtgaaaccctcaagtgtgacagccgcagcatccccagtttatcagattagcgagttgattttccctcctctaccaatgtggcatcccttgcccaggaagaagcccggaatgtaccgcggtaacgggcaccagaaccattacccccctcccgtgccttttggatacccaaaccagggcagaaaaaacaagccttacaggccaattccggtgacctgggtgcctccgccaggaatgcactgtgaccgaaaccactggatcaatccacatatgttggcaccccattag

SEQ ID NO: 27629 - DNA, 759 bp, synthetic construct
  misc_feature 1..759: note = Description of Artificial Sequence: Synthetic coding sequence
  source 1..759: mol_type = other DNA
atgaaaaatgagatcgcagctgtagttttcttctttacaaggctggtgcggaagcatgacaaactcaaaaaggaagcagtggagagattcgcagaaaagctcaccctcattctccaagagaagtacaagaaccattggtatccagagaagccaagcaagggtcaggcatacaggtgcatccgggtcaataagttccagcgggtagatcccgatgtcctcaaagcatgtgaaaattcttgtatactctacagcgatctgggactgccgaaggagctcacactgtgggtggatccttgcgaagtgtgctgtagatacggggagaaaaacaatgcctttattgtggccagctttgagaataaggacgagaataaagacgagatctcacggaaagttacccgggcattggacaaagttacatctgactatcactctggctccagctcatcagatgaagagacaagcaaggagatggaggtcaaacctagctctgttacagccgctgctagcccagtctaccagatctctgagcttatctttccacctttgcctatgtggcaccccctgcccaggaagaagccaggaatgtaccgagggaacgggcaccagaaccattatccgcctccggtaccatttggatatccaaaccaaggcaggaagaacaagccttataggcctataccagtcacatgggtccctcctcctggcatgcattgcgaccgaaaccactggataaatccacatatgttggctccacattag

SEQ ID NO: 27630 - DNA, 141 bp, synthetic construct
  misc_feature 1..141: note = Description of Artificial Sequence: Synthetic coding sequence
  source 1..141: mol_type = other DNA
atgaagaatgagattgctgccgtggtgtttttctttactcgcttggttaggaagcatgacaaactgaaaaaggaagctgtcgaacggtttgctgagaagttaacgctcattctccaggagaagtacaagaatcactggtag

SEQ ID NO: 27631 - DNA, 1560 bp, synthetic construct
  misc_feature 1..1560: note = Description of Artificial Sequence: Synthetic coding sequence
  source 1..1560: mol_type = other DNA
atgatgtcagagcacgacctcgcggatgtggtgcagatagcagtggaggatttaagcccggaccacccagtcgtgcttgaaaatcatgtcgtgactgacgaagacgagcctgctcttaaaagacaacgactcgagatcaactgccaggatcctagcattaagacaatttgtctgcgcctcgactcaatcgaagctaagctacaggctttggaagccacctgtaagagtttggaagagaaactcgatctggtaactaataagcagcatagcccaattcaggtgcccatggtggctggctcacccctcggagctactcagacatgcaataaggtgcgctgcgtggttccgcagactacggtgattcttaacaacgataggcaaaacgcgattgtcgctaaaatggaggatccattgtctaaccgcgctcccgattccctggaaaatgtcatctccaacgcggttccgggtcggaggcagaacactatcgttgtgaaggtgccaggtcaggaagattcgcatcacgaagacggtgagtcgggcagtgaagcatccgacagcgtctcttcctgtggacaggccggaagccagagcattggatccaacgttaccctcattacactgaattctgaggaggactacccaaacggcacctggctcggcgacgagaataatcccgagatgagagtccggtgtgccattatccccagcgatatgttgcacatttctacaaattgtcgcacagctgaaaaaatggcattgaccctgctggattacctctttcacagggaggttcaggccgtgtcgaatctctcgggccagggaaagcatggcaagaagcagcttgacccgttgactatctacgggatcaggtgccacttgttttacaagtttggtatcactgagagtgactggtatagaatcaagcagtccattgattccaaatgccggaccgcttggaggagaaagcagagaggacagtcacttgctgtgaaatccttttccaggcgcacaccgaactccagctcatattgcccttcagaacctatgatgtctacaccccctcctgccagcgagcttccccagccccagcctcagccccaggccctgcactacgcactcgccaacgcgcaacaggtgcagatacatcagattggggaagacgggcaagttcaagttggacacttgcacatcgcacaggtgccccagggggaacaggtccagatcacgcaggactccgaagggaatctgcagatccaccatgtgggacaggatggtcagctgctggaggcaacaagaatcccttgtctgctggccccatccgtctttaaggcctcgtcggggcaggtgctgcagggcgcacaattgatcgccgtcgccagctcagaccctgcagccgctggcgtcgatggaagtcccctacagggcagtgacatccaggtacaatacgttcagctggccccagtttctgatcacactgcaggtgcccagacagccgaggccttacaaccgactctgcagccagagatgcagcttgagcacggagccattcagattcagtag

SEQ ID NO: 27632 - DNA, 1398 bp, synthetic construct
  misc_feature 1..1398: note = Description of Artificial Sequence: Synthetic coding sequence
  source 1..1398: mol_type = other DNA
atgatgagcgagcatgatctggctgacgtggtgcagattgccgtggaggatctgagccctgaccaccctgtcgtactggaaaaccatgtcgtcaccgatgaggatgaacccgctctgaagcggcagaggctagaaattaattgccaggaccctagtatcaaaagttttctctactccatcaatcaaactatctgcctgagactggacagcatagaggcaaaactgcaagccctggaagccacctgcaaatccctcgaagagaagctggacttggtgacaaacaagcaacattctcccatccaagttccgatggttgctgggagcccccttggggcaacccaaacctgcaacgctgtgcctggaaggaggcagaacactatcgtggtaaaggtgccaggacaggaagattctcaccacgaagatggagagagtgggtccgaagcatccgatagcgtcagtagttgtgggcaggcaggctcacaaagcattggcagcaacgttacactgataactctgaactccgaggaggattatccgaatggcacttggctgggggatgaaaacaaccctgaaatgagagtgaggtgcgccataattccctcagatatgttgcacatctccacaaactgtaggacagccgaaaagatggcactgacgcttctggactatctcttccaccgggaggtacaggccgtatctaatctgtccggtcaaggcaagcatgggaaaaagcagcttgatccactgacaatctacgggatccgttgccacctattctacaagttcggtatcactgaaagcgattggtaccgaatcaagcagagcatcgatagcaagtgccggactgcatggaggcgtaaacagcgcggacagagcctggcagtgaaaagcttctctcgcaggacacctaattcatcttcgtattgccctagcgaaccgatgatgagcaccccaccccctgcttctgaattgccacagccgcagccccagccacaggcactgcactatgcccttgcaaacgcacagcaggtgcagattcaccaaatcggagaagatggacaggtgcaggtgatccctcaaggccacctccacattgctcaagtaccccagggcgagcaggtccagataacacaagacagcgagggtaacctccagatccatcatgtgggtcaggatggccaagtattgcagggagcccagcttatagcagtggcctcgtcagaccctgctgccgcaggagttgacggctctcccttgcagggttctgatattcaggtgcagtatgtccagctagccccagtctcagatcacaccgccggtgctcagacagcggaggctctgcagccaacccttcagcctgagatgcagctggagcacggagccatccaaattcagtag

SEQ ID NO: 27633 - DNA, 1410 bp, synthetic construct
  misc_feature 1..1410: note = Description of Artificial Sequence: Synthetic coding sequence
  source 1..1410: mol_type = other DNA
atgatgtccgagcatgatctcgcggatgtggtgcagatcgcagtggaggatctgagccccgaccatcctgttgtgctggaaaatcatgtggtgaccgacgaggacgagcccgctctgaaacggcagagacttgagatcaattgtcaggacccatccatcaaatcttttctttattccataaatcagaccatctgtttgagactggattccattgaggcaaaactgcaggcactggaagccacctgcaagtccctagaagaaaaactggaccttgtgactaataaacaacacagccccatccaagtgcctatggttgccggatcgcctctcggggcaacccagacgtgtaacaaagtcagatgcgccgtccccggtcggcgtcaaaataccattgtggttaaggtgcccggacaggaagacagccaccacgaggacggagaaagcgggagtgaggcctcagactccgtgtccagctgcggccaagctggaagccaatccattggcagtaacgtgaccttgatcacactgaactcggaagaagattaccccaacggcacctggctcggagacgagaataaccctgagatgcgagtgcggtgtgcaatcattccctcagatatgttacacattagcactaactgtcggaccgctgagaagatggccttgaccctgctagactacctgttccaccgagaagttcaggcagtatccaacttatccggccagggtaagcacggcaaaaagcagctggaccccttgaccatctatggtattcggtgccaccttttctataaattcgggatcactgaaagtgactggtaccgaattaagcagagcattgatagcaagtgccgtaccgcgtggcgcaggaagcagagaggccagtctctggctgttaagtcattcagtcgcagaaccccaaatagtagcagctactgcccctcagaaccaatgatgtcaacaccaccacctgcatcagaattgccccagcctcagccccaaccccaggccctgcattatgctctggccaacgcacaacaggtccagattcaccagattggcgaggatggccaggttcaggttatcccccagggacacctacacatagcacaggtcccacagggtgaacaggtacagattacacaggatagcgaaggtaatttgcagatccatcatgtgggccaagacggtcaggtgcttcagggtgcccagctaatagctgttgcctcaagcgaccccgctgctgccggagtggacggatccccactccagggctcagacattcaggtgcagtacgtgcagttggctcctgtgtctgaccatactgccggagctcagaccgccgaggctcttcagcccactcttcaacctgagatgcagctggagcatggggctatccagatccagtag

SEQ ID NO: 27634 - DNA, 1494 bp, synthetic construct
  misc_feature 1..1494: note = Description of Artificial Sequence: Synthetic coding sequence
  source 1..1494: mol_type = other DNA
atgatgagcgagcatgatctggctgacgtggttcaaatcgccgttgaggacttaagccccgatcatcctggcaccgagctttgggatattgttctggaaaatcacgtcgtgaccgatgaggacgaaccagccctgaaaaggcagaggctcgaaataaattgccaggatccttccatcaagagtttcctgtactcaattaaccagactatttgtctgcgcctcgacagcattgaggctaagctgcaagcactggaggcaacctgcaagtccttggaggagaagttggacttagtaactaataaacagcactccccaattcaagtgcctatggtggctggttctccactgggagcaacccagacatgcaacaaagtccgctgtgcggtgcccggtagaagacagaacactattgtggtcaaggtaccgggtcaagaggattctcatcacgaagacggcgaatcaggaagcgaggccagtgattctgtctcctcctgcggccaggctggtagccagtccatcggaagtaatgttacattaattacactgaattccgaggaggactacccgaatggcacttggcttggagacgaaaacaacccagagatgagagtgaggtgcgctatcattcccagtgatatgctgcacatctccaccaattgccgcacagcagagaaaatggccctgaccctgttggactatctgttccaccgggaggtgcaggcggtgtcgaacctgagcggccaggggaaacatggtaagaagcaattagaccccctgacaatttatggcatacggtgtcacttgttttacaaatttggcatcactgagtcagactggtaccgcatcaaacagtcaattgatagcaaatgccggacagcctggaggcgtaagcagcggggtcagtctcttgctgtgaaaagtttttcccgcaggacccctaacagctcctcatattgccctagcgaaccaatgatgtctacgcctccgcctgcctcagagttaccacagcctcagcctcaaccacaggctttacactacgctttggctaatgcacagcaagtgcagattcatcagatcggtgaagacggacaagtgcaggtgattccccagggtcacctccacattgcccaggttccccagggcgaacaggtgcagatcacccaggacagcgaaggcaacctgcagattcaccacgtgggacaagacggccagcttctcgaagcaacacggattccctgcctcctagctccctcagtgttcaaagctagttccggtcaggtattacagggtgctcagctcatcgccgtagcctcttctgatcctgcagcagccggtgtcgatggttcgcccctacagggcagcgacatccaggtccagtatgttcagctggcccctgtaagcgatcacactgcaggcgctcagactgccgaggctctgcagcctactctgcagcctgagatgcagcttgagcatggtgccatccagatccaatag

SEQ ID NO: 27635 - DNA, 1560 bp, synthetic construct
  misc_feature 1..1560: note = Description of Artificial Sequence: Synthetic coding sequence
  source 1..1560: mol_type = other DNA
atgatgagcgaacatgatcttgctgacgtggtgcagatcgctgtggaggatctgtcaccagaccatcctgtggtcttggagaaccacgtggtgaccgatgaagacgagccggctttgaaacgccaaaggttggaaatcaattgccaggatccttctatcaagacgatttgtttgagactcgacagtattgaggctaagctacaagcactcgaagcaacctgtaagagccttgaagaaaaactggatttggtgaccaacaagcagcacagccccattcaggtgccaatggttgctggcagtcccctgggagctacccagacctgtaataaagtccggtgtgtggtgccgcagaccactgttatactcaacaatgatcgccagaatgccattgtggccaaaatggaagaccccctctcaaatcgagcccctgattcactcgagaatgtaatttccaacgcggtcccgggtaggcggcagaacaccatcgtagttaaagtgccagggcaagaggactcccatcacgaggacggggaaagcggctccgaggcttcggattctgtgagcagctgcggacaggcgggatcacaaagcatcggttccaatgtgacgctgattactctgaattccgaagaggattatcccaatggtacctggttgggagacgaaaataaccctgaaatgagagtacgatgtgccataatcccctccgatatgttgcacatttccaccaactgccgcaccgctgagaaaatggctctcactctcctcgactatctcttccatcgcgaggtgcaagcagtgtctaatctgtctggtcagggcaaacacggaaagaagcagctggatccacttactatttatggcattagatgtcacctgttttacaagtttggaatcacagagagcgactggtacagaattaaacaaagcatcgatagcaagtgcagaactgcctggagaagaaaacagagagggcagtccctggcggtgaagtcattcagtcggagaacacccaattcatcatcctattgtccctcggaacctatgatgagcacccctccaccagcttctgaattgccacagccacagccccaaccccaagctctgcattacgccttggcaaacgcccaacaggtccagattcaccagatcggagaggacggtcaagtgcaggtgggccacttacacattgcccaagtgccgcagggcgagcaggtacagattacacaggactccgagggtaacctacaaattcaccatgtgggccaggatgggcagctgttggaagccactcgaattccatgtctgcttgctccgtctgtgtttaaggcctccagcgggcaggtcttgcagggcgctcagctgatcgctgtggccagcagtgacccagctgctgcaggagttgacggctcaccccttcagggatcagatattcaggttcagtacgtgcagctagccccagtgtcagaccacaccgcaggagcccaaactgctgaggccctccagccaacgttgcagcctgagatgcagttggagcacggggcaatacaaatacaatag

SEQ ID NO: 27636 - DNA, 1476 bp, synthetic construct
  misc_feature 1..1476: note = Description of Artificial Sequence: Synthetic coding sequence
  source 1..1476: mol_type = other DNA
atgatgagcgagcacgacctggctgatgtagttcaaattgcagtggaagacctgagccccgatcatccagtcgttctggagaaccatgttgtcaccgacgaagacgagccagcacttaagagacagcggctggaaataaattgtcaggatccatctataaaaagctttctatattccatcaaccagactatttgcctgagattagatagcattgaggccaagcttcaggcattggaagcgacgtgtaaatcgctcgaagaaaaattagacctagtgaccaacaaacagcattcacccatccaggtgccaatggtggctggcagtcctctgggggcaacgcagacctgtaataaggtgcgatgtgctgtccctggcaggcggcagaataccatagtggtaaaagtgcctggtcaggaagattcccaccacgaagacggggaatctggcagtgaagctagcgattcggtctcttcctgtggacaggcagggagtcaatcaattgggtccaacgtgacactgatcactctgaactcagaagaagactatcctaatggaacatggctgggggacgaaaacaatcctgagatgagagtgcggtgtgcaataattccctcagatatgctgcacatcagcacaaattgtaggaccgctgagaaaatggctctcactctcttggactacctctttcatcgagaagtgcaagccgtctccaacctctctggccagggcaaacacgggaagaagcagctggatcccctgacaatttatggtattcggtgtcatctgttctataagtttgggataaccgagagcgattggtacagaatcaagcaaagcatcgattccaagtgtcgcacagcctggcgccgaaagcagagaggccagtcactggccgttaaatccttttctaggaggacccctaactcttctagctactgcccatcggagccaatgatgtccacaccacctccagcgtctgagttgcctcagccgcagccgcagcctcaggcgctccattacgcactggcgaacgcgcagcaggtgcagatccaccagataggtgaggatgggcaagtgcaagtcataccacagggacacctgcatatcgctcaggtgcctcaaggagaacaagtgcagatcacacaggactctgagggcaacctgcagatccaccatgtgggtcaggatggtcaactactcgaagcaacacgcattccatgcctccttgcacccagcgtgtttaaggctagcagtggacaggtactgcaaggtgctcagctgatcgccgtggcaagctcagacccggctgccgctggtgtggatggcagccccctccagggctccgatatccaagtgcagtatgttcaactcgcacccgtgtctgaccacacagccggagcacagactgccgaggcgctgcagcccacccttcaacctgaaatgcagctggaacacggggctatccaaatccaatag

SEQ ID NO: 27637 - DNA, 357 bp, synthetic construct
  misc_feature 1..357: note = Description of Artificial Sequence: Synthetic coding sequence
  source 1..357: mol_type = other DNA
atgatgagtgaacacgatctcgctgatgtagttcagattgccgtggaggacctatctcctgatcatccagtggttcttgagaatcacgtggtcaccgacgaggatgaacccgcattgaagcggcagagattagaaattaattgtcaggatcccagtataaagtcttttctgtacagtattaaccaaactatctgccttcggctggactccattgaggccaaactccaggctcttgaagccacttgcaaatccctggaggagaaattggatctggtcaccaacaagcaacattcccctattcaggtgcctatggtggcgggtagccctctaggcgcaacgcagacctgtaataagtag

SEQ ID NO: 27638 - DNA, 87 bp, synthetic construct
  misc_feature 1..87: note = Description of Artificial Sequence: Synthetic coding sequence
  source 1..87: mol_type = other DNA
atgatgagtgaacacgatctcgcagatgtggtgcaaatcgctgtggaggacctgagtcctgatcatcccgtggtactggagaactag

SEQ ID NO: 27639 - DNA, 288 bp, synthetic construct
  misc_feature 1..288: note = Description of Artificial Sequence: Synthetic coding sequence
  source 1..288: mol_type = other DNA
atgatgagtgagcatgacctagcagatgtggtgcagatcgccgtcgaggacctgtcacccgaccaccctgtggtgttagaaaaccatgttgttactgatgaggatgaacccgctctgaaacgccagcgtctcgagataaactgtcaggacccatccataaaaagctttctctactcaatcaatcaaacgatctgtcttcgccttgactctatagaggctaaactccaggctttggaggccacgtgtaaatccttggaagaaaagctggacttagtaacaaataagtag

SEQ ID NO: 27640 - DNA, 372 bp, synthetic construct
  misc_feature 1..372: note = Description of Artificial Sequence: Synthetic coding sequence
  source 1..372: mol_type = other DNA
atgatgtctgagcacgatctcgccgacgtcgtccaaatcgccgtggaggacttgtccccagaccaccccgtggtgctggagaaccacgtcgtaactgacgaggatgaacccgcattaaagagacagagattggagataaattgccaggatccctctatcaaatcatttttatacagcataaaccagactatttgcttacgtttagacagcattgaggcaaagctgcaagccctggaggcaacatgcaaatcgctggaagagaagctggaccttgtgacaaataagcagcacagtccaattcaagtgccgatggtggccggaagccccctcggagcaacccagacctgcaataaagttcgctgcgtggtctag

SEQ ID NO: 27641 - DNA, 588 bp, synthetic construct
  misc_feature 1..588: note = Description of Artificial Sequence: Synthetic coding sequence
  source 1..588: mol_type = other DNA
atgatgagcgagcatgatcttgccgacgtggtccaaatagcagtggaagatctgtcgcccgaccacccgggaactgaactttgggatatcgttttggagaaccacgtggtaactgatgaggacgagcccgctctaaaacgccagcggctcgagattaactgtcaggatcccagcataaaatcatttctgtacagcatcaatcagacaatctgtctcaggttggattccatcgaagccaagctgcaggcactcgaagccacctgtaagtccctggaagaaaaattggaccttgtgaccaacaaacagcacagcccaatacaggtgccaatggtggctggcagcccccttggagccactcagacatgtaataaagtgcgatgcgctgttccgggtcgaaggcagaacactattgtggtaaaggtccctggacaggaagacagccatcatgaggatggagagtccggatctgaggcctctgactctgtttcttcttgcgggcaggcagggtcacagtctatcggtagcaacgtcacgttgatcacccttaacagtgaagaggactaccccaacggtacttggttaggatag

SEQ ID NO: 27642 - DNA, 360 bp, synthetic construct
  misc_feature 1..360: note = Description of Artificial Sequence: Synthetic coding sequence
  source 1..360: mol_type = other DNA
atgatgtccgagcatgatctggcggatgttgtacagatcgctgtggaagacctcagccccgatcatcccgtggtcctggaaaaccacgttgtgaccgacgaggacgagcccgcactgaagcgacaacgccttgagatcaactgtcaggaccccagtattaagtccttcttatacagcataaaccaaacgatttgcctgaggctcgattccattgaggctaagctccaggctctcgaggcaacatgtaagagtctggaggaaaaactggatcttgttactaacaagcagcactcgcccatacaggtgcctatggtagcagggagcccccttggggctacacagacatgtaataaagtctag

SEQ ID NO: 27643 - DNA, 1401 bp, synthetic construct
  misc_feature 1..1401: note = Description of Artificial Sequence: Synthetic coding sequence
  source 1..1401: mol_type = other DNA
atgatgtctgaacacgaccttgcagacgtagtccagatcgctgtcgaggacctcagccccgaccatcctgtggtgctggaaaatcacgtggtgaccgacgaggatgagcccgctctaaaaaggcagcgactagaaataaattgtcaggatccaagcatcaaaagctttctgtactccatcaaccagaccatctgcctccggttggattcaatagaggctaaactgcaagccttggaagcaacttgtaagtccctggaggaaaaactagatcttgttactaacaaacagcactcgcccatacaggtgccaatggttgctggttctcctctgggggcaactcagacctgcaataaggtcaggtgtgccgtgcccggacggaggcagaacactattgtggtcaaagttcccggtcaggaggacagtcaccacgaggacggcgaatctgggagcgaggcatccgattcagtgtcatcctgcggtcaggccggtagtcagtcgattgggtccaatgttactttgatcacattgaacagcgaggaagactatcccaatggcacttggctgggtgatgagaataaccctgaaatgcgggtacgatgcgcaattatacccagtgacatgctgcatatatctacgaactgccgtactgctgagaagatggcgctgacactgctggactacttattccacagggaggtacaggcagtgagtaatttgagcggtcagggcaaacacgggaaaaaacagctcgaccccctgaccatttacggcatccgatgccacctgttttataagtttgggattaccgagtccgattggtatcgcattaagcagtcgatagacagcaaatgccgcactgcgtggcggaggaagcagcgtggacagagcctggccgtcaagtcattctctcggcgaacgccgaatagttcttcctactgtccctcagagccgatgatgagcacgccaccacctgcctcggagctgccacagccccagccgcagccacaggccctgcattacgctttggctaacgcgcagcaagttcaaattcatcagatcggcgaagatgggcaggtgcaggttggacacctgcatattgcacaagtgccacagggagagcaggtgcagattactcaggattcggagggaaacctgcagatccaccacgttgggcaggacggtcaggtccttcagggcgcacagctcatcgcagtggcatccagcgacccggcagctgccggagtggacggatccccattgcagggatccgacattcaggtccaatacgtgcagctcgccccagtatccgaccatactgccggtgcccaaacagccgaagcactgcaacctaccttacagccagaaatgcagttagaacacggtgctattcaaatccagtag

SEQ ID NO: 27644 - DNA, 753 bp, synthetic construct
  misc_feature 1..753: note = Description of Artificial Sequence: Synthetic coding sequence
  source 1..753: mol_type = other DNA
atgggctcccctgaacccacgcagggccctcgtctgtctcctatcctgatcccttattccgggagaagatacaaagtgggcagagcaagcggcgctctgtgccaccaggacagtctgccgccaatccttgaattgggtcttactttcctgagagcctctgcagggttcagcgtcccaacctcttcatcgttcgcactgcccgaaccgctgaggagcctctgcctggggaacggcgagggactagggctcagtttaacactgaccgttctcgcctggatattaggactaagtggtaccttaggcgctcttgttctatttatggtcgccacaggaatttttcaggaagctctgtggcacctacttctgctttcctttagcgttgaggccctgccctgtttcttttttttcccatttttcctcctatgtcgttgtctgcgcgcagagctacagatacagcagcgactggatggcaccctgtcattggacctaatgagactggagtcggacggcgaaaccggttgcgccgcagagagctctgtgttgcagggtgcccagctcattgccgtcgcatcttccgatccagccgcagccggagtggacggaagccctctgcaggggtcagacatacaggttcaatatgtgcaacttgcgcctgttagcgaccatacggcaggagcacaaaccgccgaagccttgcagccgacacttcagccagaaatgcagttggaacatggagcgatccaaatacaatag

SEQ ID NO: 27645 - DNA, 1527 bp, synthetic construct
  misc_feature 1..1527: note = Description of Artificial Sequence: Synthetic coding sequence
  source 1..1527: mol_type = other DNA
atgatgtccgaacatgatctggcagacgtggtccagatcgcagtggaggacctatctccagaccacccagtggtgttagaaaaccatgttgtgactgacgaagacgagcccgctctgaagcgacagcggctagagataaactgtcaggatccaagtattaaaagtttcctgtatagcatcaatcagactatctgcttaaggctggatagcatcgaggctaagctccaggctctggaggccacctgcaagtccctggaggagaaactcgacctcgtcacgaacaaacagcacagccccatccaggttccgatggtcgcgggatccccactgggcgctacccagacttgtaataaagtgcgctgtgtcgtccctcagaccaccgtcatcctgaacaatgaccgtcagaatgctatcgttgcgaagatggaggacccgctgtcaaatagggctccggattctctcgagaacgtcatttctaacgccgttccgggaagacggcagaacaccatagtcgtgaaagtgcccggtcaggaggactctcatcacgaagacggtgagtcagggtcagaagcaagcgacagcgtgtcgtcttgtggtcaagcaggatcccagagcatcggatccaatgttactcttatcactctcaatagcgaggaggactatccaaatggcacgtggttaggcgacgagaacaaccctgaaatgagagtccggtgcgcaatcattcctagcgacatgcttcacatttcaacgaactgccggaccgcagagaaaatggccctcacgttgttggactatctgttccacagggaggtgcaagctgtaagcaacctgtcagggcaggggaagcatggaaaaaagcagttggatccgctgaccatatatgggatcaggtgtcatctgttttataagttcggtatcacagagagcgactggtaccgcatcaagcagtctattgactcaaaatgcaggacagcctggcgcagaaaacagaggggtcagtcgctggcagtcaagagcttcagccggaggacccccaattccagtagttactgcccgtctgagcccatgatgagcacacccccaccagcctccgagctgccacagcctcagcctcaaccccaggcactacattatgccctcgctaatgctcagcaggtgcagattcaccagattggagaggatgggcaagttcaagttatcccccaggggcacctccatatcgctcaggtgccacagggggaacaggtccagattacccaggacagtgaaggtaatctccaaatacatcatgtcgggcaggacggccaagtgctccagggagctcagctgattgcagtggcgtccagcgatcccgcagccgcaggagtcgatggctcacctttgcagggcagcgacattcaagttcagtacgtgcaactggccccagtgtctgatcatacagccggagcccagactgccgaagccctgcagccaaccctgcagcctgagatgcaactcgaacacggggcaatccagattcagtag

SEQ ID NO: 27646 - DNA, 1476 bp, synthetic construct
  misc_feature 1..1476: note = Description of Artificial Sequence: Synthetic coding sequence
  source 1..1476: mol_type = other DNA
atgatgtcggagcatgacctggcagacgttgttcaaatcgcggtggaggatctgtcaccagatcacccagtggttctcgagaatcacgtagtcacagatgaggacgagccagcgctaaagcggcaacgcttggaaattaattgccaagacccctccataaagagctttctatactctatcaatcagaccatctgcctccgccttgactctattgaagccaagcttcaggctctagaggccacgtgtaaaagtctggaagagaaactggacttagtgaccaacaagcagcatagtcccattcaggtccccatggtggcaggaagcccactcggagccacgcagacctgcaataaggtaaggtgtgctgttccaggtcgacgtcagaacacgatagtggtcaaagttcccggtcaggaggactctcatcatgaggacggcgagagtggatctgaggcttccgactcagtctccagctgcggacaggcaggttcccagagtatcggaagtaatgtgacactcattacgctgaactcagaggaggactatccaaatggcacctggctgggagatgagaacaaccctgaaatgcgcgtcagatgcgctattattccttcagacatgctccatattagcacaaactgtcgcacagccgagaagatggctttgactctgctggattaccttttccaccgtgaagtgcaggctgttagtaatctgtcaggccagggcaagcacggcaagaagcagcttgatcccctgaccatctatggcatcaggtgtcacctcttctacaaattcggcatcaccgaatccgattggtataggatcaagcaatcaatcgactccaagtgcaggactgcgtggcggagaaagcaacggggacagagcctggctgttaaaagcttttcaagacgcactcctaacagtagcagttactgcccatcagagcctatgatgtctacacctccccctgcctccgaattgccccaaccccagcctcagcctcaagcccttcattatgcactggccaacgcccagcaggtgcagatccatcaaattggcgaggacggccaggtccaagtgatcccccagggccacttgcatattgcgcaggtgccccagggcgaacaggttcagatcacccaggactctgaaggtaacttacaaatacatcacgtggggcaagacggtcagctgttggaggcgacgcgcattccgtgcctattggctcccagtgtttttaaggcttctagtggacaggtgttacaaggcgctcagctcatcgccgtggcgtcatccgacccagccgctgctggcgtggatgggtcacccctccagggctcagatatccaggtccaatacgtccagctcgcccctgtgagtgaccacactgcaggggctcagacggcagaggctctacagccaaccctgcagcctgaaatgcagcttgagcatggagccatacaaatacaatag

SEQ ID NO: 27647 - DNA, 3153 bp, synthetic construct
  misc_feature 1..3153: note = Description of Artificial Sequence: Synthetic coding sequence
  source 1..3153: mol_type = other DNA
atggctgccgtcaagaaggaggggggagccttatctgaggcaatgtcgcttgagggtgacgagtgggagctttccaaagagaacgtgcagccccttcgccagggtagaatcatgtccactctgcagggggcactggctcaggaatctgcttgcaataacaccctgcaacagcagaagcgcgcttttgaatatgagatccggttttacacaggcaatgaccctttggatgtatgggacagatatatttcttggactgagcagaactacccccaaggtggtaaagagagcaacatgtcaacacttctggaacgagctgttgaggctctgcagggggagaaacggtattactccgaccctcgttttcttaacctgtggcttaagctcggacgtctgtgtaatgagccccttgatatgtatagctacctgcacaaccaggggattggcgtttccctcgcccagttctacatttcatgggctgaagagtacgaggctcgtgagaacttccgtaaagcagatgccatatttcaggagggtatccagcagaaggctgaaccgctggagcgcttgcaaagccagcatagacagttccaggccagggtcagtcggcagactttgctggccctcgaaaaggaggaagaggaagaagtatttgaatccagcgttccacaacgctccacactagccgagttgaagtctaaaggtaagaagaccgccagagccccaatcatccgtgtcggaggcgctctcaaggcccctagccagaacagaggcctgcagaacccctttccccaacagatgcaaaacaattccaggattacggtgtttgacgagaatgccgacgaagctagcaccgccgagttatctaaaccaacggttcagccatggatcgcccctccaatgccccgagcgaaagagaatgaactgcaagccggaccatggaacacaggtcggtctctagaacaccgaccgcgagggaataccgcatctctcattgctgtcccagcagtgttaccatctttcacgccctacgtcgaagaaaccgcacggcaacctgtgatgactccttgtaagatagaaccaagtatcaatcacatcctctctacacgtaagccagggaaggaggaaggtgatcccctgcagcgggtgcagagccatcaacaggccagcgaggagaaaaaggaaaagatgatgtactgtaaagagaagatctatgcgggagtcggcgagttctcttttgaagaaatccgggctgaggtgttccgtaagaagctgaaggagcaacgagaggccgagctgcttacatcagctgagaagcgggctgagatgcagaagcagattgaagagatggagaagaagttgaaggagattcagaccactcagcaggagcggacaggcgaccaacaagaggagacaatgccaactaaagagacaactaaactccagattgcgagcgagagccaaaaaattcccggaatgactctgtcaagctctgtgtgccaggtaaactgttgtgcccgagagacatccctggccgaaaacatctggcaggaacagcctcactctaagggccctagcgtgccatttagcatcttcgacgaattcctcctgagcgaaaagaaaaataagagcccacctgcagatccaccgagggtgttggcccagaggaggcccctggctgtgctgaaaacatcggagtccatcacctccaacgaggatgtgtcccctgacgtgtgcgacgaatttacagggatcgaacccctctccgaagatgctataattactggcttccgtaatgtgactatatgtcccaatccagaggacacatgtgattttgctagagcggctaggttcgttagcacaccctttcacgaaatcatgtccctcaaagacctgccttcagaccctgagcgcctcctgccagaggaagatttagacgtgaaaacatccgaagatcagcaaaccgcatgcgggactatctactcccagacccttagtatcaaaaagctgtccccaattattgaggactccagggaagccactcatagcagtggcttctccggatcctctgccagcgtcgccagtacaagctctataaagtgtctgcaaatccccgaaaagctcgaactgactaacgaaaccagcgaaaatcccacccaatccccatggtgcagccagtacaggaggcagctgctgaagagcttaccagagctatcagctagtgcagaactgtgcatagaagacaggccaatgcctaagctggaaattgaaaaagaaattgagctcggcaacgaggactattgcatcaagcgtgagtacttaatttgcgaagactacaaactgttttgggtagcccctagaaacagcgcggagttaaccgtgatcaaggtgtcgtctcagcctgttccctgggacttctatatcaacctcaaacttaaggaacgtcttaatgaagattttgatcacttctgttcatgttaccaataccaggacggttgcatcgtctggcatcagtatatcaactgttttaccctccaggatctgctgcagcatagtgagtacatcactcacgaaatcacagtgctcatcatttacaacctcctcacaattgtcgagatgttacacaaagcggagatcgtccacggggacctgagtcccaggtgcctgattcttcggaatcgtatacatgatccttatgattgtaacaaaaataaccaagccttgaaaattgttgacttttcatactccgttgatctgagagtccagcttgacgtgttcactctttcggggtttaggaccgttcagatcctcgagggacaaaagattctcgcgaactgtagctcaccttatcaggtagatctttttggaatagccgatctggcacacttgctgctctttaaagagcacctgcaggtgttttgggacggctcattctggaagctgagtcagaatatttcagaactaaaggacggagagctttggaataaattcttcgtcaggatcctgaatgccaacgacgaagccacggtttccgtgctgggggagttagctgctgagatgaatggcgtgttcgatactaccttccagagccatcttaataaggctctttggaaagtgggaaagctaacctcccctggagccctgctctttcagtag

SEQ ID NO: 27648 - DNA, 3195 bp, synthetic construct
  misc_feature 1..3195: note = Description of Artificial Sequence: Synthetic coding sequence
  source 1..3195: mol_type = other DNA
atggccgcagtcaagaaagagggcggagctctctcagaggctatgagccttgagggagacgagtgggaactgtctaaggagaacgtacagccactgaggcaggggcgaatcatgagtacattgcagggcgcactcgcccaggagagtgcctgtaacaataccctgcagcagcagaagcgcgcatttgaatatgagatccggttctacaccggaaatgatcccctcgatgtctgggacaggtgggtcttcctgtttcataaagataaccgtaacatcaatcgatatatcagctggaccgaacaaaattaccctcagggtgggaaagagagtaatatgtctacactgttagagcgggcagtcgaagccctacaaggggagaagagatactattcagatccgaggttcctaaatctgtggctgaaacttggccgtttgtgcaacgagccactagatatgtactcctacctgcacaaccaaggaataggggtgtcactcgcacagttctacatttcttgggcagaagaatacgaagccagggagaatttcagaaaggccgacgccatattccaggaaggaatacagcagaaagctgaaccgctggagcgcttgcagtcccagcaccgtcagttccaagccagggtgtctagacagacgctgttagccctggagaaagaggaggaagaggaagtgttcgagagtagtgtgcctcaaaggagcactctggctgagcttaaaagcaagggaaagaagacagctcgtgcacccatcattcgggtggggggagctttaaaggcgccatcccagaaccgcggacttcaaaatccttttccccaacaaatgcagaataacagtcgtattacggttttcgatgagaacgccgacgaagctagcacggctgagctgtcaaagccaacggttcagccatggatcgcaccacctatgcctagagctaaggaaaatgagctgcaagcaggcccttggaacacaggtaggtccctagaacatagaccacggggaaacactgctagcttgattgcggtgccagccgtgctgccaagctttacaccatatgtggaagaaactgcaagacaacctgtgatgacaccgtgtaaaatcgagccctcgattaatcacatattaagcacccgaaaacccggaaaggaggaaggggaccccctgcagagagtgcagagtcaccaacaggcctctgaggagaagaaagaaaaaatgatgtactgcaaagagaagatttacgcaggcgtcggggaattctcgtttgaggagatacgggcagaagtgtttcggaagaagcttaaagagcagcgggaagctgagcttcttacctctgccgagaagagggcggagatgcaaaagcagatcgaggagatggagaagaaactaaaagagattcagaccacccagcaagagcgtactggcgaccagcaagaggaaacaatgccaactaaggaaaccacaaaattacagatcgcttctgaaagccaaaagattccaggcatgactctgagcagctcagtttgtcaggttaactgctgtgccagagagactagcctggccgaaaatatctggcaggagcagccccattccaaaggaccttcagttcccttttcaatttttgatgaattcttgttatcagagaaaaaaaacaaaagccctcccgcagaccctccgagagttttggcacaacgacgccctctagcggttctgaagaccagcgagagcattactagtaatgaggacgtgagtcctgatgtttgtgacgaattcaccggtatagagcctttgagtgaagatgctattattaccgggttcaggaatgtgacaatttgcccgaaccctgaggacacgtgtgacttcgctagggccgcaaggtttgtgtctacaccattccacgagatcatgtccctcaaggaccttcctagcgatcctgagcggctgttacccgaggaagatcttgacgtcaaaacgagtgaggatcagcagacggcctgcggcacaatttattcacaaacgttgagcattaaaaagctctccccaattatcgaggacagccgggaggccacccactccagtggcttctccgggagttcggccagcgtagcaagtacctcctccataaagtgtttgcagattcccgagaaattagagttaacaaacgaaacctccgagaatcccacccagtcaccatggtgctcccaatacaggcggcaattgttgaagtctcttccagagctgtccgcaagtgccgagctgtgcattgaagaccgtcccatgcctaaactggagatcgaaaaggagatagaactgggtaatgaggactactgtattaaacgggagtacctgatctgcgaggattacaaactcttttgggtggctccaagaaatagcgccgaactgacagtgatcaaagtgagttcacagcctgtcccctgggacttttacatcaatctgaagctcaaggaacgattgaatgaagattttgaccacttttgtagttgctaccaataccaagacgggtgtatcgtgtggcatcagtatattaactgtttcactcttcaggacctcctccagcactccgagtatattactcatgagattacagtgctcattatctacaacttgctgaccattgttgaaatgttacataaggcggaaattgtgcatggcgacctgtcgccgagatgcctaatactacggaataggatacacgacccttatgattgtaacaagaacaaccaggcactcaaaattgttgattttagttattctgtggatctgcgtgtgcagctggatgtgttcacgctgtccgggttccggacagtccagatcctggaaggtcaaaaaattttggctaactgttcgagtccctaccaggttgacttattcggcattgcagacctcgctcacttactgctgtttaaggaacatcttcaggtgttctgggatggcagcttttggaagctgtctcaaaacatcagtgaactcaaggacggggaactgtggaacaagttcttcgtgaggatcctgaatgctaatgatgaagctacagtgtcagttctcggggagttagccgctgagatgaacggagtgttcgacaccaccttccagtcacatctaaataaagccctctggaaggtgggcaagctcacgtctcccggtgcgttgctgtttcaatag

SEQ ID NO: 27649 - DNA, 2802 bp, synthetic construct
  misc_feature 1..2802: note = Description of Artificial Sequence: Synthetic coding sequence
  source 1..2802: mol_type = other DNA
atggctgcggtcaaaaaggagggtggggcattatctgaagctatgtcattagagggggatgagtgggagctgtccaaagagaacgtgcaaccattacggcaggggagaatcatgtctactctccagggggctctggcccaggaatctgcatgcaataatacgcttcagcagcagaagcgagcattcgaatacgagataagattctatacaggcaacgatcctctggacgtctgggaccgctatatatcatggaccgagcagaactacccacagggcggtaaagagagtaacatgtcaacgcttctagagagagctgtcgaagcccttcaaggggaaaatttttggaaggcggatgcaatcttccaggaaggcatccagcagaaggccgaacctttggagagactgcagagccagcatagacagtttcaggcgcgagtgagtagacaaaccctcctggctttggaaaaagaggaagaggaggaagtttttgagtctagcgtgccccagagaagcactttggccgaactgaaatcgaaaggtaaaaagaccgcacgcgctcccatcatcagggttggcggtgcgttgaaggccccttcccagaaccggggtctgcagaacccatttccccaacagatgcagaataattcaaggatcaccgtcttcgacgaaaacgctgacgaggcctccaccgccgagctgtctaaacccaccgtgcagccttggatagcgcctcccatgccacgagctaaagagaacgaactgcaggctgggccatggaataccgggaggtcattggagcacagacctagaggaaataccgcctcactgattgccgtacctgccgtgttgccctcatttactccttatgtcgaagaaacggctaggcagccggtcatgaccccctgtaagattgagccctcgataaaccacatcctctcaactaggaagcctggaaaggaggagggcgacccactgcagcgggtccaatcccaccagcaagcgagcgaggagaagaaagaaaagatgatgtactgcaaagagaaaatctatgctggagtcggagagttctcattcgaggaaatccgtgctgaggtttttagaaagaaactgaaagagcaacgggaggcagagcttctgaccagcgcggaaaagcgtgctgagatgcagaagcagatcgaagaaatggagaagaagctgaaagaaatacagaccacacagcaggaaaggactggagatcaacaagaagaaacaatgcctaccaaagagacaaccaagttgcagatcgcttccgagtcgcagaaaatcccaggcatgaccttgtccagctcagtgtgccaggtcaattgctgtgccagagaaacgagcctggcagaaaacatctggcaggagcagcctcattctaaggtgtccctctctctcggcccaagtgtgcctttctctattttcgacgaatttctcttatctgagaaaaagaataaatcaccacccgcagaccccccaagggtcctggcccagaggaggcctcttgctgtactgaaaacctccgagtcaatcacttccaacgaggacgtatccccagatgtctgtgatgaattcaccggtatagagccgctgagcgaggacgctattattactggctttagaaatgtgacaatatgccctaatcctgaggacacacgggaagcaactcactcaagtgggttttccggttcttcagcctctgttgcctccacctcctcgattaagtgtctccagatcccagaaaaattggaactgacaaacgagaccagcgagaatcccacacaatctccctggtgcagccaataccgccgacagttactcaagagtttgccagaactgtcagcatctgctgaactgtgcattgaggacaggccaatgccgaagctcgagattgaaaaagagatcgaactgggcaatgaagactactgtattaagcgagaataccttatctgcgaggactacaagctgttctgggtcgcgccacgtaacagcgccgaactgacggtcattaaagtgagcagccaacctgtgccttgggacttttatatcaacctaaagttaaaggaaaggcttaacgaggactttgatcatttctgctcgtgttaccagtaccaggacggctgtatagtgtggcatcaatatataaattgtttcacgctccaggatctactgcagcattctgaatacataacgcatgagatcacagttcttattatctataacctgctgacaattgttgaaatgctacacaaggctgagatcgtgcacggagacctctctccaaggtgtttgatccttcgaaataggattcatgacccgtatgattgcaacaagaataatcaggcccttaaaatcgtggatttcagctattcggttgatctgagggttcagttagacgtatttactctcagcggctttaggacagtacagatactcgagggccaaaaaattttagccaattgttcctccccctatcaggtggatctgttcggcatcgccgacctggcccacttgttgctgttcaaagagcatctccaggtcttctgggatggaagcttctggaagctctcccagaacatttcagaactcaaggacggagagttatggaataagttctttgttcggatcttgaatgcgaatgacgaagccaccgtcagcgtgctgggggaactcgcggctgagatgaatggtgtctttgacacgacgttccaatcacacttgaacaaggccttgtggaaggtcggaaaattgacaagcccgggagcccttctgtttcagtag

SEQ ID NO: 27650 - DNA, 3393 bp, synthetic construct
  misc_feature 1..3393: note = Description of Artificial Sequence: Synthetic coding sequence
  source 1..3393: mol_type = other DNA
atgctggaaatttgtctgaaactggttggatgcaagtcgaaaaaaggtctgagctcttcgagtagctgctacctggaggaagccctacaaagaccagtggcgagcgactttgagccacagggccttagtgaagctgcgaggtggaacagtaaagagaatctgctggccggtccgagcgagaacgatcctaacctttttgtggctctgtacgactttgtagcatctggagacaacacactgtccattacaaaaggcgaaaagttgagggtccttggatacaatcacaatggagagtggtgcgaggcacagaccaagaatggtcaagggtgggtcccctcaaattacattacgccagtgaacagcttggagaagcactcatggtatcatggacctgtctcgagaaatgctgctgaataccttctgtccagtggtattaacggtagttttctggtacgggagtcagaaagtagcccagggcagaggtccatctctctgaggtatgaaggacgtgtttatcattaccggatcaacacagcttccgacggcaagctgtacgtctcttctgagtcccgctttaacaccctggctgagctggtgcaccatcactctactgtggcggatggcctcatcactactttacattatcccgctcccaagcggaataagcccactgtgtacggagtgtccccgaactacgacaaatgggagatggagaggacagatattacgatgaaacacaaactcggagggggacaatacggggaggtatatgagggggtgtggaagaaatatagtcttactgtcgccgtcaagaccctgaaggaggacacaatggaggtcgaggagttcttgaaagaggcagcggttatgaaagaaattaagcatcccaacttggttcagctactgggcgtgtgtacacgagagcccccattttacatcatcaccgaatttatgacatacggaaacctcctggactatttgcgagaatgtaatcggcaagaggttaacgctgtcgtgcttctgtacatggctacacaaatctcaagcgctatggagtatctcgagaaaaagaacttcatacacagggacctggccgctcgtaattgcctcgttggcgaaaaccatttagtgaaagttgctgactttggactgagtagactgatgacaggcgatacgtacactgcacacgccggtgctaagttccctataaaatggaccgccccagaatctctggcatacaacaaattttccataaaatccgacgtgtgggcttttggagtgcttctatgggagatcgccacctatggcatgagcccatatccaggcatagatctgagtcaggtatatgagttgctagagaaggactaccgcatggaacgtcctgagggatgccccgaaaaagtctacgagcttatgcgcgcatgctggcaatggaacccttctgataggccctctttcgctgaaattcaccaggcattcgagactatgtttcaggagtccagcatcagtgatgaagtcgagaaagagttaggaaaacagggggtcagaggagctgtgtccactctgctgcaggctcccgagctccctacgaaaacccggactagccggcgagctgctgagcaccgcgatacgactgatgttccagaaatgccgcattctaaggggcagggtgaaagcgatccacttgaccatgaaccggctgttagccctctgctccctagaaaggagaggggccctccggagggcggactgaatgaggatgagcgactactgcccaaggacaagaaaacaaacttgtttagcgcactcattaagaaaaagaagaaaacagcacccactcctcccaagcgtagctcaagctttcgggagatggatggccaaccagagaggagaggcgctggagaagaggaagggagggacataagtaacggcgctctcgctttcacccctcttgatacggctgaccctgccaagagtcccaaaccctctaacggtgccggagtgcccaacggtgcgttaagggagtcaggaggttctggctttcggtctccccacctctggaagaaatcgagcactttgacgtccagccgcctcgctaccggcgaagaggaaggaggcggttcctcttccaagcggttcttgcgcagctgttcagctagctgcgtgccccatggcgctaaagataccgagtggcgtagtgtcaccctgcctcgggaccttcagtcaacaggcagacagttcgactccagcacatttggaggacataagtcggagaagccagctctccccaggaagagggcaggtgaaaatcggtccgaccaagtgactaggggaacagtcacacccccacccagattggtcaaaaagaacgaggaagctgctgacgaagttttcaaggacataatggaatcctcccccggatcctcaccccctaatctgacaccaaagccattgcgaagacaggtcacagtggcccctgcatccggccttcctcataaggaggaggcagggaagggctctgctcttggcactccggcagcagcagagcctgtgactcccacctctaaggccggaagtggcgctccaggcggtacctctaaaggtcctgcagaggaatctagggtccgcaggcataaacattcttctgaatctccaggcagggacaagggtaaactcagccgactgaagcccgcacccccaccccctcccgctgcttctgctgggaaagccggtggcaaaccctcacagagtccatcccaggaggcggcaggggaggccgtgctcggtgccaaaacaaaggccacatccctcgttgatgcagtcaactcggacgccgcaaagccatcccaacctggcgaaggactgaaaaagcctgtgctacctgctacacctaagccacagagcgctaaaccctcagggacccctatcagcccagcacctgtgcctagtacactgccttccgcttcgtccgccctggcaggagaccaacccagcagcactgcctttattccgcttatcagtactagagtcagtcttagaaaaaccaggcaaccgcctgaaagaattgcctccggggcaatcacaaagggcgttgtcctagactctactgaggccttgtgtttagcaataagccgtaacagcgagcagatggcctcccatagcgcagtactcgaggccggaaaaaatctgtacaccttctgcgtctcctacgtggattctatccagcagatgcgcaacaaatttgctttcagagaggcgatcaataagttagaaaataatcttcgtgaactgcagatctgtcctgccaccgcgggatcaggccctgccgctacgcaggacttcagcaaattgttaagctccgtcaaggaaatcagcgatatagtgcagcgctag

SEQ ID NO: 27651 - DNA, 3450 bp, synthetic construct
  misc_feature 1..3450: note = Description of Artificial Sequence: Synthetic coding sequence
  source 1..3450: mol_type = other DNA
atgggtcagcaaccgggtaaggtgttaggcgaccagcggcgtccatcgctgccagctctccatttcattaagggagctggtaagaaagaatcctccaggcatggaggacctcactgcaatgtctttgtggagcacgaggccctgcagaggcccgtggcaagcgatttcgagccgcagggactttctgaagccgcacgttggaactccaaggaaaacttactggcaggtccttcagagaatgatccaaatctgtttgtagcactctatgattttgttgcctcaggcgacaacaccctgtccatcacaaagggtgagaaactcagagtcttgggctacaaccacaatggtgagtggtgcgaagctcagacaaagaacggtcagggctgggtgccgagcaattatattaccccggtcaattccttagagaagcactcgtggtatcatggccctgtctcccggaatgcagcggagtatctcctgtcctccggtatcaacggcagtttcctggtgagggagagcgaaagctctccagggcagcggagcatatctttgaggtacgagggtagagtataccactacaggataaataccgcaagcgacggcaagctatatgtgtctagtgagtcccggttcaatactctggcggagctagtacaccaccacagcacggtggctgatgggctgataacgacgctccattatcctgcccctaagaggaataagccgacagtgtacggagtatctccgaactatgacaaatgggagatggaacgcaccgacatcacgatgaagcacaagcttggcggaggtcagtatggtgaggtgtatgagggggtctggaaaaagtacagcctgaccgttgctgtgaagactctaaaagaggataccatggaggtcgaggaattcctgaaggaggctgccgtgatgaaggaaatcaagcaccccaacctcgtgcaactgctgggcgtgtgcacaagggaaccgccattctacataatcacagagttcatgacctatgggaatcttctggactatcttagggagtgtaatcgccaggaagtgaacgctgtggtgctgttgtatatggccacccaaatcagtagtgcaatggagtatctcgagaagaagaattttatacacagggatttggctgctcggaactgtctagtaggcgaaaatcatctcgtgaaggtggcagatttcggtctgtctaggttaatgaccggagacacatatactgcgcatgccggagctaaattccctatcaagtggaccgctcccgagtctctggcatataataagttcagcattaagtcagacgtgtgggccttcggcgtcctcctgtgggagatcgccacttacggcatgagcccttatcccggtatcgatcttagccaagtatatgagctccttgagaaggattatagaatggagcgaccagagggttgccctgaaaaagtttatgaactcatgagggcatgctggcagtggaacccctccgatcgacctagttttgccgagattcaccaggcgttcgaaacaatgtttcaggagagttctattagcgacgaagttgaaaaggagctcggcaaacaaggtgtgcgcggagcagtgagtactttgctccaggcccctgaacttccaactaagactaggactagccggagggcagccgagcacagagacacaaccgatgttcccgagatgccccactccaaaggacagggtgagtccgacccactggaccatgagccagccgtctccccactgttgccacgaaaggaaagaggcccacccgaggggggtctgaacgaagacgagcggctcctgcccaaagataagaaaacaaacttgttcagcgcgctgatcaaaaaaaaaaaaaagaccgccccaacacctcccaagagatctagttcgttcagggaaatggatggtcagccagagaggcgcggagctggcgaagaggagggccgtgacatcagcaatggcgctctggcatttaccccgctggacacagccgatccagcaaagtcccctaaaccctcgaatggggcaggagtgcctaatggcgctctgcgtgaatctgggggatctggattcaggtctccccacctgtggaagaagagctccactcttacatcctcaagactcgccactggggaagaagaaggaggtgggtccagctccaaaaggtttctccgatcctgttctgccagctgcgtgccacacggagccaaggatactgaatggaggtctgttactctaccccgtgaccttcaatcaaccggcaggcagttcgattcaagcacatttggcggacacaaatctgagaaaccagccctgcctcgcaaacgggctggtgaaaatagatccgatcaggtcactagggggacggtgacccccccaccacgcctggtgaaaaaaaatgaggaggcagctgacgaggttttcaaagacattatggagtcctccccagggagttccccgcctaatctgacaccaaagcccctgcggcgacaagtaaccgtagcgcctgcttccggactccctcataaagaagaggccggaaaaggatctgctttgggcacacctgccgcagctgagcctgtaaccccaacaagtaaggccggtagcggtgcacctggcggtacaagtaaaggacccgctgaagaatctagagtgcggcgtcataagcatagcagcgaaagtcctggcagagacaaaggcaagctcagccggttaaaacccgcaccacctcctcctcctgctgccagtgccggtaaggctggaggcaaaccctcacagtccccctcgcaagaggccgctggtgaggctgtgttgggagcaaagacaaaagccacatcgcttgtggatgctgtaaacagcgatgcagccaaaccttcacagccaggagaagggctgaaaaagcctgtgctgcctgccactccaaaaccccagtccgccaagccgtccgggactccaatctcccccgctcccgtgcccagtacactgccctctgccagttctgccctggccggtgaccagccatccagcactgccttcatacccctaattagtaccagggtctccctgcgtaagacgagacagcccccagaaaggatcgccagcggagccatcaccaaaggtgtagtgctcgattctaccgaggccttgtgtctggcgatcagccggaacagtgagcagatggcgtcgcattctgcagtgttggaagccggaaagaacctgtacacattctgcgtgtcgtacgtggacagcattcagcagatgaggaataaatttgccttccgggaggctatcaacaagctagagaataacctgcgcgaactgcagatttgccctgcgacagctggcagcggcccagcggcaacccaggacttttcaaagctgctttcaagcgtgaaggagatctccgacatcgttcagcggtag

SEQ ID NO: 27652 - DNA, 195 bp, synthetic construct
  misc_feature 1..195: note = Description of Artificial Sequence: Synthetic coding sequence
  source 1..195: mol_type = other DNA
atgggtcagcagcctggaaaggttctgggggatcagagaaggccttccctgcccgcactgcattttataaagggagctgggaaaaaggagagcagtcgtcacggaggaccccattgtaacgttttcgtggagcaggccctgcagcgtccagtggcatccgattttgaacctcagggacttagtgaggcagcttag

SEQ ID NO: 27653 - DNA, 486 bp, synthetic construct
  misc_feature 1..486: note = Description of Artificial Sequence: Synthetic coding sequence
  source 1..486: mol_type = other DNA
ggcaggcccggtaggtcccgggcaagaggcggtggtgaggggggttggcgaggagggggaagagcaggtagggcagggcctgagcctggacccagggcagggaggggggtgcctgcgccagactgttggagaggaaaaatgttggagatttgtctgaaactcgtgggctgcaagagtaagaaagggcttagttccagctcaagttgttatctggaggaagccctgcaaagacctgtggccagcgatttcgagccccaggggctgagtgaagctgctcgctggaactccaaagagaacctgctcgctggaccctctgagaacgatccaaacctcttcgtggccttgtatgactttgtcgcttccggcgacaacacactgtctatcacaaagggagaaaagcttcgggtccttgggtataaccacaacggagaatggtgcgaagcacagaccaagaacggacaaggttgggtgccctcaaattactag

SEQ ID NO: 27654 - DNA, 2838 bp, synthetic construct
  misc_feature 1..2838: note = Description of Artificial Sequence: Synthetic coding sequence
  source 1..2838: mol_type = other DNA
ctgaggctgttgcgcgagcccctgcagcatccagggagagtcgggagcagttcattcaacggaggcagacgcgcacaccaccacgccccactgagcagcccaaaggctcagcaggcacactgcctatggtgtgtgcctcagctgcggcaagtgggagacggcacgcacgggcatcatcatgaggcacagggaggaggccagtatggagaggtgtacgagggcgtgtggaaaaaatacagcctgacagtggcagtgaaaaccctgaaagaggataccatggaagtagaggagtttctcaaggaggcagccgtcatgaaagaaataaagcacccaaacctggtgcagttgctgggggtgtgtacacgggagcctcccttttacataataactgagttcatgacatacgggaatctgttggactatctgcgcgagtgcaacagacaggaggtcaacgcagtcgttcttctgtacatggccactcagattagtagcgctatggaatacctggaaaagaaaaattttatccacagggatctcgcagccagaaactgccttgtcggagaaaaccacctagtgaaggtggccgactttgggctgagtagactgatgacgggtgatacttacacggcccacgccggtgctaaatttcctatcaaatggaccgccccagagagccttgcttacaataagtttagcataaaaagcgatgtttgggcattcggagtgctgctctgggagattgcaacatatggcatgtcaccctacccaggcattgatctgtcccaagtttatgagctgctggaaaaagactataggatggagcggccagaaggttgcccggaaaaagtgtatgaactcatgcgggcatgctggcagtggaatcctagtgatcgcccatctttcgctgagattcatcaggcgttcgaaaccatgttccaggagtccagcatttccgacgaagtggaaaaagaacttggcaagcagggggtacgcggagcagttagcacactgttgcaggccccagagctgcccactaaaaccagaacatcaagacgagcagcggaacaccgcgacacgaccgatgtgcctgagatgccccatagtaaaggtcagggggaatcagacccgcttgatcatgaaccggctgtgtcccccttgctgccaaggaaggagcgaggccctcccgagggcggactcaatgaagatgagcgtctgctgccaaaagataaaaagactaacctgttctcagccctgatcaagaagaaaaagaagactgctccaactccacccaagcgctctagttccttccgggaaatggacgggcagcctgaaagacgcggtgccggagaggaagaaggtcgcgatatcagcaatggggcactggcattcacccccttggacacggctgatccggctaagtccccgaagccatcaaacggcgcaggggtacctaatggagcacttcgcgagtctggcggtagcggcttccgctccccccacttatggaagaaaagctcaaccctcacatctagtcgccttgctaccggagaagaagaaggcggtggttcatcttctaagcggtttctgaggtcatgttcagcctcttgcgtgccacacggagctaaggacacggagtggcgaagtgtaactcttccacgagacctgcagtcaactggcaggcaattcgactcttccaccttcgggggacataagtcggagaaacctgctctgccgaggaaacgagcaggtgagaaccggtccgaccaagtgactcgcggaactgtaacgcccccacctcgcctggtgaagaagaatgaggaggcagcggacgaagtctttaaggacatcatggagagctcacctggtagttctccccctaacctgactccgaagcccctgcgcagacaagtcactgtggctccagcctctggtctcccacacaaagaagaggccggaaaaggttctgccctgggcacacccgctgcagcagaacccgtgacaccaacctctaaggccggtagtggggcacccggaggtacgtctaaaggcccagccgaagaatcgagggtgaggcggcacaagcactcttcagagtcacccggaagagacaaaggcaagcttagcagactgaagccagcacctccacctcctccagccgcaagcgccggaaaggccggtggcaaaccttcccagtctccctcacaggaggcagcgggtgaggccgtgttaggggctaaaacaaaagccacatctttggttgacgcggtaaatagcgatgctgctaagccgtctcagccgggagagggactgaaaaaaccagtccttccggctacccccaaacctcagtccgcaaagccaagtggtacccctattagcccagctccagtgccctctacgctgccttcagcctcgtccgccctggctggagatcagccgtcatcgacagcattcatccctcttatttcaaccagggtgtctcttaggaaaacaagacaaccgcctgaaaggattgctagcggcgcaattacgaagggagtggtccttgactccaccgaggcgttatgcctggcaatcagcaggaactccgagcagatggccagccacagcgctgtgctggaagccggaaaaaatctctatacgttttgcgtaagctatgtggatagcatccagcagatgcggaacaaatttgccttccgcgaggcgatcaataagctggaaaataacttacgagaactgcagatctgccctgcaacggccggaagcggtcccgctgcaacccaggatttcagcaagctcctgtccagtgtaaaggaaatcagcgatatcgtgcagagatag

SEQ ID NO: 27655 - DNA, 2649 bp, synthetic construct
  misc_feature 1..2649: note = Description of Artificial Sequence: Synthetic coding sequence
  source 1..2649: mol_type = other DNA
atgggcccatggtctaggagtctatctgcattgctgcttctgcttcaagtgagctcttggctctgccaggaacctgagccatgccatcccggtttcgacgcagaatcctacacattcaccgttccacgtcggcacctggagagagggagagtcctgggaagggtgaactttgaggattgtacagggcgacagcggactgcgtattttagccttgacacaaggttcaaggtcggaacagacggggtgattaccgttaagcggccacttagatttcataatcctcagatccactttctcgtctatgcctgggattctacatacaggaagttttctacaaaagtcacactgaatacagttggccaccatcacagaccgcctccacatcaggcaagtgtcagcggaatccaagccgaactgctgacctttcccaacagcagccctggcctgcgcagacagaagcgggactgggttattccacccatctcttgtcctgagaacgagaaggggccattccccaaaaacctggtgcagataaagtctaacaaagataaggagggcaaggtgttttattcgatcacagggcagggagccgacaccccccctgtaggagtgtttatcatcgagagagagaccgggtggctgaaggtgaccgaacctctcgacagggaaagaatagccacctacaccctctttagccatgctgtctccagcaacggcaatgccgtggaggacccaatggaaattctcatcaccgtaaccgaccagaatgacaacaaacctgagttcactcaagaagtgtttaagggctccgtaatggaaggtgcccttccaggtacgtccgtgatggaggtcactgccactgatgccgatgatgacgtgaacacttacaatgcagcaatcgcttacacgattctatcccaggaccccgagctccccgacaaaaacatgttcacaattaaccgcaatacaggcgtgatctccgtcgtgaccacaggcctggatcgcgagagcttcccaacatatacgctagtcgtgcaggctgcagaccttcagggggaaggactatccactacggcaaccgcagttattactgtgacggacacaaacgacaatccgccaattttcaatcctaccacctacaaagggcaggtgcctgagaatgaggcaaacgtcgtgattaccactttaaaagtcactgacgccgatgccccaaatacacccgcttgggaagctgtctatactatcctgaacgacgacggtgggcagtttgttgtaaccactaatcccgtgaacaatgatgggatcctgaagaccgcgaaaggcttggattttgaagccaagcagcagtatattctccacgttgctgttacaaacgttgtgcccttcgaggtgagtttgacaaccagcaccgccacagtgacggtggacgttctggacgtgaatgaagctccgatctttgtccctccagagaaaagggtggaagtttccgaagatttcggtgtgggccaggaaattacgtcctatacagcacaggaacccgatactttcatggagcagaagattacttatcgcatctggcgcgataccgctaattggctggaaataaatcccgatacaggagccatctctacacgagctgagctggaccgagaggattttgagcatgtaaagaactctacatacactgcactcatcatcgccactgataacgggtctccggtcgctactgggactggcaccctcctgctgattctgtctgacgtgaacgacaatgccccaattcccgaacccaggaccatcttcttctgtgagaggaaccccaagccccaggttatcaacatcattgatgccgatcttcctccaaatactagtcctttcaccgccgaattgactcatggtgctagcgcgaactggaccatccagtataatgaccccacccaggaatcaatcatacttaaacccaagatggccctggaggtgggagactataaaatcaatctcaaacttatggacaaccagaacaaggatcaggtgacgactctggaagtctccgtatgcgactgcgagggcgcagccggtgtctgcagaaaagctcagccagtggaggcgggattgcagatccctgccatactcgggatcctgggcggaatcctggccttactgatccttattttactcctcctcctgttcctgaggagaagggccgtggtgaaggaacccttgttacccccagaggatgacacacgggataatgtgtattactatgacgaagaggggggtggggaagaggatcaggattttgatctgtcacagttacacaggggactggacgctcgcccagaagtgacccgcaacgacgtcgcaccgaccctgatgtcggttccacggtacctcccccgtcctgcaaacccagacgaaataggcaattttatcgatgaaaatttgaaagcagccgatactgaccccaccgcaccaccgtacgacagcctccttgttttcgattacgagggaagtggaagcgaggcagcctctctgtcttccctcaattcctcagagtcagacaaagaccaagattatgattatttgaacgaatggggcaataggttcaagaaattagcagatatgtacgggggtggcgaagatgattag

SEQ ID NO: 27656 - DNA, 1944 bp, synthetic construct
  misc_feature 1..1944: note = Description of Artificial Sequence: Synthetic coding sequence
  source 1..1944: mol_type = other DNA
atgggaccttggtcccgctcccttagcgccctgctgctccttttgcaggtgagttcttggctctgtcaggagcctgagccttgccaccccggttttgatgctgagtcctacacatttacagtgcctcggaggcatctggagcgcggaagagtcctgggcagagttaacttcgaggattgtacaggccgtcagcgtactgcctattttagcctggacactcgctttaaggttgggacagacggcgtcattacagtgaagcgaccactgcgcttccataatccccagatccatttcttggtgtatgcctgggactccacctaccgaaaatttagtactaaggtcaccctcaacaccgtaggtcaccatcatcgcccaccccctcaccaagctagtgttagtggcattcaggcggaacttctgacttttcccaattccagccctggtctgaggcggcagaaacgtgattgggtgattcctcccataagctgcccggagaacgagaaaggtccgtttccaaagaacttagtacaaatcaagtcgaacaaagataaagagggaaaagtgttctacagcataactggtcagggtgcagatacccctcccgtcggcgtgttcatcatcgaacgggagacgggctggctcaaggtgactgaaccactggatagggagcgcatcgcaacatacaccctcttcagtcatgccgtgtccagcaatggcaacgccgtcgaggaccccatggaaattctcatcacagtgactgatcaaaatgataataagccagagtttacacaagaggtgttcaagggttcagtcatggagggggcactgccgggaacaagcgtcatggaggtgactgctacagacgccgacgacgacgtcaacacctacaacgctgctatcgcctacactatcttgtcacaagaccccgagctgccggacaagaacatgttcaccattaaccgaaacaccggggttatatcagtggtgactaccggtttggatagggaatccttcccaacctatacacttgtggtgcaggccgctgacctacaaggagagggactgtctactactgccactgccgtcataaccgtgactgatacgaatgacaatcctcccatcttcaacccaacaacgtacaaggggcaggttcccgagaacgaagccaatgtggtgatcaccactctaaaggtgactgacgcagacgcacccaacacaccagcctgggaggctgtgtataccatactaaatgacgacggtggccagttcgtggtgaccactaaccccgtgaacaacgacggcatcctgaaaaccgctaaggggctcgacttcgaggccaagcagcaatatattctgcatgtggccgtcactaatgtggtaccctttgaggtgagcctaactacttccaccgccacagtgacagtggatgtccttgacgtaaacgaggctccgatttttgtaccccctgaaaagagagtcgaagtgtcggaagacttcggggtgggccaggaaattactagctatacagcccaggaacctgatacgtttatggaacagaaaatcacttatcgaatttggcgcgataccgcaaactggttggagataaatcccgataccggcgcaattagcacgagggctgaattggaccgggaggactttgagcatgtgaaaaacagtacctacacagcgttgattattgccaccgacaatggttctcccgttgccaccggcaccggcactcttttgctgattctatcggatgtcaacgacaacgccccaataccagaaccacggaccatattcttttgtgagcgtaaccccaagcctcaggtgatcaatattatagacgccgatctcccccctaatcttgccagtcaatcaattggaataacggacatgagtcactgtacatgccccgcacctcagttacccgcaatcttttag

SEQ ID NO: 27657 - DNA, 2703 bp, synthetic construct
  misc_feature 1..2703: note = Description of Artificial Sequence: Synthetic coding sequence
  source 1..2703: mol_type = other DNA
atggggccttggtcacgtagtctatcagctctgctgctgctcttgcaagtgagcagctggctgtgccaagaacctgaaccttgccacccaggcttcgatgcagagtcatacacatttactgtgccgcgacgccacctggagcggggaagagtcctcggtagagtgaatttcgaggattgcactgggagacagaggactgcttatttttcactcgataccaggttcaaggtgggaacggatggggttatcactgtgaaacgcccactgagatttcacaacccgcagatccactttctggtatatgcgtgggattctacctatcgaaagttctccacaaaggtgacgcttaataccgtgggacaccatcaccggccacctccccaccaagcttcagtatccggtattcaggcagagttgctgacgttccccaactcaagtcctggcctgcggagacaaaagcgggattgggtgatccctccaattagctgcccggaaaacgagaagggcccattccctaaaaacctggttcagatcaagtccaataaggacaaggaggggaaagtcttctattctattaccggccagggagccgatacgccaccggttggtgtgttcatcatcgagagagagactgggtggctcaaggtgaccgaaccactggaccgcgagcgtatcgcgacttacaccttgtttagtcacgcggtgtcaagtaacgggaatgccgtggaggatcccatggagatcttgattaccgtcactgatcagaatgacaataaaccagagttcactcaagaggtttttaaaggtagtgtcatggagggggctctcccaggcacaagtgtcatggaggtgactgctacggacgctgacgacgacgtgaatacctacaacgcagctattgcttacacaattctgtctcaggaccctgaactgcctgataagaatatgtttaccatcaaccgaaacacaggcgttataagcgtggtgacaaccggtctcgaccgcgagtccttcccgacctatacactcgtggtccaagccgcagacctgcagggcgagggcctgtcaactacagctaccgctgtcataactgttacagataccaacgataaccccccaatctttaacccaacaacttacaaaggccaggttcccgagaatgaagcaaacgttgtaattacgactctgaaggttactgatgctgatgcccctaatacccctgcttgggaggctgtttatacaatccttaacgacgacggtggacaatttgtcgtcacaaccaacccagttaacaatgacggaattttaaagaccgcaaaattggcccgttgcagaaactggcacccccatagttgctcctacccatgccctctcggtttggattttgaagcaaagcagcagtatattctgcacgtggcagtgacaaatgtcgtgccattcgaggtgtcgcttactacttccaccgcaaccgttaccgtagacgtgttagacgtcaatgaagcccctatctttgtgccaccggaaaagagggtggaggtttctgaagactttggcgtgggacaggagatcacgagttacacggcccaggagccagatacatttatggagcagaaaataacctataggatttggagagatacagccaactggttggaaatcaatccagatactggcgctatatccacacgcgctgagctcgacagagaagatttcgaacacgtgaagaattcaacttatacggcgctgatcatcgctacggataacggctccccggtcgccacgggaacaggcacattgctgctgatcctgagcgacgttaatgataatgcgccaattcctgaaccacgcaccattttcttctgtgagcgcaatcccaagccacaggtcatcaacattattgacgcagatttgccccctaataccagcccctttaccgccgagcttacgcacggagcctccgctaactggactatccagtacaacgatccaacacaagagagcataatcttgaagccaaagatggctttggaggttggggactacaagatcaacctcaaactcatggataaccaaaacaaagatcaggtgaccacactcgaagtgtctgtctgcgactgtgagggcgcagcgggagtgtgccggaaggcccagcccgttgaagccggtctccagatccccgcaatactaggtattttaggcggaattttagctctactgatcctgattcttttactgctgctcttcctgagaaggcgcgctgtcgtcaaggagcctctgctccctccggaggatgacactcgcgataacgtgtactattatgatgaggaggggggaggcgaggaggaccaggacttcgatttgtctcagctgcaccgagggctggacgctcgccctgaagttactagaaatgacgtcgctcctacgctcatgagcgtcccccgatatctccctagaccagccaatcctgatgagatcggaaacttcattgatgaaaatctgaaggctgccgataccgacccaaccgcgccaccatacgacagcctgctggtgtttgactacgagggctccggatcggaagctgccagcctctcctctttgaacagttccgagtccgacaaggatcaggattatgattacctcaatgagtggggaaatcgctttaaaaagcttgcagacatgtacggcggaggcgaagacgattag

SEQ ID NO: 27658 - DNA, 2466 bp, synthetic construct
  misc_feature 1..2466: note = Description of Artificial Sequence: Synthetic coding sequence
  source 1..2466: mol_type = other DNA
atgggtccatggtccagatccctctccgccctactattactgctgcaggtttcaagctggttgtgccaggagcccgagccttgccatcctggctttgatgctgaatcgtacacatttacagtcccaagacggcacctggaaagaggaagagtgttagggagggtgaattttgaagattgcaccggaaggcagagaacggcttatttttctctggacacaaggttcaaagtgggcacagatggggtcattactgtcaagaggccgctacggtttcacaatccacaaattcacttcctggtatatgcctgggactcaacctaccgtaagtttagtacaaaagtgactctgaatacagtgggtcaccatcaccgaccccctccccatcaggccagtgtgtctggcatccaggctgagctcttgaccttcccaaacagcagccctggtcttaggaggcagaaacgcgattgggtcattccacccatctcatgcccagagaacgagaagggtccatttcctaaaaatctggtacagataaaaagcaataaagacaaggaaggtaaggtcttctatagtatcacgggccagggcgcagacaccccacctgtgggggtattcatcattgagagggagaccggatggctgaaggtcacagaacccttggatagagaaagaatcgccacatacaccttgttttcccatgcagtctcttctaacgggaatgccgttgaagatccaatggagatattgattacagtcacagaccagaacgataataagcccgaattcactcaggaagttttcaaaggaagtgtgatggaaggcgcactgcccggaacttctgtaatggaagtgacggcgaccgacgcagacgacgatgtgaatacctacaacgctgctatcgcttacaccattttgtcccaagatccggagctccctgataagaacatgttcaccatcaatcggaatacgggtgtgatttccgtggtgactaccggcctggatcgggagtctttcccaacatacacactggtggtacaagcagctgacctgcagggagaggggctatcaacgactgcaaccgcagtgatcacagtgacagacaccaatgataatcctccgatttttaatccaactacagggcttgacttcgaagcaaaacagcagtatattctccacgtggcagtgactaacgtggtgcccttcgaggtgtctcttaccaccagtacagcgaccgtgacggtcgatgtgctggatgtcaacgaagccccaatcttcgtgcctccggaaaagcgagtcgaggtgagcgaagactttggcgtgggacaagagattacttcttatactgcccaggaaccagatacctttatggagcagaaaataacttaccggatttggcgagacacagccaactggttggaaatcaatccggacactggcgcaatctctacaagggcagagctcgatagagaagatttcgagcacgtgaaaaatagcacctatactgctctaatcatcgctaccgacaatggatctcctgtggctactggaacaggtactcttctgctcattctcagtgacgtcaacgacaatgcccctatacctgagccaagaaccatctttttctgtgagcggaatcccaagccacaggtgattaatataattgacgccgacttgcctcccaacacaagtcccttcaccgctgagctgacacacggcgcaagcgccaactggacgatccagtacaatgaccccactcaggaaagcatcattctgaaacccaagatggctcttgaggtgggagactataaaatcaacctcaaactaatggacaatcagaataaagaccaggttaccactctagaggttagtgtgtgcgattgcgaaggggctgccggagtgtgtcggaaggcccagccggtggaggccggtctgcagatcccggcaattcttgggatactggggggaatcctggctctccttatcctgatcctccttctcctgttgtttttgcggcgtagggctgttgtcaaagagcccctgctgccgcctgaagacgatacccgggataacgtgtactattacgatgaggaaggtggcggagaggaggatcaggatttcgacttatcccagctgcatagaggtttggatgccagacctgaagtaactcgtaatgatgttgctccaactctgatgagtgtgccaaggtatctgccacgccctgcaaaccctgatgaaattggcaattttatagacgaaaatctcaaggcggctgataccgaccctactgcgccaccatatgattctctcctggtgttcgattacgagggctctggctcagaagccgctagcttatcctctctgaactcctcggaaagcgacaaggaccaggattatgactatttgaatgagtggggtaaccgctttaaaaagttggccgacatgtatgggggaggcgaggacgattag

SEQ ID NO: 27659 - DNA, 2391 bp, synthetic construct
  misc_feature 1..2391: note = Description of Artificial Sequence: Synthetic coding sequence
  source 1..2391: mol_type = other DNA
atgaaagagaattattgtctgcaggccgctctggtttgcctagggatgctgtgccattctcacgccttcgctccggaacggagagggcacttacgtccaagctttcacggacatcatgaaaagggaaaggagggtcaggtgctgcagcgatctaaaagaggctgggtgtggaaccagttctttgtcatcgaagaatacacaggccctgatcccgtgctggttggcagactgcattccgacattgacagtggcgacggcaacattaaatacatcctctccggtgaaggtgccggtactatttttgtgatcgatgacaaatccggaaatatacatgcaacaaaaaccctggatagggaagaaagggcccagtacactttaatggcccaagcagtcgacagagatactaacagacctcttgaaccccctagtgaattcatcgtcaaggtgcaggacattaacgacaatccacctgaattcttgcatgagacataccacgccaatgtacctgaaagaagcaatgtgggaacctcagtgatccaggtcaccgcctcagacgccgacgacccaacctacgggaatagtgccaaactggtttactcaattctcgaaggccagccgtatttcagcgtcgaggctcaaactggcatcatccgcaccgccctgccgaacatggatagagaagccaaggaagagtatcatgttgtcattcaggccaaagatatgggcggacacatgggaggactgagcggcacaaccaaggtgacaataaccctcacagacgtcaacgataacccaccaaagtttccacagtctgtctatcaaatgtccgtttctgaggccgctgttccaggggaagaagtaggtcgagtcaaagctaaagatccggatattggtgagaacgggttggtcacatacaacattgtagacggggatggcatggaaagcttcgagatcacaaccgactacgaaacccaggaaggggtgatcaaactgaaaaagcccgtggattttgaaaccaagcgcgcttactccctgaaggtagaagctgctaacgtccacattgatccaaaattcatttctaatggccctttcaaggatacagtgaccgttaaaatctctgtggaggatgccgatgaacctcccatgttcctggcaccctcctatatccacgaggttcaagaaaacgcagcggctggaactgtggttggcagagtccacgccaaggacccagacgccgctaattcccctatcaggtacagtatagaccggcacacagatcttgacagattttttaccatcaacccagaagatggattcatcaagacaactaagccccttgatcgtgaggagacagcctggctcaatatcacagtttttgcggcagagatccacaacagacaccaggaagccaaggtccctgtggcaattagggtgctagatgttaacgacaatgcacccaagtttgccgcaccttatgaggggtttatctgtgagtccgatcagacaaagcccctgtcaaatcagccgatcgttactatctctgccgacgacaaagatgacaccgctaatgggcctcggttcatcttctctctgcctccagaaatcatccacaatcctaatttcaccgttcgggataatagagacaataccgccggtgtgtatgcacggagaggcggattttctcggcaaaagcaggacctgtatctactgcccattgtgatttccgacgggggaatccctcccatgtccagtactaatacactcactattaaggtgtgcggatgcgacgtgaacggcgcactcctgtcctgtaacgcggaagcctacatcctaaatgctggtttgtccaccggcgcactcatagccattcttgcttgcattgtgattttattagtgatagtggtgctctttgttactcttcgccgacagaaaaaggagcccctaatagtgtttgaggaagaggatgtcagggaaaacatcattacatatgacgacgaaggcggaggagaagaggacacagaagcttttgacatcgctacactccagaatccagacggcattaatggtttcatccctcggaaagacatcaagcccgagtaccagtacatgcctagacctggacttcggccagctcctaattccgttgacgtcgatgactttattaataccagaatccaagaagccgacaacgaccctaccgcccctccctacgacagtatacagatttacgggtacgagggcaggggcagcgtggccggatcccttagcagtctggagtctgctactactgacagcgacctggactatgattatctgcagaactggggcccaaggttcaagaagcttgctgatctgtacggatctaaagatacttttgatgatgactcgtag

SEQ ID NO: 27660 - DNA, 2082 bp, synthetic construct
  misc_feature 1..2082: note = Description of Artificial Sequence: Synthetic coding sequence
  source 1..2082: mol_type = other DNA
atgaaagagaactattgcttgcaggcagctcttgtgtgtctgggaatgctgtgccactcccatgcttttgcaccagagcgaagagggcacctgcggccaagcttccacgggcatcacgaaaaaggaaaagagggccaggtcctacagaggtccaagaggggctgggtatggaatcagttctttgtcatcgaagagtatactggccctgatccagtgctggtcgggagactgcacagtgacatcgattcaggtgacggcaacatcaagtacatcttgtccggcgaaggagctggtacaatttttgtcattgacgacaagtcaggaaatatccacgcaaccaaaacattggatagagaagaacgggcacaatatacactcatggcccaagccgtagatagggacactaaccgtccactagagcctccaagcgagttcatcgtgaaggtccaggacatcaatgacaacccacctgagttccttcatgaaacttatcacgccaacgtgcctgaacgctccaatgtcggaacttcggttattcaggtgactgcctccgatgctgatgatcccacttatggaaatagtgccaagctggtctactctatactggaggggcagccatatttcagtgtggaggctcagaccggaattatacggaccgccttaccaaacatggaccgggaggccaaggaggagtaccatgttgtcatccaggcaaaggatatgggcggtcatatggggggattgtccggaacgacaaaggtgaccatcacacttacagacgttaatgacaaccccccaaaattccctcaatcagtgtatcagatgtctgtgagtgaggccgcagtgcctggcgaagaggtcggcagggttaaggccaaggatccagacataggggaaaacgggttggtgacgtacaacatcgtggatggcgacggaatggaatctttcgagattaccactgactacgaaacgcaggaaggcgtgattaagctgaagaaacccgttgacttcgagacaaagcgggcttacagtcttaaggtcgaagcggctaatgttcatatcgaccctaagtttattagcaatggcccattcaaggatacagttaccgtaaagatttcagtggaagacgccgacgagcctccaatgttcctggctccgtcctatattcatgaggttcaggagaatgccgcagccggaaccgtggtgggccgtgttcatgctaaggaccccgatgcagcaaacagtcctatcagatacagcattgatcgacatacagatctcgacaggttcttcacgatcaacccggaagatggttttatcaagactacgaaacccttagaccgcgaggagacagcttggctaaacattacagtttttgccgctgaaatacataatcgtcatcaggaagcaaaggtccctgtggcgattcgggttctagacgtcaacgacaacgccccaaaatttgccgctccatacgagggatttatatgcgagtccgatcaaacaaagccactgtccaaccaaccaatcgtgacaatcagcgccgacgataaagatgataccgccaatggaccgagatttatcttctctctcccacctgaaattatccacaatccaaacttcaccgtgagggataacagggacaatacagcgggagtgtatgctcgccgtggtggcttcagtaggcaaaagcaggatctttacctacttccaattgttatttcagatggagggatccctcctatgtcgtccacaaacaccctcactattaaggtgtgcgggtgcgatgttaatggcgctttactaagttgtaacgccgaagcctatatccttaacgctgggcttagtaccggagctctcattgccatactagcatgtatcgtcatccttctgggatgccccagcctgatggagcctccgagcccacgagaggacatgaggctgttatacctcggctttcagctgatgctgttcagctacgtgaaagtgaaccggaggttttgcttgctaggcgtcttcatcaagttgccattcctctacgtcgttgcgaccgagagccccaccacactgaccagtttgtag

SEQ ID NO: 27661 - DNA, 516 bp, synthetic construct
  misc_feature 1..516: note = Description of Artificial Sequence: Synthetic coding sequence
  source 1..516: mol_type = other DNA
atgaaggagaattactgcctgcaggccgcactcgtgtgtctaggaatgctctgccactcccatgcctttgctccagagagaagaggccacctcagaccgagctttcatggtcaccatgaaaaaggaaaggaaggacaggttttacaacggagcaagcgaggatgggtgtggaatcagtttttcgtgattgaggaatatacagggccagatccagtcttagtcggcagactgcattccgatatagattctggagacggcaatattaagtacattctgtcaggtgagggagcaggtacgattttcgtgattgacgacaagagcggcaacatccatgctactaaaacactggatcgggaggaaagggcacaatatactctcatggctcaagcagttgatagagacactaaccgtaactcactcagcaggtcacgtactctgatgaccaccctccggtcttcttgcactcgacctataatgcccacctgtctgcggggacccatgtgggtgcgaacgtag

SEQ ID NO: 27662 - DNA, 2340 bp, synthetic construct
  misc_feature 1..2340: note = Description of Artificial Sequence: Synthetic coding sequence
  source 1..2340: mol_type = other DNA
atgggtccaggcctagccgctagacgtctgcgccctccctcccgcgctccggagattactgtgttctccgcgcaacggccttgcgatatcccgtcttgctgtcatctcctctcagatcaaagtgatgggtggagcgtgctacagaaactcgccgcatctattcaatgggttaagaaactgcatagtgatatagacagtggagacggcaacatcaaatatatcctctccggggagggcgctggcacgatctttgtcatcgacgacaagtccggaaatattcacgcaaccaagaccctggacagagaggagagagcccagtacacgttgatggcccaggcagtggatagggacactaatcggcctctcgagccacccagtgaattcatagtgaaggttcaggacattaatgacaaccctcccgaatttcttcacgaaacctaccatgcgaatgtgccggagcgaagtaacgtgggaaccagtgttattcaggtgactgcaagtgacgcggacgaccctacctatggcaatagtgccaaactggtttacagtatcttggagggacagccatacttctctgttgaagctcaaaccggtattattcgtacagccttacccaacatggatcgcgaggctaaggaagaataccacgttgtcattcaagcaaaggatatgggcggacacatggggggattgtcgggaaccacaaaggtaaccatcacattgacggacgttaatgacaatcccccaaaattcccccagtccgtctaccagatgagtgtatcagaagcggctgttcccggagaagaagtgggaagagtcaaagcaaaggatcccgacattggcgagaatgggttagtgacctataacatcgttgacggggatggaatggaatcctttgagataacaacagactacgagacacaggaaggggtgataaaattgaagaagccagtcgactttgaaactaagagagcatacagtttaaaagtggaagcagctaacgttcacattgatcccaagttcatctctaatggtccatttaaagatactgttacagtaaaaatcagcgtggaggacgccgatgagccccctatgttcctcgccccatcatacatccatgaggtccaggagaacgcagctgcaggcacagttgtcggacgtgttcacgctaaggatcccgatgcagcaaattccccaattcgttatagcatcgacagacacacagatctggaccgattcttcacaattaacccggaagacggcttcattaagaccactaagcccttagacagggaagagaccgcatggctaaacatcaccgtatttgctgctgaaattcacaacaggcaccaagaagccaaagtgcccgtggctatacgcgtactcgacgtaaacgataacgcacctaagttcgcagcaccatacgaaggtttcatctgcgagtcagaccaaaccaaacccctgtcaaaccagccaatcgttacaatcagtgctgatgacaaagatgacactgctaacgggccaaggttcattttcagcttgccgcctgagattatccataaccctaacttcaccgtacgagacaacagagataacaccgctggagtgtacgcccgacgcggaggcttttcccggcagaaacaggacctgtatctcctgcccatcgttatctccgatgggggaatcccaccaatgtcttctacaaacacactgaccattaaggtatgtggctgtgacgtcaacggggcactgctgtcctgcaacgctgaagcatacattttaaatgcaggcttgtcgactggtgccctcattgctatactggcttgtatagtgattctgttggtgatcgtggttctgttcgtgacactaaggcgccagaaaaaagagcccttgatcgtatttgaggaggaagatgttcgcgagaatatcatcacttacgacgatgaagggggaggtgaggaagatactgaggctttcgatatcgccaccctgcagaatcctgacggtatcaatggcttcattccaaggaaagatatcaagccagaatatcagtatatgcccagacctggcctgcgccctgcgcctaattccgtcgacgttgacgactttataaacacaaggatacaagaggccgataatgatcccaccgccccaccatacgattccattcagatttatggatacgagggtcggggatctgtcgccggtagtctttcctccctcgagagcgccaccactgattctgatttggattacgattacctgcagaactggggaccgagatttaagaaactggcagacctatacggtagtaaggacactttcgatgatgattcctag

SEQ ID NO: 27663 - DNA, 528 bp, synthetic construct
  misc_feature 1..528: note = Description of Artificial Sequence: Synthetic coding sequence
  source 1..528: mol_type = other DNA
atgcagccccgaaccccccttgtgctgtgcgtccttttaagccaggttctgctgctcacttcagccgaagacctggattgcacacctgggttccaacagaaagttttccatatcaaccagcccgctgagttcatcgaagatcagtctatccttaatctaacattctctgattgtaaaggcaacgataagctgcgttacgaagtctcctcaccctacttcaaagtaaattcggacggcggtctggtggccttgcgaaatataacggcggtaggcaagaccttattcgtgcacgcacggacaccccatgcagaagacatggcagagctggtgattgtcggcggaaaggacattcaaggcagtcttcaggacatttttaagttcgcccgaacttctccagtcccgaggcagaagcggagtatcgtggtgagtccgatacttatacctgaaaaccagcgacagccattcccccgagacgtgggcaaaatgaagatttggcaggtgctgtgcctcgccagatggctcacttag

SEQ ID NO: 27664 - DNA, 2142 bp, synthetic construct
  misc_feature 1..2142: note = Description of Artificial Sequence: Synthetic coding sequence
  source 1..2142: mol_type = other DNA
atgcagccccgtacaccccttgtgctgtgtgtgcttctgagccaggtactgctccttaccagcgctgaagacctagattgcacacctggctttcagcagaaggtgttccatataaatcagcccgcagagtttatagaagaccagtctatcctgaatctgacattctcggattgtaaagggaatgataagttacgctacgaggtgtccagcccatacttcaaagttaattcagacggaggactcgttgctttgaggaacatcacagctgtgggtaagacgctgttcgtgcatgccagaactcctcatgcagaagatatggccgagctggtgatcgtggggggaaaagacatacagggcagcctgcaggatatattcaaattcgccagaacctccccggttcctcggcagaaacgatctattgtagtgagccccattctaatcccagaaaaccagcggcaacccttccctagggacgtcggaaaagtggtcgacagcgatcgccctgaacggagtaagtttaggctcaccggaaagggggtcgatcaagaacccaagggcatcttccgtattaatgaaaacacaggatctgtgtccgttacgcgcaccctagatcgggaagtaatcgccgtgtatcaattgttcgtagagaccactgatgtgaacggaaagactctggaggggccagtgccactggaggttattgttattgaccagaatgataaccggccaatcttccgggaaggcccttacataggtcatgtcatggaaggcagtcctacgggcacgaccgtgatgagaatgaccgcttttgatgcagatgatccagcaactgataacgcactcctgagatacaacattagacaacaaacccccgacaaaccatcccctaatatgttttatatcgaccccgagaagggcgacattgtgactgtcgtcagcccagctctgttagaccgggagacgctcgaaaatccaaagtatgagctgataatagaagcccaggatatggctgggctcgacgtggggctgacaggcacagcgacagctacaattatgatcgacgacaagaacgatcatagccctaagtttaccaagaaggagttccaggctactgtagaagagggagccgtgggagttatcgtgaacctgaccgttgaggataaggacgatcccaccacaggagcatggagggcagcatatacaatcatcaacggcaacccaggtcagtccttcgaaatccacaccaacccccaaacaaatgagggaatgctttctgtggtgaaacctttggattatgaaatctctgcttttcacacactgttgataaaagtggaaaatgaggatcccctggtgcccgacgtgagttatgggccatcttcaaccgcaacagtccacatcaccgtcctcgacgtaaatgagggcccagtattctaccccgacccgatgatggtaacaaggcaggaggatctaagtgtgggttctgtgcttctgacagttaacgctacagaccccgatagcctgcagcaccagacaatccgctactcagtctacaaagaccctgcaggatggctcaacatcaatcctatcaatggcacagtcgacactactgcagtgcttgatagggagagtcccttcgtggataactcggtgtatactgcactgttcctggccatagattcaggcaatccgccagcaaccggaacaggaacccttctaattacccttgaagacgtgaatgacaatgccccatttatatacccgacagtggcggaggtctgtgacgacgctaagaatttgtctgtggtgattctgggcgcaagcgacaaagatctgcaccccaacactgacccctttaaattcgaaattcacaagcaggctgtgcctgataaggtttggaagatcagtaaaatcaataacacccacgcgttggtttcactcctgcagaatctgaacaaggccaactacaatctccctataatggtgacagacagcggaaagccgcctatgaccaacattaccgatttaagggtacaggtctgctcctgccgcaacagtaaggtggactgtaacgccgcaggagccctccgtttctccctgccatccgttctgcttctgtcgttattctcccttgcctgcctctag

SEQ ID NO: 27665 - DNA, 2283 bp, synthetic construct
  misc_feature 1..2283: note = Description of Artificial Sequence: Synthetic coding sequence
  source 1..2283: mol_type = other DNA
atgaagacaccccctggtgcctcaagccggaccaaatgttcgagggaactcaggtctttttgcgccttctcctgccccagggctaaacaacccacatgcactgcctggttcccccagcaagaacatccctcggagaatggccctcagatgccaggaagggacccgcctgcagctagcaccatgcaagtattgctcctcacttcagccgaggacctggactgtacaccaggtttccaacagaaggtgtttcatattaaccagcctgcagagttcattgaagatcagtccattttgaatttgaccttctccgactgtaagggcaatgataagttacgctatgaggtgagctcaccctacttcaaggttaacagtgacgggggactggtggccctaagaaatattacggctgtggggaagactttgtttgtccacgcgcgtacaccccacgctgaagatatggcagagcttgtaattgtgggcggaaaagatatccagggatctctccaggatattttcaaatttgcacggacaagcccagtccccaggcagaagcgaagtatagtggtgagccccattctgattcctgagaaccagcggcaaccctttccccgagacgttggtaaggtcgttgactctgaccggccagagaggtccaagttcagattgactggaaagggggtggaccaggagccaaaggggatctttagaatcaatgaaaacaccggttcggtatcagtgactaggacgctcgatcgagaagtgattgcggtgtatcaattattcgtagaaactacagacgtgaatggtaagactttggaagggcctgtgccactggaagttattgtaatagaccagaatgacaatcggcctatcttccgcgaggggccttacataggacatgtgatggaaggctcaccaaccgggaccactgtgatgcggatgaccgctttcgacgctgacgatcccgctacggataatgcattgctgagatacaacattagacagcaaacacccgacaaaccctctccaaatatgttttacattgatcccgagaaaggcgatattgtcacagtggtgtcgccagcgttgctggacagggaaacactggagaatcccaaatacgagctgattatagaggcccaggacatggccggactggatgttggattgaccggaaccgcaacggccacgatcatgattgacgataagaatgaccactctcccaaattcactaagaaggagtttcaggccaccgtggaggagggcgcagtcggcgtgatagttaacctgacggtggaggataaggacgaccctactacgggtgcctggcgggctgcctacacaattatcaacgggaatcccggtcagtcgtttgaaattcacacaaatccccaaacgaatgaggggatgctgtctgtggtgaaacccctagattacgagatctccgccttccatactttgctgatcaaggttgaaaacgaggacccactagtccctgatgtctcctacgggccttccagcactgcaaccgttcatatcaccgtcttggatgtcaatgagggaccggtcttctatcccgaccctatgatggtcaccagacaggaggatctgtccgttgggtcagtcttgttgacagtgaatgcaacagatcctgacagtctgcagcatcaaacaatccggtacagtgtctacaaagaccctgctgggtggctcaatattaaccccatcaatggtaccgttgataccacggccgttctagaccgggagagccccttcgtcgacaatagcgtgtacacagcactttttcttgcaatagattcgggcaatcccccagcaaccgggaccggtacgttgcttataactttggaagacgttaacgacaacgcaccattcatctacccaactgtggcagaagtgtgtgatgatgctaaaaatttgagtgtcgtgatcctgggcgcttcagataaggacctgcatccgaatacagatccctttaaatttgagattcataagcaagccgtaccagacaaggtgtggaagatctctaaaatcaacaacacccacgccctggtatcactactgcaaaatttaaataaagcaaattataacctgcccatcatggtgacagactccgggaaacctcctatgaccaacattactgaccttcgcgttcaagtctgcagctgcagaaatagcaaagtcgattgtaacgccgctggggctctgcgcttctctttgccgagcgtactgttactttcgttattctccttggcgtgcaaatag

SEQ ID NO: 27666 - DNA, 2142 bp, synthetic construct
  misc_feature 1..2142: note = Description of Artificial Sequence: Synthetic coding sequence
  source 1..2142: mol_type = other DNA
atgcagcctagaacacccttagtgctctgtgtgctgctaagtcaggtgctgctgctgacgtccgccgaggacctggattgcacacctgggttccaacagaaagtgtttcatatcaatcagccagcagagttcatcgaagatcaatcaatccttaacctgacattctccgattgtaaaggcaacgacaaactaagatacgaggtgtcgtcaccttacttcaaggtcaacagcgacgggggattagtggcactccgcaacataaccgcagtcggtaaaacactgtttgtacatgctagaacacctcatgcggaggacatggccgaacttgtaatcgtggggggaaaagatatacaaggaagcctccaggacatattcaaatttgccagaacaagccccgttccgcgacaaaagcgtagtatcgtggtgagcccaattctgatcccagagaaccagaggcagccgttccctcgagacgttggcaaggtggttgactcggaccgcccagagaggtctaagttccggctgactgggaaaggtgtcgaccaagagcccaagggtatcttccgaatcaacgaaaacacaggttcagtaagcgtcacgaggaccctagatcgggaggtgatcgctgtgtatcagcttttcgtggaaacaactgacgttaatgggaagactctggaaggtccagtacctctggaggtgatcgtgatagaccagaatgataacagaccgatcttccgggaaggtccgtacatcggtcatgttatggagggttctccaacagggactactgtcatgaggatgaccgcgttcgacgccgatgaccccgcaacagataacgccctgctacgttataatataaggcaacagacccccgataagccaagcccaaacatgttttatattgatcctgaaaaaggagatatcgtgacagtcgtgtctcctgccttactagatagggagactctggagaatcccaagtacgagcttatcattgaggctcaggacatggcagggttagacgtggggctgacgggcactgcgacagccaccataatgatagacgataagaacgatcatagtcccaaatttacaaaaaaagagtttcaggcgactgtggaagaaggagctgtgggagtcatcgtcaatctgacagtggaagataaagatgacccgactacaggcgcatggagggctgcttataccatcatcaacggtaatcccggtcagagtttcgagatccacacgaatccacagaccaacgagggtatgttatccgttgttaagccactagactacgaaatctcagcctttcatactttactgatcaaggttgaaaacgaggaccctctggttcctgacgtttcttacgggccatcatcgaccgctactgtgcatattaccgtcctcgatgtgaatgaggggccagtgttctatccggaccccatgatggtgacccggcaggaggatttatccgttggttccgtgctgttaaccgtgaacgccaccgatccggacagcctgcagcaccagacaattcgctactctgtgtacaaagaccccgcaggatggctgaatattaaccctatcaatgggaccgtggataccactgcagtcctcgatagagagagccccttcgtcgataattccgtttacactgcccttttcctggctatcgactccggaaaccccccagctacaggcacgggcaccctccttattacactcgaagatgtgaatgataatgctccatttatatatccaactgtggcggaagtgtgcgacgatgccaaaaatttatctgtggttattctgggggcaagcgacaaagacctacatcccaataccgaccccttcaagtttgaaattcacaagcaggcagtgcctgacaaagtttggaagatctccaagattaataatacccatgccttggtatccctcctacaaaaccttaataaggcaaactacaaccttcctatcatggtgaccgactccggcaagcctcccatgacaaatattaccgatctccgtgtacaagtatgttcttgccgcaacagcaaggtagattgcaatgcagccggagccctgcgattttcactgccctctgtcctgctactgagtctgtttagcctcgcgtgcaagtag

SEQ ID NO: 27667 - DNA, 573 bp, synthetic construct
  misc_feature 1..573: note = Description of Artificial Sequence: Synthetic coding sequence
  source 1..573: mol_type = other DNA
atgcagccaaggacacccctggtgctctgcgtcctgctttcacaagtgctgctgcttacctcagcggaggatttggactgcacgcccggattccaacagaaagtttttcacatcaatcagcctgccgagttcatcgaggaccaatcaatcctcaacttaaccttttcagattgcaaaggcaacgataaactgaggtatgaagtttcctctccttatttcaaagtgaattccgacggagggctggtggctctgagaaatatcaccgctgttgggaagaccctgttcgtgcacgctcggaccccccacgccgaggacatggctgagctcgtgatcgttgggggtaaagatatccagggcagtctgcaggatattttcaagtttgctcggactagccccgtgcctcggcagaagcgttctatcgtggtgtcaccaatcctcatcccggaaaatcagcgacagcctttcccaagagatgtaggcaaacgaacacacaacccaatcaatagcgagctgctcctaaacgaggggatcaccgctgatctgaatccctgtattactatcctcgccatatag

SEQ ID NO: 27668 - DNA, 528 bp, synthetic construct
  misc_feature 1..528: note = Description of Artificial Sequence: Synthetic coding sequence
  source 1..528: mol_type = other DNA
atgcagccacggacccccctggtactgtgtgtgctgttgagccaggtccttttgctgacctcagctgaagatctggattgtactccaggttttcagcagaaggtgtttcatattaaccagccggctgagtttatcgaagatcagtcaattctgaacctgacatttagcgattgtaagggaaacgataagctgagatacgaagtcagctcgccgtatttcaaagtcaacagcgatggcggactggtggcactccgtaatattacagctgtcggcaaaacactctttgtccacgctcgcactccacatgccgaggatatggcagaactggtgatcgtcggtggaaaggacatccaaggaagccttcaggatattttcaagttcgctcgaacatctcctgtacctcgccagaaacggtccatcgttgtgagccccattctgataccagaaaatcagcgacagccgttccccagagacgttggtaagatgaagatctggcaggtactgtgtctggcacggtggctgacatag

SEQ ID NO: 27669 - DNA, 2025 bp, synthetic construct
  misc_feature 1..2025: note = Description of Artificial Sequence: Synthetic coding sequence
  source 1..2025: mol_type = other DNA
atgcaaccaagaactcccttagtgctgtgcgtgctcttgagccaggtgctgctgctcacgtctgcagaggacctggattgtacacccggatttcagcaaaaagtgtttcacattaaccagcccgctgagttcattgaagaccagtctatcttgaatctgactttcagcgactgcaaggggaacgacaagctccgatacgaggtttcttccccatacttcaaggttaatagcgacggaggcctggtggctctacggaacatcactgcagtaggaaaaactctttttgtgcacgcgaggaccccacatgccgaggatatggctgagttggtgatcgtgggaggtaaggacatacagggtagtctccaggtggtcgattccgaccgacccgagcgatccaaattccgcctgacaggtaagggcgtcgatcaggagcccaaaggtattttcagaatcaatgagaacacaggctccgtttccgtgacacgcacgctggatagggaggtgattgccgtgtatcagttgttcgttgagaccacggacgtgaacggcaagacactggaagggcctgtgccactggaggtgatcgtcatcgatcagaacgataatcggccaattttccgggaggggccatatatagggcatgtgatggagggttcccccaccggtaccacagttatgcggatgacagcattcgacgcggacgaccctgcaacggataacgctctgttgaggtacaacattcgacagcagacgccggacaaacctagcccgaacatgttttacatcgaccctgaaaagggggatattgtgacagtcgtgagtccagctctgctagaccgcgaaacactggagaacccaaagtacgaattgatcatagaggcacaggacatggcaggcttggacgttggtttaacaggaactgccactgcgactatcatgatcgacgataagaatgaccatagccctaagttcaccaagaaggaattccaggctaccgttgaggagggcgcagtgggagtgatagtgaacctcacggtcgaagacaaggatgacccaaccactggagcttggagagctgcctatacaatcatcaacggaaatcctggccagtccttcgagattcacaccaacccccagacaaacgaaggtatgctgtctgtagtgaaaccattggattatgagatctccgctttccacaccctgctgatcaaggtcgagaacgaagaccccctggtgcctgatgtatcttacggaccaagttctaccgcaaccgtccatattacagtcctggacgtcaacgagggccctgtgttttatccagatcctatgatggtgactcgccaagaagacttgagcgtgggcagcgtactgctgacagtcaatgctaccgaccccgactccctgcagcaccagacaattcggtattctgtgtataaggatccagcaggatggctcaatatcaacccgatcaatggcaccgtcgacactacagccgtgctcgacagggaaagccccttcgtggataactccgtgtacactgcgctctttctggcgattgatagtggcaacccaccagcgaccggcaccggcacactgctgatcacgctggaagacgtgaacgacaatgcacctttcatttatcccacagtggctgaggtatgcgatgacgccaaaaacctttcagtcgtgatcctaggggcttcagacaaagacctgcaccccaatacggatccgtttaagtttgagattcataaacaggccgttcctgacaaagtgtggaaaatttccaagatcaacaatactcacgcactggtaagcttgcttcaaaacctgaacaaagctaactacaacctacctataatggtgacagactctggtaagccgcctatgactaacatcactgatctgcgcgtccaggtgtgttcctgtcgcaacagcaaggtcgattgtaacgctgccggtgcactacgcttcagcctcccctctgtcctgctcctgagtctgttctctcttgcctgcaagtag

SEQ ID NO: 27670 - DNA, 1248 bp, synthetic construct
  misc_feature 1..1248: note = Description of Artificial Sequence: Synthetic coding sequence
  source 1..1248: mol_type = other DNA
atgcagcctcgcacgcccctagtcctgtgtgtgctcctttcccaagtggccttactcgatcgagaaacactcgaaaatcccaagtatgaactcataatcgaagcccaggacatggcgggtttggacgtgggattgacaggaaccgcaacagcaacaatcatgattgacgacaaaaatgatcactcacccaaattcacaaagaaggagttccaggctaccgtggaggaaggggctgtcggtgtgatagttaacctgacagtggaagacaaagatgatcccacaaccggggcatggcgggcagcatacaccattattaacgggaatccgggacagtccttcgagatccacacaaacccacaaactaacgaagggatgcttagcgtggttaaacccctggactacgaaatatctgctttccatacattgttgatcaaagtcgaaaatgaggatccgctcgtgccggatgtgtcgtacgggccaagcagtactgcaacagtgcacatcaccgtcctggacgttaacgagggccctgtgttttacccagaccctatgatggtgactagacaggaggacctgagtgtgggctccgtactcctcactgtgaacgccaccgatccagactctctgcagcaccagactataaggtattcggtgtataaggacccagctgggtggttaaacattaaccccataaatggaaccgtggatacaaccgccgtgctggatcgcgaaagcccattcgttgacaacagtgtctataccgcattatttctggctatagatagtggaaaccccccagcaactggtacagggactttactgatcacactggaagacgtgaatgataacgcccctttcatttaccctacggtggccgaggtctgcgatgacgccaaaaacctctccgtggtgattctgggagccagcgacaaggacttacaccccaacactgatcctttcaaatttgaaattcataaacaggccgtccctgataaagtctggaagatcagcaagataaacaacacacatgctctggtgagcctgctgcagaatctgaacaaggccaattacaacctccctatcatggtgacagactctggaaaacctcctatgaccaacattaccgacctcagggttcaggtatgcagttgcaggaattcgaaggttgactgcaacgccgctggggcattgcggttttccctcccatctgtgctgctactttctctttttagcctggcctgtaaatag

SEQ ID NO: 27671 - DNA, 819 bp, synthetic construct
  misc_feature 1..819: note = Description of Artificial Sequence: Synthetic coding sequence
  source 1..819: mol_type = other DNA
atgcagcccagaacaccgctcgtcctgtgtgtccttctctcccaggtactgctgctgaccagtgccgaggatcttgactgtacacccggttttcaacaaaaagtgttccatataaatcaaccggctgagttcatcgaggaagacttatccgtcgggtccgtcctgctaaccgtaaacgccacagatccagacagtctccaacatcagaccattcgctattctgtctacaaggacccagctgggtggctgaatatcaacccaataaacgggacagtggacacaactgcagttctggaccgagagtctccattcgtggacaattctgtttacactgcactgttcctcgctatagactccgggaacccccctgccacagggaccggaacactcctgatcaccctggaggatgtgaatgataatgccccatttatctacccgacagtagccgaggtatgtgatgacgctaagaatttgtccgtggttatcctgggggcatctgataaggatctccatccgaacacagaccccttcaaatttgagatccacaagcaggccgttcccgacaaggtgtggaagataagcaagataaacaatacccatgcccttgttagcctcttgcagaatctcaacaaggcgaactacaacctaccgataatggtgacggacagcggtaagccacctatgaccaatatcaccgatctgagggtgcaagtttgtagttgccgcaattccaaagtggactgcaacgccgctggtgctcttcgcttcagcctcccctcagttctcctcctctcccttttttcactagcttgcaaatag

SEQ ID NO: 27672 - DNA, 1212 bp, synthetic construct
  misc_feature 1..1212: note = Description of Artificial Sequence: Synthetic coding sequence
  source 1..1212: mol_type = other DNA
gtggtgtctccagctctgctcgatcgggaaaccctggaaaatccaaaatatgaattaattatcgaagcccaggatatggcgggattagacgtcggattgaccggaacagctaccgcgacaatcatgatcgacgacaaaaacgatcactcccccaaatttacaaagaaggaatttcaagctaccgtggaggaaggggcagtgggggtcatcgtaaatctgacagtggaggacaaggacgatcctaccaccggtgcttggcgggcagcctacacaataattaacggcaacccaggccagagtttcgaaatccacaccaatccccagactaacgagggcatgctgtccgtggtgaagccattggactatgagatttccgcttttcacactctgttgattaaagtggagaacgaggacccactagtgcccgatgtttcttatggtccctcttccacagcaacagtgcacatcaccgtactggacgtgaatgaagggccagtcttttaccccgatccgatgatggtgaccaggcaggaagacttgagcgtgggaagcgtgcttctgactgtcaatgctacagatccggattcactacaacatcaaacaatccggtactcagtgtacaaagacccagccggatggctgaatatcaaccctatcaatggcacagtggataccacagcagtgctggatagagagtccccatttgtggataattccgtgtacaccgcgctttttctggcaatcgactcaggcaaccccccagcaactggcaccgggacattgctcatcaccctcgaggatgtcaacgacaacgcaccatttatttatccaacagtggctgaagtgtgtgacgatgccaaaaacttatcagttgtgattctgggcgcatcagacaaagatctccatcccaacacagaccctttcaaattcgagatccataagcaggcagtgcctgacaaagtgtggaaaataagcaaaataaataatactcatgctttggtcagcctactccagaacctgaacaaggctaattataacctgccaataatggtcacagacagtggaaaacccccaatgacaaatattactgacctaagggtgcaggtgtgttcttgccggaacagcaaagtggactgtaatgcagccggagctctgaggtttagtttgccttcggtccttttgctgtctctcttcagcctcgcctgtctttag

SEQ ID NO: 27673 - DNA, 2721 bp, synthetic construct
  misc_feature 1..2721: note = Description of Artificial Sequence: Synthetic coding sequence
  source 1..2721: mol_type = other DNA
atgtgccgcattgccggagccctgaggaccctcttacctctgctggccgcactgttacaggcgagtgtggaagcctcaggagaaatcgccttgtgtaaaacgggcttccctgaggatgtgtatagcgcggtgctgtctaaagatgtccatgagggccagccattactgaacgttaaattttctaattgcaatggaaaacgtaaggtccaatatgaatcctctgaacccgcagattttaaagtggacgaggatggtatggtgtacgctgtacggagcttcccactcagctctgaacatgctaagttcctcatatacgcccaagacaaggaaacccaggaaaagtggcaggtcgccgtgaaattgtcactcaaaccaacactgaccgaggaaagcgtcaaggagagcgccgaggtagaggagatagtgttcccacgccaatttagcaagcatagcgggcacctacagagacagaaaagagattgggtgataccccctatcaacctccctgagaatagtcggggaccgttccctcaggagttggtcagaatccgcagtgacagggacaaaaacctgagcctgcgctattctgtgacagggccaggagcagatcagccgcctactgggattttcataattaatcctatctctggacagctaagcgtaacaaaaccgctcgatcgggaacagattgccagattccaccttcgcgcacacgcggtggacatcaacggaaaccaagtcgagaaccccattgacatcgtgataaatgtgattgatatgaacgataaccggccagaatttctccatcaggtctggaacgggacagtgccagaaggtagtaaaccaggcacttacgtgatgactgttacagcaatcgatgccgatgatcccaacgctcttaacggaatgctcaggtatcgtatcgtgtctcaggccccttccacaccatcccctaacatgttcacaattaacaatgaaacaggggacatcattaccgtcgctgctggactggatagagaaaaggtgcagcaatacaccttgatcattcaggcaacggatatggagggtaaccccacgtacggcctgtcaaacacagctaccgccgtgataacggtcaccgacgtcaatgataacccccctgaattcacagccatgacgttttacggggaagttcctgaaaatagggtggatatcatcgtggctaatctaactgtgaccgacaaagaccagccccatactccagcttggaatgcagtgtacaggataagcggaggagaccccactggcaggttcgcaattcagaccgacccaaactccaatgacggattggttacagtggtgaagcctatcgactttgagacgaaccgaatgtttgtcttgactgtcgctgctgagaaccaggttcctctcgcaaaaggaatccagcatccgcctcagtcaacagccactgttagcgtaaccgttattgacgttaacgagaacccatattttgctccaaatcctaagattatccggcaggaggaggggcttcatgcaggcacaatgctaacgactttcactgcccaggaccctgataggtacatgcagcagaatatccggtataccaaattgtcagatccagcaaactggctgaagattgaccctgtgaacggacagattacgaccattgccgtgttggatcgagaatcccccaacgtgaagaataacatctacaatgctacattcctggctagtgacaatggcatccccccaatgagcggaactggaacccttcagatatacctgctggacattaatgacaacgcaccacaggtgttaccacaagaagctgagacctgcgagacaccagacccaaactctataaatatcacagccctggactacgatatcgatcccaacgccggtccgtttgctttcgatcttccgctgtctcccgtgaccatcaagagaaattggactatcacccgactcaatggggatttcgcccaactgaacttgaagatcaaatttctcgaggcagggatctacgaagtcccaattattatcactgactcgggaaatcctccaaaatccaatatctcaattctgcgggtgaaggtgtgccagtgcgactctaacggcgactgtacagacgttgaccgaatcgtcggagcaggcttgggaactggagccattattgctatcttactgtgtataattatactcctgatattggttttgatgtttgtcgtatggatgaaaagaagagacaaggagaggcaggcaaaacagttattaatcgatccagaagatgacgtgagagacaatatcctcaagtacgacgaagagggaggaggagaagaggaccaagactatgacttatcccagctacagcaacctgacaccgtggagcctgacgcgattaaaccggtgggcatcaggaggatggacgagagacccattcatgctgagcctcagtatcccgttaggagtgccgcacctcatcccggtgacatcggagacttcattaacgagggactgaaggccgcagacaatgatcctactgcacccccttacgactctttattggtgttcgattatgaaggcagcgggtccactgccggaagcctctccagtctgaattccagttcttctggcggagagcaagactacgattacttgaatgactggggacctagattcaaaaaacttgctgacatgtatggcggaggcgacgactag

SEQ ID NO: 27674 - DNA, 2628 bp, synthetic construct
  misc_feature 1..2628: note = Description of Artificial Sequence: Synthetic coding sequence
  source 1..2628: mol_type = other DNA
atgttccttctgcggaggtatgtgtgtatcttcactgaaaagttgaaaaatcaggccgaactatacgtattcctaagcgtcaaattcagcaattgcaatggaaaaagaaaggtccaatatgaatcgtctgaacctgccgacttcaaagtggatgaggatggaatggtttacgccgtccggtcattccctctgagctcagaacacgctaaattcctgatttatgcccaagacaaagagactcaggagaaatggcaggtggccgtcaagctgtcactgaagcccactttgacagaagaaagcgttaaagagagcgcggaagttgaggagattgtttttcccaggcaattcagtaaacattccggccatctccagcgtcagaaacgagattgggtgatccctcctatcaacttgccagaaaatagccgaggccctttccctcaggaactggtgagaattcgttccgacagagacaaaaatttatcccttcggtacagcgtgactggtccaggcgctgaccagcctccaacaggcatcttcatcatcaacccgatttccggacaattgagcgtgactaagccattagacagggagcagatcgcccgttttcatctgagggcccacgccgtcgacatcaacggcaatcaggtcgagaaccctatcgatatcgtgatcaatgtcatagatatgaatgataataggcctgagttcctacaccaggtttggaatgggacagtccctgagggatctaagcctggtacttacgtcatgactgttacagctatcgacgcggacgaccctaatgcattaaatggcatgctccggtaccgcattgtttcacaagcaccttccacccctagccctaatatgtttacaattaataatgagaccggggacataataaccgtagcagctgggctagatcgggagaaggtgcagcaatacactctgatcatccaggcaacagatatggaaggcaaccccacctatggcttgtccaacaccgccacagctgtcataactgttaccgacgtgaatgataatcccccagagttcaccgccatgacattctacggtgaggtgccagaaaaccgtgtcgatataatcgtggcgaacttaactgtaacagacaaggaccaaccacacactcccgcatggaatgctgtgtacaggatttccggaggggaccccactggaagattcgccatccagacagaccctaatagtaatgacgggctcgtgaccgtcgtaaagcccatcgacttcgaaaccaacagaatgttcgtgctcaccgtggcagcagagaaccaggtcccattggctaaagggattcagcacccaccacagtctaccgctaccgtctccgttactgtcatcgatgtcaatgaaaacccatacttcgcacctaatcctaaaattattcgacaggaggaaggccttcacgccggtaccatgttgacaacgttcacagcccaggacccagacagatacatgcagcagaacattaggtacaccaaattgagtgatcccgctaactggctaaagatcgatcccgtcaatggccaaatcaccaccatcgcagtgctggacagagaatctcctaacgtgaagaacaacatttataacgccacattcctggcatccgataatggaatcccacctatgagtggcaccggtactctgcagatttaccttttggatatcaacgacaatgcccctcaagtgttaccgcaggaagctgagacatgcgagactccagacccgaatagcataaacatcaccgctctggattacgacatagacccaaatgctgggccattcgcctttgatttacccttgagcccagtgaccatcaagcggaattggacaataacccggttgaatggcgatttcgcccaattaaaccttaaaattaaattcctggaagccggaatttatgaagtgccaattattatcacagacagcggtaaccccccaaagtctaatatatctatcctgagagtgaaggtttgtcaatgtgattccaatggcgattgcactgacgttgaccgaatcgtgggcgcaggcctgggcaccggcgctatcattgcgatcttgttgtgtatcattatcctgctcattctggtgctcatgttcgttgtttggatgaaaagaagagacaaggagcggcaagccaagcaactgctgattgatcctgaagacgatgtgcgtgataacatattgaaatacgacgaggagggcggtggtgaggaggatcaggattacgatctctctcagttgcagcagccagacaccgtcgagccagatgccatcaaacccgtcggcattcgtcgaatggacgaacggccaattcacgccgagccccagtacccagtcagaagtgccgctccccaccccggtgatatcggtgactttatcaacgaaggtctgaaagctgctgacaatgatcctacggcccctccttatgacagtctgctggttttcgactatgagggcagcggctcgacggctggtagtctgagcagtttaaactcgagcagcagcggcggagaacaggattacgactatctgaacgactggggaccccgattcaagaagctagccgatatgtatggcggtggcgacgattag

SEQ ID NO: 27675 - DNA, 2355 bp, synthetic construct
  misc_feature 1..2355: note = Description of Artificial Sequence: Synthetic coding sequence
  source 1..2355: mol_type = other DNA
atgcaacggctgatgatgcttctggccacatccggagcgtgtctaggtctcttggccgttgcagccgttgcggcagccggagcgaatcccgcacagcgggacactcactcgctactgcccactcacagacgtcagaagagggactggatctggaaccagatgcatatagacgaggaaaagaataccagtttgccacatcacgtggggaagatcaaatcatccgtgtcccgcaagaacgccaagtatctgctgaaaggagagtacgtagggaaggttttccgtgtcgatgccgagactggtgatgtattcgccattgaaagattagatcgggaaaatatctccgagtaccacctgaccgccgttattgtagacaaggataccggtgaaaaccttgaaaccccgtcctcatttactattaaggtccacgatgtgaacgataattggccagtcttcacacatagactcttcaacgcttccgtacctgagtctagcgccgtgggcacgtcagttatttctgtcacagcggttgacgctgatgacccaactgtgggcgatcatgcctccgtaatgtatcagatactgaaaggcaaagagtacttcgctatagacaattccggcagaataatcaccattactaagtcactcgaccgtgaaaagcaggcaaggtatgagatcgttgtggaggctagagacgcacagggcctgcggggagacagcgggacggcaacagtgttagtgactctccaggatatcaatgacaacttccctttctttacacaaacaaaatacacctttgtggttccagaagacaccagggtaggcacttcagtcggcagcctctttgtcgaggatcccgatgagcctcagaaccgcatgacaaaatactcaatcttaaggggagattaccaggacgcgttcactatagaaaccaatcctgcgcataacgaggggatcattaagccaatgaaacccttggattacgaatacattcagcaatactcatttatagtcgaggcaaccgacccgacaattgatctgcgctatatgagccctcccgctgggaaccgggcacaagtgataatcaatatcaccgacgtcgatgagcctcctatatttcagcagcctttttaccacttccagctgaaggaaaatcaaaagaaaccactaatcgggaccgtgctggccatggacccagacgccgctcggcactcaatcggatactcgatcagacgcacatctgacaagggacaattttttcgggtaaccaaaaagggggatatctacaatgagaaggagcttgatagggaggtgtatccttggtacaatttaaccgtcgaggccaaagagcttgactcaactggaactccgactggaaaggagtctattgtgcaggtgcatatcgaggtgctggatgaaaacgataacgctccagagttcgccaaaccataccagccaaaagtctgcgaaaacgctgtgcatggtcagctggtgcttcaaatcagcgccatcgacaaggacattaccccccgaaatgttaagttcaagtttatcctgaacaccgagaataatttcaccctgacagataatcacgataacactgcaaatataaccgtgaagtatggtcagtttgatagagaacacacgaaggtccattttttgcccgtagtgatctccgacaatggtatgccaagcaggacaggaaccagcaccctcactgtcgccgtctgtaaatgtaatgaacagggggagttcaccttctgcgaggatatggccgcacaagtgggggtcagcatacaggctgtggttgccatcctcctctgcattctcaccatcacagtcatcacgctgctgatttttctgaggcgccgtttgagaaaacaggcacgggctcacggaaagagtgtgcccgagatccatgaacaactggtgacttacgatgaagagggaggaggtgaaatggacaccacgagctacgacgtgagcgtgctgaattccgtgcggaggggcggtgccaaaccaccacggcctgccctggacgctaggccatctctctatgcccaagttcaaaagccccctcggcacgctcctggagcacacggaggacccggtgaaatggccgctatgatcgaagtgaaaaaagatgaggccgaccacgacggagacggccctccttacgacacactccacatctacggctacgaaggctcagaaagcatagccgaaagcttgagctcgctggggactgacagcagtgattctgacgtggattatgacttcctaaatgattggggaccaaggttcaaaatgctggcagaattgtatgggagtgacccacgcgaagaactactgtactag

SEQ ID NO: 27676 - DNA, 2010 bp, synthetic construct
  misc_feature 1..2010: note = Description of Artificial Sequence: Synthetic coding sequence
  source 1..2010: mol_type = other DNA
atgcagcggttaatgatgttactggcaacatccggagcgtgtctcggtctgctggccgtagcagctgttgctgcagctggtgccaaccctgcccaacgagacacgcactctctgcttccaactcataggcggcagaagcgcgattggatttggaaccagatgcacattgacgaggagaagaacacgagcctgccccaccatgtgggcaaaattaagtcgtcagtctcacggaaaaatgcgaaatacctcttgaagggggaatacgtgggaaaagtgtttcgcgtcgacgcagagacaggcgatgtttttgccattgaacggcttgacagagagaatatctccgagtaccacttgacagctgtgatagtcgacaaggatacgggggaaaatctggaaaccccctcatcgtttaccatcaaggtccatgatgtgaacgataattggccggtttttacacatcggctattcaacgcgtctgtcccagaatcaagcgcagttgggaccagcgtgataagcgtcaccgccgtcgatgccgatgaccccaccgtgggggaccacgccagcgttatgtatcaaattctgaaggggaaggagtactttgcaattgacaattccgggcgaattattactattaccaagtccctggatagggagaagcaagcccgttacgagattgtcgttgaagccagagatgcacaaggactgagaggagactccggtacagcgaccgtgcttgtcaccctgcaagatattaacgataacttcccatttttcacacaaacgaaatacacctttgttgttccagaggatacgcgcgtgggaacgtctgtcggctccctgtttgttgaagaccccgacgagccccagaaccggatgacgaagtattctattctgagaggcgactaccaggatgcttttactatagagactaaccccgcacacaacgagggcatcatcaaaccaatgaagccactggactatgagtatatccaacagtactcctttattgtcgaggcaactgatcccaccattgatttaaggtatatgtcccccccagccggtaaccgagctcaggttatcatcaatatcaccgatgtggacgaacccccaatctttcaacagcccttttaccatttccagctggtgctacagatttcagccatcgacaaagacattacaccacgcaatgtaaaattcaagttcattctgaatactgagaataattttacattaactgacaatcatgacaacaccgccaacattactgtaaagtacggccaatttgaccgcgagcataccaaagtccacttcctgccggtggtgatcagcgacaacggtatgccaagtaggacaggcacgtccacgcttactgtggcagtgtgtaaatgcaatgagcagggggaattcacattttgcgaggatatggccgctcaggtcggtgtgagcattcaggcagtagtagctatcctgctttgtatccttacaattacagtaattacgcttctcattttcctaaggagacgactgaggaagcaggcaagggcacacggaaaatccgtgccagagattcacgaacagctggttacctacgacgaggagggcggtggggagatggacacaacaagctacgatgtgagcgttttaaactctgtccggagagggggagccaaaccccctaggcccgctctggatgccaggcctagcctgtacgcccaggttcagaagcccccacggcatgctcctggagctcacggtggcccaggtgagatggccgcaatgattgaggtcaagaaggacgaagctgatcacgacggagatggccctccctacgatactctgcacatttacggctacgagggctcggaaagcatagcagagtctctgtcatccctcgggactgatagtagcgattcagacgtcgattatgattttctgaacgactggggacctcggttcaagatgctggcagaactgtatggctccgaccccagagaggagctcttatactag

SEQ ID NO: 27677 - DNA, 672 bp, synthetic construct
  misc_feature 1..672: note = Description of Artificial Sequence: Synthetic coding sequence
  source 1..672: mol_type = other DNA
atgcctagcaggaccggcacctccacactgactgttgctgtgtgtaaatgcaacgaacagggggagttcactttttgcgaggatatggctgcccaggtcggcgtgtcaattcaagctgtagtggcaatactcctttgtatactgactattactgtaatcaccctgctgattttcctgagaaggaggctccggaaacaggcgagggcccacggcaagagcgtgcctgaaattcatgaacaactggtgacgtacgatgaggaaggtggcggagagatggatacaacctcctacgatgttagcgtcctgaactccgtccgacggggtggcgcaaagcctcctcggccagcattagacgcaaggccatccttatatgctcaggtccagaagccgcctcgacacgccccaggcgctcacggcggaccaggggaaatggccgctatgattgaagtgaagaaggacgaggcagaccatgatggtgacggacctccctacgatacgcttcacatttacggatacgagggcagcgaatccattgcggaatcactgagcagcctcggaacagacagctcagatagtgatgtcgattatgatttcctcaatgattggggaccaaggtttaaaatgctcgcagagttatacggctccgatccaagggaagagctgttatactag

SEQ ID NO: 27678 - DNA, 1578 bp, synthetic construct
  misc_feature 1..1578: note = Description of Artificial Sequence: Synthetic coding sequence
  source 1..1578: mol_type = other DNA
atgccatcaacttgctcaaaggagaacatgtgggctagatccagcggttccatgcagcggcaggagacatgctcaccccttcgcgctcagaatagaatgacaaagtattccatcctacgcggtgattatcaggatgccttcacaatcgagacaaatcccgctcacaacgaaggtatcattaagcccatgaagccactggattacgagtatatccagcagtactctttcattgtggaggccacagatcccaccattgacctgaggtatatgtccccccctgcaggtaacagagcccaagtgattataaacataactgacgttgatgagccccctatcttccagcagcccttctatcatttccagcttaaggagaaccagaaaaaacccctcattggcaccgttctggccatggatcctgacgcagcccgacattctataggctatagcattagacgaaccagcgacaagggacagttttttcgggtgacaaagaaaggagacatttacaacgaaaaggagctggatcgggaggtctacccttggtataatttaacagtggaggccaaggaactggacagcacgggaacacccaccggtaaggaatccattgtgcaggtgcacattgaagtactcgacgagaatgataacgcccctgagttcgctaaaccatatcagcctaaggtctgtgaaaatgcagtacacggacaactagtactgcagatttcagccatcgacaaggacatcaccccaagaaatgtcaagttcaagtttattcttaacactgagaataattttacactcacggacaaccacgacaatacggcaaacattactgtgaaatatggccaattcgatagagaacacactaaagttcacttcctgcctgtcgttatttctgataatggtatgccctcccggactggaacaagtactttaactgtggcagtgtgcaagtgcaatgagcagggagaatttaccttctgcgaggacatggccgctcaggttggggtgtccattcaggcggtggtcgctattttactatgcattctaaccattaccgtgatcactttgctgatcttccttagacggagacttagaaaacaggcgagagcacacggcaagagcgtgcctgagattcatgagcagcttgtaacctatgacgaggaggggggaggggaaatggacaccacctcctatgatgtgtctgtattgaattccgtcaggaggggtggggctaaacctcctcgccctgctcttgatgcacgtcccagtctgtatgcacaggtacagaaaccgcctagacatgcgcctggcgctcatggagggcctggggagatggccgctatgatcgaggtgaagaaggacgaggccgaccacgacggcgacgggccaccatacgacactctccacatctatggttatgagggctccgagtctattgccgagtccctcagctcattgggaacagatagcagtgacagcgacgtggattatgattttttaaatgactggggccctagatttaagatgttagccgagttatatggatcggatcccagggaggagctgctctactag

SEQ ID NO: 27679 - DNA, 2373 bp, synthetic construct
  misc_feature 1..2373: note = Description of Artificial Sequence: Synthetic coding sequence
  source 1..2373: mol_type = other DNA
atgcgcacttatcggtattttctgctgttattttgggtaggacagccttaccctactctgtcgacacccctgtccaagcgtacatccgggttccccgctaagaaaagagcattggagctgtctggaaatagtaagaatgagctcaatcgatccaaaagaagttggatgtggaaccagttcttcctgctcgaggagtatactgggtcggactatcagtatgtaggaaagctgcatagtgatcaagataggggtgacgggagtcttaagtacatattgagtggcgatggcgctggagaccttttcattattaatgagaacacgggcgacattcaagccaccaaacgactggatagggaagaaaagccggtgtacattttgagagcacaggcgatcaacagaagaactggcaggccagtggaacctgaatcagaatttatcataaagatacacgatatcaatgacaacgaacccatattcaccaaagaggtatacactgcaaccgttccggaaatgtcagacgtggggacattcgtggtgcaagtgactgccaccgatgcagatgacccgacctatggaaacagtgccaaagttgtatactccatcttacaaggccagccctacttctctgtagagtcagaaaccgggatcatcaagacagctctcctcaacatggatcgagaaaaccgtgagcaatatcaggtggtgatacaggccaaggatatgggcggacaaatgggaggactcagcggtaccactaccgtcaatattaccctcaccgacgtcaatgataaccctccgaggtttcctcagtcaacgtaccagtttaagacccccgagtccagcccgccaggaacccccattggcagaatcaaagcatccgacgcggatgtgggagagaatgccgagatcgagtactccattacagacggggaaggactcgatatgtttgatgttatcactgatcaggagactcaagaaggcatcatcaccgttaagaagcttctggattttgaaaagaaaaaggtatacaccctcaaggtggaggcttccaacccatacgtggagccccgtttcctgtatcttggacctttcaaagactccgctacggtcagaatcgtggttgaggatgtcgatgaacctcctgttttcagcaaactggcctacattctgcagatccgggaggacgcgcaaattaacacaacaattggaagtgtcacagctcaggatcccgatgcagctcggaatccagtgaagtatagcgtggatcggcacacagacatggaccgaatattcaatatcgattccggtaatggatctatttttacctccaagctcctagatagagagactcttctttggcacaacattacagtcatagccaccgaaatcaacaacccaaagcaaagttcccgcgttcctctgtatattaaagtcctggacgtcaatgacaatgccccagagttcgccgagttctacgagacttttgtctgcgagaaagctaaggccgaccagctgatacagactcttcatgccgtggataaagatgacccttattctgggcaccagttctcattttcattagcccctgaggccgcaagcggctcaaacttcacgatccaggacaacaaggataatactgccggaatccttactcgtaaaaatggctacaaccggcatgaaatgtctacatacttattgcccgtggttatatcagataatgactatccagttcaaagttccaccggcactgtgaccgtgagagtttgtgcatgcgatcaccatggcaatatgcagagctgtcacgctgaggctctgatacaccctaccgggttgtctactggtgctctggttgctattttgctatgcattgtcattctattagtgactgtggtcctttttgctgctctccggaggcagcgcaagaaggaaccactcataatttccaaagaagacattcgcgataacattgtgtcctacaatgatgaaggagggggagaggaagatacccaggctttcgatattggtacactgcgtaatcctgaggctattgaagataacaaactgaggagggacattgtgccggaagctctgttcctgccccgaaggaccccaactgccagagataatacggacgtgcgagattttattaatcagagacttaaggaaaatgatacagaccccaccgctcccccttacgactcgctagcaacatatgcctacgagggcaccggttccgtggcggacagccttagctccttagaatccgtcactaccgacgccgaccaagactatgactacctgtccgactgggggcctaggttcaagaaactagcggacatgtacggtggcgtggactccgacaaggatagctag

SEQ ID NO: 27680 - DNA, 576 bp, synthetic construct
  misc_feature 1..576: note = Description of Artificial Sequence: Synthetic coding sequence
  source 1..576: mol_type = other DNA
atgggtggaagcggaagccgactcagcaaggagctcctcgcagagtaccaggatctgacctttttaacaaagcaggaaatattactcgctcatagaaggttctgtgaactccttcctcaggagcagcgctcagttgaatcaagcttgcgcgcacaggtgcccttcgaacagatcctatctctgcctgagctgaaggcgaatccatttaaagagagaatctgcagggtcttttccactagccccgctaaggattcactgtccttcgaggactttcttgacctgctctcggttttttctgacacggcgacacccgacatcaagtctcactatgctttccggatttttgattttgatgacgacggtacgctgaaccgagaggatctgagccggctcgttaattgcttgactggagaaggcgaggacacacgtttatctgcatccgagatgaagcagctaattgacaacatcctcgaagagagcgatatcgacagagacgggaccattaacctttccgaatttcagcacgtgattagccgcagcccagacttcgcatccagctttaaaatcgttttgtag

SEQ ID NO: 27681 - DNA, 237 bp, synthetic construct
  misc_feature 1..237: note = Description of Artificial Sequence: Synthetic coding sequence
  source 1..237: mol_type = other DNA
atgagcgaagtgctgccctacggggatgaaaagctgagtccctatggcgacggcggagacgtgggccagatattctcctgccgccttcaggatacaaacaattttttcggcgcaggccagaacaagcgcccaccaaagctgggacagattggtcgatctaaaagagtggtgatagaagacgatcgaattgacgatgttctcaaaaacatgaccgataaggcccctcccggagtgtag

SEQ ID NO: 27682 - DNA, 1563 bp, synthetic construct
  misc_feature 1..1563: note = Description of Artificial Sequence: Synthetic coding sequence
  source 1..1563: mol_type = other DNA
atggagggcggacccgcagtgtgctgtcaagaccccagagccgaactagtggaacgagtggccgcaattgatgtaacccatttggaagaagctgacggaggcccagaacccacacggaatggggtggatccccctccacgagccagagccgcaagtgtcataccaggcagtacttcacgactcctccctgccagaccttccttgtccgctcggaagctgagtctgcaggaacggccagccggttcctacctcgaggcacaggcaggcccatacgctacgggacccgcttctcatataagccccagagcctggcggagacctacaatcgaatcccatcacgtagcaatcagcgatgccgaggactgcgtacaacttaatcaatacaagttgcagagcgagatagggaaaggcgcttacggcgttgtgcgcctggcttacaacgaaagtgaggatagacactacgccatgaaggtcctttcaaaaaagaagttactcaagcagtatgggtttccgagacgaccccctccaaggggaagtcaggctgcccagggcggaccagcaaaacagctgctgccattggagcgagtgtatcaagagattgcaatcttgaaaaagctagaccacgtaaatgtggtgaaactcatcgaggtgctggacgacccagccgaggacaacctctacctcgcactccagaatcaagctcagaacatccagttggatagcacaaacatcgccaaaccccacagcttgctgccatccgaacaacaggacagtggctctacctgggccgcacggtctgtgtttgatctgttgcgtaagggaccagtaatggaggtgccttgtgacaagccattctccgaagaacaggctcgcctgtaccttcgggatgtcatcctcggactggagtatctgcactgccaaaagatcgtacatagggacatcaagccctcaaatctattgcttggcgacgacggccacgtgaagatcgccgactttggggtgagcaatcagtttgaaggaaatgacgcccagctgtcctccaccgcaggaacgcctgctttcatggcgcctgaagcgatcagtgattctggccaatctttttccgggaaggcgcttgatgtttgggccacaggcgtcaccctatactgtttcgtgtatggaaagtgtccgttcattgacgatttcattctggctctacaccgtaagatcaagaacgaacccgttgtttttccggaagagcctgagatctcagaggaactaaaggatctcatcctcaaaatgttggataaaaaccctgagacccgtatcggggttcccgacatcaagctgcatccttgggtcacaaaaaatggagaggaacctctgccctctgaggaagaacactgcagtgttgtggaggtgaccgaggaagaggtaaagaacagtgtgagactgattccaagctggactacagtgatcctggtgaagtcaatgctcaggaaaagaagcttcggtaatccatttgaaccacaagccaggagggaagagaggagcatgagtgcacccggaaatctgctcgtgtag

SEQ ID NO: 27683 - DNA, 1518 bp, synthetic construct
  misc_feature 1..1518: note = Description of Artificial Sequence: Synthetic coding sequence
  source 1..1518: mol_type = other DNA
atggagggcggacccgcagtttgttgccaggacccacgagcggagttagtggagcgcgtcgccgctattgatgtgacgcacttggaagaagctgacggaggccctgaacccactcgcaacggcgtggacccccctccccgagctcgcgctgctagcgtaataccaggtagcacatctagactgcttcccgcacgccctagcctgagcgcccgaaagctgagcctgcaggaaaggcctgccggatcctacttagaggcgcaggccggtccctatgcaacaggccctgcttcacacatctcacctagggcctggagacgacctacaatcgaaagccatcacgtcgctattagcgacgctgaggactgtgttcagctgaaccagtacaagttacagtcagaaatcggaaaaggcgcatatggggttgtaaggctggcatataacgagagcgaagatcgtcattacgccatgaaagtgctgtccaagaagaagctcctgaaacaatacggctttcctcggcgaccaccccctcgaggcagccaagcagcacaggggggacctgccaagcagttactcccactcgagagagtctatcaggaaatcgccatccttaagaagttggatcatgtgaatgttgttaagctaattgaggtgctggacgatcctgctgaggacaacctgtatctggtgtttgacctgctgcgaaagggccctgtgatggaggttccatgcgacaaacctttcagcgaggaacaggccaggctctatctcagggacgtgattttgggacttgaatacctgcattgccaaaagatcgtgcatagggacattaaaccgtcaaatttactcctgggagatgatggacacgtaaaaatcgctgattttggcgtgtcaaaccagttcgagggaaacgacgcccaactgagctccacagccggaacccccgcttttatggcgccagaggccatatccgatagcgggcaatcttttagcggcaaagcactggatgtctgggctactggcgtgacattatactgcttcgtttacggtaagtgcccctttatcgatgacttcatcctcgccctacacaggaagatcaagaacgaacctgtggtctttcctgaggagccagagatttcagaagagctgaaagacctcattttgaagatgctcgataagaatcctgagaccagaatcggcgtgccagacatcaaactgcacccgtgggttacgaagaatggtgaagagcctctcccaagcgaggaagaacactgcagcgtggtagaagtcacagaggaggaggtgaagaattcggttcgcttgataccctcctggaccactgtgatactggttaagtctatgctgaggaagagatcatttggaaacccatttgaaccccaggcgaggcgggaggagaggtccatgagcgcccctggcaatctgctggtcaaagaaggatttggggaagggggtaaatcccccgagctgcctggagtccaagaagatgaggctgcgagctag

SEQ ID NO: 27684 - DNA, 1599 bp, synthetic construct
  misc_feature 1..1599: note = Description of Artificial Sequence: Synthetic coding sequence
  source 1..1599: mol_type = other DNA
atgcagtttggtaagctatggtgcggctgcagtggcgaatttccaacacgtctgcgtcggagaactccactgacagaggccatggaaggtggacctgctgtttgttgccaggatcctagagccgagctggtagaacgagtcgcagccattgatgtgacccacctggaggaggccgacgggggaccagagccaacaaggaacggagtggatccaccccctagggcccgagccgcttccgttataccgggaagcacatcgaggctgttgcccgcacggccatcgttgagtgctaggaaactgtctctgcaagaacgaccggcaggttcatatctcgaagctcaggccggaccttatgccaccggcccagccagtcacatttcccctcgtgcctggagaaggccaacaatagaaagtcatcatgtggcaatatccgatgccgaggattgcgtccaactcaatcagtacaagcttcagtccgagatcgggaaaggtgcatatggcgtggttcgcctggcctacaacgagtccgaagaccgacattatgcaatgaaagtgctgtcgaaaaaaaagctcttaaagcaatacggctttccacgtagaccaccacccagaggctcccaggcagcgcagggtgggccagcaaagcagctgttacctttagagcgagtctatcaggagatcgccattctcaaaaagctagatcacgtgaatgtcgttaaactgatcgaagtccttgatgacccggcagaggacaatctgtacctcgtgtttgaccttctgcggaagggaccagtgatggaggtgccatgcgacaagccattcagtgaggagcaggccagactctacctgagagatgtgatattgggactggaatatctgcactgtcagaaaatcgtccatcgagacatcaagccctcaaatttgttactgggcgacgacggccacgtaaagatcgcagattttggagtctcaaatcagtttgaaggaaatgacgcccagctgtcgagcactgctggtaccccagcattcatggctcccgaagccatttccgattctggacagtcattctccggcaaggcgctcgatgtttgggccactggcgtgaccttgtattgcttcgtatacggcaaatgcccattcatcgatgacttcatactcgcactgcacaggaaaataaaaaatgaaccggtggtcttccctgaagagcccgagatcagcgaggagctgaaagatctgatactgaagatgctcgacaagaaccccgagactaggattggcgtgcctgatattaagttacacccatgggttaccaagaacggtgaagaacctttacctagtgaagaagaacattgttctgtggttgaggttaccgaggaagaggtaaaaaattccgttcgtttgattccttcttggacaacagtgattctagtgaaatctatgctgagaaagcgttcattcgggaatcctttcgaacctcaagccaggcgcgaagagagatcaatgtcagctcccggtaatctcctggtcaaggaggggttcggggaggggggtaaatccccggaactccccggagtgcaggaggacgaggcggctagctag

SEQ ID NO: 27685 - DNA, 1632 bp, synthetic construct
  misc_feature 1..1632: note = Description of Artificial Sequence: Synthetic coding sequence
  source 1..1632: mol_type = other DNA
atggaggggggacctgccgtgtgctgccaagacccccgagcagagctggtggagagggtggctgccattgacgtgacccatctggaggaagctgacggaggtccggagccaacccgcaacggagtggatcctccccctagggctcgcgctgcaagcgtgatccccggatcaacctcgcgcctgctgcctgctcggccatcattgtccgctaggaagttatctttgcaagaacggcctgccggttcatacttagaggcccaggccggaccttacgcgacaggaccagcctctcacataagtcccagagcctggcgcaggccgaccatcgagagccaccacgtggccatcagtgatgccgaggactgcgtccagctgaatcaatacaagctccaatcagagattggaaagggggcatacggagtggtacgcttggcctacaacgaatccgaggaccgccactacgcaatgaaagttctttccaagaagaaactgctgaagcagtacgggttccctcgtcgccctcctccgagaggatcccaggccgcacaaggaggtcctgcaaaacagcttctgcctctggagagagtctatcaggaaatcgcgattctgaaaaaactcgatcatgtgaacgtggttaagctaattgaagtactcgatgaccccgcagaagacaatttgtacttggcactgcaaaaccaagcgcagaatattcagttagacagcactaatattgcaaaaccacatagtctgctgccgagcgaacaacaagattcagggtctacatgggccgctagatctgttttcgacctgctgcgcaaaggacccgttatggaggtaccatgcgataagccattcagcgaggaacaggcccgactttacctgcgcgacgtgatcttggggctggaatatttgcactgtcagaaaatcgttcaccgagacatcaagccgtcaaacctgctgcttggcgacgatggccacgtgaagattgccgattttggtgtcagcaaccagttcgagggaaatgatgcacagttgtccagtactgcgggaactccagctttcatggctccagaggctatcagcgacagtggacagtctttttcaggtaaggcgctcgacgtgtgggcaaccggggtgactctgtattgcttcgtttacgggaagtgcccctttatcgatgatttcatactcgcccttcataggaagatcaagaatgaaccagtagtgttcccagaggagcctgaaatctcagaagagctgaaggacttgattttgaaaatgctagataaaaatccggagacccgtattggagtcccggatatcaaactgcacccttgggtgacgaaaaacggcgaagagccgctgccgagcgaggaagagcactgttccgtggtggaagtcactgaggaggaagtcaagaacagcgtccgcctcatccctagctggaccaccgtaatccttgtaaagtccatgcttcgaaagcgctcctttgggaatccgttcgaacctcaggcacgcagggaggagcgaagcatgtccgcccctggaaacctgcttgtaaaggagggctttggcgagggcggtaaaagtccagagctccccggagtccaggaagatgaggccgcttcatag

SEQ ID NO: 27686 - DNA, 1695 bp, synthetic construct
  misc_feature 1..1695: note = Description of Artificial Sequence: Synthetic coding sequence
  source 1..1695: mol_type = other DNA
atggatgatttcgagagacgtagagaactgaggaggcagaaacgggaggaaatgaggctcgaagccgagaggatcgcttaccagcggaacgatgatgatgaggaggaagcagctagggagcggaggaggcgggcaaggcaggaacgactgcgccagaaacaggaagaggagagcctcggccaagtgacagatcaagtggaagtcaatgcccaaaacagcgttcctgacgaggaggcgaagactactaccactaatacgcaggtggagggggacgacgaagccgcattcctggagaggctggcgcgacgcgaggagcggcgtcaaaagcggttacaggaggcactggagcggcagaaggaatttgatcccaccatcaccgacgcatcacttagcctgccctccaggagaatgcagaacgataccgccgagaacgagaccacagaaaaggaagaaaagagtgagtccagacaggaacggtacgaaatcgaggaaacagaaacagtaacgaaatcttaccagaagaacgactggcgggacgcagaagagaataaaaaggaagataaggagaaagaagaggaggaggaggaaaaacccaagcggggtagcatcggagagaaccagggcgaggaaaaaggcaccaaagtgcaggcgaagcgcgagaagctgcaggaggacaaacccacatttaagaaagaggagataaaagatgagaagatcaaaaaggacaaggaacccaaggaggaggttaaatccttcatggatcgtaaaaaaggcttcaccgaggtgaagtcgcaaaatggcgaattcatgactcataagctgaagcacacagagaacactttctcacgtcctggcggtagagcaagtgttgatactaaggaagcagagggcgctcctcaagtggaggccggtaagcgacttgaagagctgcgcagacgacggggagaaacagaaagtgaagagttcgagaaactcaaacagaagcagcaggaggccgcacttgagctggaggagctcaagaaaaagagggaagagagaagaaaagtgctagaggaggaggaacagcgccgaaagcaggaagaagccgataggaaacttagggaggaagaggagaagcggcgtttgaaggaggaaatcgaacgcagaagagccgaggctgccgagaagcgccagaaaatgccagaagacggccttagcgatgacaaaaaaccgtttaagtgcttcacacccaagggatctagcctgaagatcgaagaacgtgcagagtttctgaacaaaagcgtgcagaagtcctcaggcgttaagtctacgcaccaggctgctatagtgtctaaaattgactcacgtctggagcagtatacctcggcaattgagggaacaaagtctgctaagcctactaagcctgccgcatctgatctgccagtgccagcagaaggcgtgaggaatatcaagtcaatgtgggagaaaggaaacgtgtttagcagccccaccgcagctgggacaccaaataaggaaacggccggtctgaaggtgggggttagctcccggataaatgagtggctcaccaagactccagacgggaacaagagtcccgctcccaagccctcagatctacgccctggcgatgtgtctagcaagcggaacctgtgggagaagcaaagtgtagacaaggtcacttcccctactaaggtctag

SEQ ID NO: 27687 - DNA, 2382 bp, synthetic construct
  misc_feature 1..2382: note = Description of Artificial Sequence: Synthetic coding sequence
  source 1..2382: mol_type = other DNA
atggatgacttcgagcgcaggagggagctacggagacagaaacgggaggaaatgcgactagaggcggaacggatagcttaccagaggaatgacgatgacgaggaggaagccgcaagggagaggcggagaagagcacgacaagagcggttgaggcagaagcaggaggaagagagtctgggccaggtaacagaccaggtcgaggtcaatgcacagaacagcgtaccggacgaggaagccaaaactactacaacaaacacacaggttgagggtgacgatgaggccgcattcctggagagactggctaggagggaggagaggaggcagaaacggcttcaggaggccctagagagacaaaaagagttcgatcctaccatcacggatgcctcgctatccctgccctctcgtaggatgcagaacgacacagcagagaacgaaaccacggaaaaagaggagaaatccgagtccaggcaagagaggtacgaaatcgaagagactgaaaccgtaacgaaatcttaccagaagaacgactggagagatgcagaagaaaacaagaaggaagacaaagagaaagaagaggaggaggaagagaagccgaagcgcggatcgattggcgagaaccaggtcgaggttatggtggaggaaaagaccacagagagccaggaagagacggttgtaatgtcactgaaaaatgggcagatctcttctgaggagcccaagcaggaggaggaaagagaacagggttcggatgagattagccatcacgaaaaaatggaggaagaagataaagagcgtgccgaggctgagagagcgaggctggaggctgaagagcgcgagagaatcaaggcagaacaggacaagaagattgctgacgaaagagccaggatcgaagccgaagagaaggcagctgcccaagagagggaaagaagagaagccgaggaacgcgagcgcatgcgcgaggaggaaaaaagggcggctgaggaaagacagcgcataaaggaggaggagaagcgggcagctgaagagcgccaaagaatcaaggaggaggagaaaagagcagctgaggaacgtcagcgaatcaaagaagaagagaaacgcgcagcagaggaacggcagcgagctcgtgccgaggaagaagaaaaggctaaggtggaggaacagaagagaaacaagcagctggaagagaagaagcatgctatgcaggagacaaagattaagggtgagaaggtagagcagaagattgaaggaaaatgggtgaatgagaagaaagcccaagaggacaagctgcagacggccgtattgaaaaaacagggtgaagagaagggtacaaaagtccaggccaagcgggagaaactccaggaggacaaacctaccttcaagaaggaagaaatcaaggacgagaaaattaagaaagacaaagaaccaaaggaggaagtcaagagtttcatggatagaaaaaagggattcacagaagttaaaagccagaatggggaatttatgactcataagctgaaacacacagagaacacatttagtaggcccggaggacgagccagcgttgacactaaggaagctgagggggcaccgcaggttgaagccggtaagcgactcgaagagctgcgcagaaggagaggggaaactgagtccgaggaatttgagaaactcaaacagaagcagcaggaagctgctttggaattggaggagctcaagaagaaaagggaagagagacgcaaggtgctggaggaggaggagcagcgcagaaagcaggaggaggccgacagaaaactgcgggaagaggaagagaaaagacgcctgaaggaggaaatagagcggcgacgtgcagaagctgccgaaaaacgccagaagatgcctgaggatgggctaagcgatgacaagaagccattcaagtgcttcacacctaaggggtcttccctgaagatcgaagaaagagcggagttcctgaacaagagcgtccagaagagcagcggagtaaagtccacacatcaggcagccattgtgtctaagatcgactcgcgactggagcagtacacctctgctattgaaggaactaagagcgctaagccaacaaagcccgctgcatcagacctgcccgtacccgctgagggagtgcgcaacattaagagcatgtgggagaaggggaatgtgtttagtagcccgaccgccgctggtactccaaataaagagaccgctgggctgaaagtgggagtgagcagccggatcaatgagtggctcacgaagactcctgacgggaataagagccccgcaccaaagccaagtgacctgagacccggtgacgtctcatccaagcggaacctgtgggaaaagcaatctgtggacaaggtaacaagtcccaccaaagtgtag

SEQ ID NO: 27688 - DNA, 1617 bp, synthetic construct
  misc_feature 1..1617: note = Description of Artificial Sequence: Synthetic coding sequence
  source 1..1617: mol_type = other DNA
atggatgattttgagcgccgtcgtgagttacgtcggcagaagagagaagagatgcggctggaagcagaaagaattgcgtaccaacgcaatgatgatgacgaggaggaagcagctcgtgaacgacgcaggagagccaggcaggagcgtctccgccagaaacaggaagaggaatcactggggcaggtgaccgatcaggtggaggtaaatgcccagaattcagtccccgacgaggaggcaaagacaacgacaacaaacacccaggtagagggggatgacgaggcagcttttctggagagactggctaggcgagaggaacgacgccagaaacggctgcaggaggccctggagaggcagaaagaatttgacccaacaataactgatgccagcctgagccttcccagcaggagaatgcagaacgacacagcagagaacgaaactaccgagaaagaagagaaatctgagagtcgtcaggaaagatacgagatcgaggaaaccgaaaccgttactaagtcataccaaaagaacgattggagagatgctgaagaaaacaagaaggaggataaagaaaaggaagaagaggaagaagaaaagccaaagagaggctccattggagaaaaccagatcaaagatgagaagattaaaaaagacaaagagcctaaggaggaagttaagagctttatggaccgcaaaaagggattcaccgaggttaaatcgcagaatggggaattcatgacacacaaactgaaacacacagagaatactttctcccgacccggaggcagagcgtctgtggacaccaaggaggccgagggcgctccgcaggtcgaggcaggaaagagactggaagagctgcggcgacgcagaggcgagacagaatccgaggaatttgagaaactgaagcaaaaacagcaagaagccgcattggagctggaggagctgaaaaaaaagagagaggaacgccgaaaggtgctggaagaggaggagcagcggagaaaacaggaggaggccgaccgcaaactccgcgaagaggaggagaagcgtagactgaaggaggagatcgagcgccgaagggctgaggctgcagaaaagcgacagaagatgcctgaggatggtctcagtgacgacaagaaaccctttaagtgtttcactcctaaaggttcttccctgaagatcgaagagcgggctgaatttctgaataaatccgtccagaaatcatctggcgtgaaaagtactcatcaggccgcaattgtgtccaagatcgatagcagactggaacagtatacatctgcaatcgaaggcaccaaaagtgccaaacctacaaaacccgctgccagtgatctaccagtgccagcggagggagtgcgcaacattaaatcaatgtgggagaaaggcaacgtgttcagtagcccgaccgcagcgggaactccaaacaaagaaaccgccggtttgaaagtgggtgtatcctcgagaatcaatgagtggttgaccaagactcctgacggaaataaatctcccgcaccaaaaccatctgacctgcgccctggtgacgtgtcctccaagcggaacttatgggagaaacaatcagttgataaggtgacatccccgaccaaggtgtag

SEQ ID NO: 27689 - DNA, 1677 bp, synthetic construct
  misc_feature 1..1677: note = Description of Artificial Sequence: Synthetic coding sequence
  source 1..1677: mol_type = other DNA
atgctgggagggtccggatcacacggacgacgttcactcgccgcactttcccaaatcgcttatcagcggaacgacgatgatgaagaggaggccgcacgggagcgcagacgacgagcgcgacaggaaaggcttagacagaaacaggaggaggagagcctgggccaggtgactgaccaggtggaggttaacgcgcagaattccgtgcccgatgaggaagcgaagacaaccacaactaacacccaggtggaaggggacgatgaggcggctttcttagagaggctggctagacgcgaggagcggaggcaaaaacgcttacaggaagcattggaaaggcagaaagaattcgaccccaccattactgatgccagtctgtcactgccttcccgcaggatgcaaaacgataccgctgagaatgagaccacagaaaaagaggagaagtccgaatccaggcaagaaagatatgaaatcgaggaaaccgaaaccgtaacgaaaagttaccaaaagaacgattggcgcgatgctgaagaaaataaaaaggaggacaaggaaaaagaagaggaagaggaggagaaacctaaaaggggtagtatcggtgaaaaccagggcgaagagaaagggacaaaggtccaggcgaaaagagagaagctgcaggaggataaaccaacatttaaaaaagaggaaataaaggatgaaaagatcaaaaaagataaagaaccaaaagaagaggtcaagagctttatggataggaagaaaggatttaccgaggtaaaatcccaaaatggagagttcatgactcataagcttaagcacacagaaaataccttctccaggcctgggggacgcgcatccgtggataccaaggaagccgagggagctccgcaagtcgaggctggtaaaaggctggaggagctgagacggcgtcgcggagagactgaatcagaggaatttgaaaagctcaaacaaaagcagcaagaggcagcccttgagttggaggagctgaagaaaaagcgtgaggagcggagaaaagtgctcgaagaggaagaacagagacgcaagcaagaagaggccgaccgcaagctgcgggaggaggaagaaaagaggcgactgaaggaggaaatcgagcggcgaagagccgaagcggctgagaagcgacagaagatgcctgaggacggcctctcagacgacaagaagccattcaaatgttttacacctaaaggaagtagtttaaagatcgaggagcgagccgagtttctcaataaaagtgtgcagaaaagtagcggggtgaaaagtactcaccaagcggcaatagtgtcaaagatcgatagtcgccttgaacaatacacatccgccatcgagggcaccaaaagcgccaagcctaccaagcccgctgcatccgacctccccgttccagcagagggtgtgcgaaatatcaaatccatgtgggagaaggggaatgtgttctcctcccctacagcagccggaacaccaaataaggagacagctgggctcaaggtaggggtctcgagtaggatcaacgagtggctcaccaaaactcctgatggtaacaagtcccccgctcccaagccttctgatctaaggcctggggatgtgtcgtctaagagaaacctgtgggaaaagcagtctgtagataaagtgacctccccgaccaaggtgtag

SEQ ID NO: 27690 - DNA, 1617 bp, synthetic construct
  misc_feature 1..1617: note = Description of Artificial Sequence: Synthetic coding sequence
  source 1..1617: mol_type = other DNA
atggatgatttcgaacgacgacgagaactgcgaaggcagaagagggaagagatgcgtttggaggccgagagaatcgcctatcaacgcaatgacgacgatgaagaggaagctgccagagagcgtcgcagacgggctaggcaggagaggctgagacagaaacaggaggaagagtcactgggacaggtgacagatcaggtggaggtcaatgcccagaattcagtccctgacgaggaggccaagacaacaacgaccaacacccaggtagaaggagatgacgaagcagcctttctggagagactggctcgtcgcgaagaaagacggcaaaaaaggcttcaggaagcgctggaacggcagaaggagtttgacccgaccatcacagatgcaagcctcagcctgcccagccgccgaatgcaaaacgacaccgctgaaaacgagaccaccgagaaggaagagaagtctgaatcacgccaggaaagatacgaaattgaggagacagagaccgtcacaaaaagttaccagaagaatgattggagggacgctgaggagaacaagaaagaagataaagagaaggaggaggaggaggaggagaaacccaagcgtggctctattggcgagaaccagattaaagatgaaaagattaagaaagacaaggagcccaaggaagaggtcaaatctttcatggataggaagaaaggcttcactgaagtaaaatcccagaatggagagtttatgacacataaactcaaacatacagaaaacacattcagcagaccaggtggacgtgcctccgtggacacgaaggaagccgagggggctccacaagtagaggctggcaagaggctggaggagctgaggcggcgtcgaggcgagactgagtcagaagagttcgagaaactaaagcagaagcaacaggaggccgctctggagctggaggagctcaagaaaaaaagagaagagagaaggaaagttttggaagaagaggagcagcggcgtaagcaggaagaggccgatcgcaagttgcgagaggaggaggagaagcggaggctgaaggaagagatcgaaagaagacgagccgaagcagctgagaaacgccagaagatgcctgaagatggattaagcgacgacaaaaagccctttaagtgcttcacccccaagggcagctctctgaagatagaggaaagggccgaattccttaacaagagcgtgcagaagagctcaggcgtgaaatcaacccaccaggctgccatcgtgtccaagatcgattctaggctcgagcagtacacttccgcgattgagggcacaaagagcgccaagccaactaaacctgccgcaagtgacctgccagttcctgcagagggcgtccgtaacattaagagtatgtgggaaaaagggaatgtgttctcgagtcctacagcggcaggtaccccaaacaaagaaaccgccggtttgaaagtgggggtgtccagtcgcattaacgagtggcttactaagacccccgacgggaacaagtcaccagcacccaagccttctgacttgcgccctggagacgtttcaagcaagagaaatctgtgggagaagcagagcgtcgataaagtgacttctcccaccaaggtgtag

SEQ ID NO: 27691 - DNA, 1692 bp, synthetic construct
  misc_feature 1..1692: note = Description of Artificial Sequence: Synthetic coding sequence
  source 1..1692: mol_type = other DNA
atggatgactttgagagaagacgagagctacgccgacagaagcgcgaggagatgaggctggaagctgaaaggattgcataccagcgcaacgatgatgatgaggaggaggccgcaagggagaggcgcagacgcgctagacaagagagactcagacagaagcaggaggaagaatctctcggccaagtgacggaccaggtggaggttaatgctcagaattctgtaccggatgaagaagccaagacgaccactactaacacacaagtcgagggagacgatgaagctgctttcctggagaggctggcgcgacgagaggaacgccgacaaaagcgcctccaagaggctctggagcgacagaaggagtttgaccccacaatcacagatgcctctctgagtctgcccagtaggcggatgcagaacgacacagcagaaaacgagaccactgagaaggaagagaagtctgagagcagacaagagcggtacgaaattgaggagacggagacagtaactaaaagctatcagaaaaatgattggagagacgcggaggagaacaagaaggaagacaaggagaaagaagaagaggaagaggaaaagccgaaacggggatctattggggaaaatcaaggggaagagaaaggtacgaaagtgcaggcaaagagagaaaagctccaggaagacaagcctacttttaagaaagaagaaattaaggatgagaaaatcaagaaggataaggaacctaaagaagaggtgaagtctttcatggatcggaagaaagggtttactgaagttaagagtcaaaacggggagttcatgacacataagcttaagcatacagagaacaccttctcaagaccaggcggtagagccagcgtggatactaaggaggccgaaggcgcaccgcaggtggaagcaggtaagagactcgaggagctgagaagacggagaggagaaaccgaatcagaagagtttgaaaagcttaaacagaagcagcaggaagctgccttagaacttgaggaattgaaaaagaaacgggaagagcggaggaaggtgcttgaagaagaagagcagcgacgcaagcaggaagaagctgatcgcaaattacgagaggaagaggaaaaaaggcgcctgaaggaagaaatcgagcggaggagggctgaggctgctgaaaagcgacaaaagatgcccgaggacggactaagcgacgacaaaaaaccgtttaagtgcttcaccccgaaaggctcctcattgaagatagaggagcgtgctgagtttttaaacaaatcagtgcagaagtcaggcgtgaagtctactcaccaggcagcgatcgtaagtaagatagattctcgcctggagcagtacactagtgctattgagggtacgaagagcgccaagccaactaagccagcagccagcgacctgcctgttcccgcagagggcgtgcggaatataaagtctatgtgggaaaaaggcaacgtcttctcttccccaaccgcggcaggtacccccaataaggagacagcaggcttgaaggtgggtgtgagctctcggatcaacgagtggctgactaagacaccagatgggaacaaatctccagctcctaaaccctccgatctaaggccaggagatgtgtcatcaaaacgcaacctgtgggagaaacaaagcgttgataaggtaacatctcctacaaaagtttag

SEQ ID NO: 27692 - DNA, 1599 bp, synthetic construct
  misc_feature 1..1599: note = Description of Artificial Sequence: Synthetic coding sequence
  source 1..1599: mol_type = other DNA
atgctcggaggttctggatcacatggcaggcggagcctcgccgctctttctcagatcgcctaccaacggaacgatgacgacgaggaggaggcggcacgcgaaagacgacgcagagctagacaggaaaggctacggcagaagcaggaggaggaaagcctcggtcaggttactgaccaggtcgaggtgaacgcgcagaattcagtccctgatgaagaagccaagaccacaaccacaaatactcaggttgagggggacgacgaagctgcattcctggagcgccttgcgaggagagaagaacggaggcagaaacggttacaggaagctctggagcgccagaaggaatttgatcctacaatcacggatgcttccttatccctgccctcccgacgcatgcagaacgacacagcagaaaacgaaactaccgaaaaggaggagaaaagcgaatctcgtcaggagcggtatgaaatcgaagagaccgagacagtgaccaaaagctaccagaagaatgattggcgggatgctgaggagaacaagaaagaggacaaggagaaagaggaggaagaggaagaaaaaccaaagagaggttccattggtgaaaaccagattaaggacgagaagatcaagaaagacaaggagccaaaagaggaagtgaaatcttttatggaccgaaaaaaggggttcacggaggtcaagtcccagaatggggagtttatgacgcacaaactcaagcacacggaaaataccttctctagacctggtggtcgcgcaagcgtggacacgaaagaagctgaaggtgcccctcaagttgaggccggaaaacgcctggaggagcttcgaaggcgccgtggcgagactgaaagcgaagagtttgaaaagctaaaacagaaacaacaggaggccgctctcgagctggaagagcttaaaaagaaaagggaagagaggcgtaaggtgctggaggaggaagaacagcgacggaaacaggaagaggcagacagaaagctgagagaggaggaggagaagcggcgtctcaaggaggaaattgaacgcagaagggcggaagcggcagagaagaggcagaaaatgccagaggatggactgagcgacgataaaaagcccttcaaatgtttcactccaaaggggagcagcctgaagattgaggagagagccgagtttttaaataagtccgtgcagaaatctagtggcgtgaaaagtacacatcaggctgcgattgtttccaagatcgacagccgactggagcaatatacttctgccatcgaaggcaccaaaagtgctaaaccaacgaaaccggcagcatccgacctgcccgtacctgccgagggagtgcgcaatataaagtctatgtgggagaagggcaatgtctttagctccccaacggccgcaggtacacctaacaaggagaccgctggcctgaaggttggagtctcctcccgtatcaatgagtggctgacaaagactcccgatgggaacaagtcccctgcgcctaagccttctgacctgagacccggtgatgtcagtagtaaacggaacctgtgggagaagcagtccgtagacaaggtcacaagtcccacgaaggtctag

SEQ ID NO: 27693 - DNA, 528 bp, synthetic construct
  misc_feature 1..528: note = Description of Artificial Sequence: Synthetic coding sequence
  source 1..528: mol_type = other DNA
atgccagaagacggactttctgatgataagaaacctttcaagtgctttacaccaaaaggttctagtctgaagatagaggaacgggctgagtttctgaacaagagcgtccagaaatccggcgttaaaagtacccatcaggcagccattgtatcaaagattgattccagactggagcagtatacatctgcaattgagggaaccaagagtgcgaaacccacaaagccagcagcgagtgatcttcctgtccctgccgagggagttcgcaacattaaatccatgtgggagaagggaaacgtgttctcctctcccacagcagccggtacccctaacaaagagactgctggtcttaaggtgggggtctcaagtcgaataaatgagtggttgaccaagacccccgatggcaataagtccccagctcccaagcctagcctgacattttgcagctcacttttcggattatggctgattggcaatctactcctgcttccaagctttctgccgctcttgcccgagtgggtcttcctgtag

SEQ ID NO: 27694 - DNA, 219 bp, synthetic construct
  misc_feature 1..219: note = Description of Artificial Sequence: Synthetic coding sequence
  source 1..219: mol_type = other DNA
atggatgactttgaaagacgaagagaacttcgaagacagaagagagaggagatgcgtctcgaggcagagcgcattgcgtaccaacgcaacgatgacgacgaggaggaggccgctcgagaacgacggaggagagcacgacaagaacgacttcgtcagaagcaggaggaagagtcgctggggcaggttactgaccaggtggaggtaaacgcccagaactag

SEQ ID NO: 27695 - DNA, 1380 bp, synthetic construct
  misc_feature 1..1380: note = Description of Artificial Sequence: Synthetic coding sequence
  source 1..1380: mol_type = other DNA
atggatgattttgagaggcgcagagagctcaggcgccagaaaagggaagagatgcggctggaggcagaacgcatcgcctaccaacggaacgacgacgacgaggaagaggccgcaagggagcgcaggcgcagagccaggcaagaacggcttcgtcaaaagcaggaagaggaaagcctgggtcaggtgactgatcaagtggaggtaaatgcccaaaactccgtgccagacgaagaggccaagactacaaccactaatactcaagtggagggcgacgatgaggcagcatttctcgaacgcctggctaggagagaggagcgtcggcagaaacggctccaagaagctctggagcgccagaaagagttcgaccccaccatcaccgacgcctctctgtcactcccttctcgcagaatgcaaaatgataccgctgagaatgaaactacagagaaggaagagaagagcgagtctagacaggaaagatatgagatcgaggaaaccgaaacagtgacaaaatcatatcagaaaaacgattggcgggatgctgaggaaaataagaaggaagataaggagaaagaagaagaagaagaggagaagcccaaacggggatcaatcggcgagaaccagataaaggacgagaagatcaaaaaagacaaggaacctaaagaagaggttaaatcgtttatggatcgtaagaagggatttactgaggtgaaaagccagaatggcgagttcatgacgcataaactgaagcatactgaaaacacttttagccgtcctggcggtcgcgcttcagtggatacaaaggaggccgagggggctccacaagttgaggcagggaagagacttgaggaactgaggaggaggcgcggtgagacggagagcgaagaatttgaaaagctcaagcagaagcaacaggaggccgcactggagttggaggaactgaaaaagaaacgggaagagaggagaaaggtccttgaagaagaggagcagcggaggaagcaagaagaggccgatagaaagctgcgggaggaggaggaaaaacgtaggttaaaggaagagatcgagagacgacgggctgaggcggcagagaaacggcagaagatgcccgaagacgggttgtctgacgacaagaaacccttcaagtgctttacccccaaagggtcctctctgaagatcgaagagcgagccgaatttcttaataagtctgtgcaaaagagtagtggcgtcaagtctacacatcaggctgccatcgtgtccaagatcgattccaggttggagcagtacacatcagctattgaagggacaaagagcgccaagccaacaaaacccgcagccagtgatctgccagttcccgctgagggagttagaaatattaaatcctag

SEQ ID NO: 27696 - DNA, 219 bp, synthetic construct
  misc_feature 1..219: note = Description of Artificial Sequence: Synthetic coding sequence
  source 1..219: mol_type = other DNA
atggacgacttcgaacgcaggagggagttgcggagacagaagcgagaggaaatgcgattagaagcagagcgcattgcatatcagcgtaacgacgatgacgaggaagaagcagcgagggagcgtcggagaagagcacgccaggagcgcttaaggcaaaagcaggaagaagagtccctgggccaggtgacggaccaggtcgaggtgaacgcacagaactag

SEQ ID NO: 27697 - DNA, 1632 bp, synthetic construct
  misc_feature 1..1632: note = Description of Artificial Sequence: Synthetic coding sequence
  source 1..1632: mol_type = other DNA
atgacctcctacatgaaggtagaccgtcaatggaatgccgaaatattggaactcatactgggtactggacagctgtccactggccaaatcgcctatcagcgcaacgacgatgacgaggaggaagcagccagggaaagacggaggcgtgcaagacaagagcggctccgccagaaacaggaagaagagtccttgggccaggttacggatcaagtcgaggtaaatgcacaaaattctgtgcccgatgaggaagccaagaccaccactacaaatacacaagtggagggggacgacgaagctgccttcctcgaaaggctggcacgaagggaggaacgacgtcagaagcgattacaggaggcacttgagcgccagaaggaatttgatcccacaataactgacgcatctctgtcattgccctcccgtaggatgcagaacgacactgctgagaacgaaactactgagaaggaggaaaaatctgagtcccgacaggagcgctatgaaatcgaggaaacagaaacggttacaaagtcctatcagaagaatgattggagagacgccgaggaaaacaagaaagaggacaaagagaaagaagaggaggaggaagaaaagccaaagcggggatcaattggcgagaatcagatcaaagacgagaagattaagaaagataaagagcctaaagaggaagtgaagtcattcatggataggaagaaggggtttactgaagtgaagtcgcaaaacggggagttcatgacccacaaactcaagcataccgagaacacttttagtagaccaggcggtagggcatctgtcgacacgaaggaggctgaaggagcgcctcaggtggaagcagggaagagactggaggaacttcgaaggaggcggggagaaaccgaatccgaggagtttgaaaagttaaagcagaaacagcaggaagccgcactggagctggaggagctgaagaagaaacgcgaggaacggcgaaaagtgctggaggaagaggaacagcgtcggaaacaggaagaggctgacaggaaactgcgggaggaggaggagaagaggcgtcttaaagaagagatcgagagacgcagggctgaggcagctgagaagaggcagaaaatgcccgaagacggtttgtcagacgacaaaaagccatttaagtgtttcacccctaagggctcatctctcaaaattgaagagcgggcagagtttctgaacaagtccgtccagaagtcctccggagtcaaaagtacccatcaagctgccatcgtgtcgaagatagacagcaggttagagcaatatacctccgccatcgaggggaccaaaagtgctaagccgacaaaaccagcagcctctgacttacccgtgcccgctgagggagttagaaacatcaagtctatgtgggagaaaggtaatgtcttttccagccccactgcagcagggaccccaaataaagagaccgccggtctgaaagtcggtgtaagttccagaatcaatgaatggctgactaaaacacctgatggcaataagtcccctgcccctaagccgagcgatcttaggcccggtgacgtttccagcaaacgcaacctgtgggagaagcagagcgtggataaagtgacgtcgcctactaaggtgtag

SEQ ID NO: 27698 - DNA, 3975 bp, synthetic construct
  misc_feature 1..3975: note = Description of Artificial Sequence: Synthetic coding sequence
  source 1..3975: mol_type = other DNA
atggcagatagcctttacaacatacgcctcttgcgggaattctcaaatgagtacctaaacaagtgtttctatctgacacttgaggacatgctgtacgctccactggtcttgaagcctaacgtgatggtgttcattgctgaactcttctggtggttcgaaaatgtgaagcctgattttgtgcagcctcgcgatgtacaggaattgaaagacgctaaaacagtcttgcaccagaaaagcagccgaccccctgtacctatatcaaacgccacgaaacggtcgtttcttggcagcccagctgccggaaccctggcagagctgcagccaccagttcagcttcccgctgaaggatgtcatcgtcattatctgcatcctgaagagcctgagtatctaggaaaggggaccgcagctttcagtccgtcccatccattactgcctttacgacagaaacaacagaagtccattcagggcgaagatatcccagaccagcgtcacagaagtaactccctgacacgggttgatggccagcctcgcggagctgctattgcttggcctgagaagaagactcgccctgccagccagcctacacctttcgccctgcatcatgccgcttcatgcgaggtcgacccttcctctggagactccatctcgttagcgaggagtatttcaaaagatagcctagcaagtaatatagttaatctgaccccccagaatcaacctcacccaactgctacaaaaagtcacgggaagtctctgttatccaacgtgtccattgaggatgaggaagaggagctggtggctattgtcagagcagatgtcgtgccccaacaagcagatcctgagttccctagggcctcccccagggccctcggattgactgccaatgcgaggagcccccagggacaactcgatacctctgagtctaagcccgactcgttcttcttggagccacttatgccggctgtcctcaaaccagccaaggaaaagcaggtgataacaaaggaagatgagcgtggagaaggaagaccaaggagtatcgtgtctcggaggccatcagagggaccacagccccttgttaggcgaaaaatgactggatcacgcgaccttaatcggacttttactccaataccttgctcggagtttcccatgggcatagaccctacagagacagggcctctgtctgtggaaaccgcgggagaggtgtgtgggggaccacttgcacttgggggttttgacccattccctcaggggccaagtacagatggattctttctgcacgttggacgagctgatgaagacacagaaggcagactctacgtatcctgcagcaagagtccaaattcacatgattccgagccttggacacttctgcgacaggatagtgattctgacgtggtagatatagaggaagctgagcacgattttatgggggaagcccaccctgttgttttttctcgatatatcggtgaggaggagagcgcgaagcttcaggaggatatgaaggtaaaagagcacgaagacaaagacgatgcttcaggcaggagtagcccctgtctatccacagcttcccagatgtcgtctgtttccatggccagtggtagcgtgaagatgacgagctttgccgagaggaagctgcaaagactgaattcttgtgagaccaagtcaagtacctcttccagccagaaaaccacccccgacgcttcagagtcgtgccctgcgcctctgacgacatggcgtcagaagagggaacagagcccaagtcagcacggtaaagaccccgctagtctgttggcaagtgaactggtccagctccatatgcagctagaagagaaaaggagggctattgaggctcagaaaaaaaagatggaggccttgtccgcgaggcagcgactgaagcttggaaaggccgctttcttgcacgttgtgaagaaaggcaaggccgaggccgctccacctctccggcctgaacacttcgccaaggagtacagccagcacaacggcgaggactgcggcgatgccgtgtcgaaaacggaggacttcctcgtgaaggaggagcaaagagaagagctgcttcatgagccacaggatgtggacaaggagtctcttgccttcgcccaacagcacaaggccaaagatccggtggcccttcatgaactggagaggaataaagtgatttcagccgctttactcgaggatacggtgggggaggtggtggatgtaaatgaatgcgatctgagcattgagaagcttaatgagaccataagcacgctccaacaggccattctaaaaattagtcagcagcaggagcaactcttaatgaagagccccactgtcccggtccctgggtcgaagaacaattctcaggatcataaggtgaaagcccctgtgcactttgtggagccgctcagcccaaccggagtggctggacatcgcaaggcaccacgcctcggtcagggccgtaacagtcgaagcgggagaccagcagaactcaaggttcccaaggaccgccctcagggctcaagtcggtccaagactcctacgccaagcgtggagaccctgcctcacctacgccctttccctgctagcagccatcctcgtactcccaccgaccctggcctggactctgccttggaaccatctggagacccccacggtaagtgtttgttcgatagctaccgacttcacgacgaatcaaaccagaggaccctgacactctcctcctccaaggatgctaatattctgagcgagcaaatgagcttgaaggaggttctggatgcgtccgtgaaggaagtcggatccagcagctcagacgtgagcgggaaggagtcagtgccggtcgaggaacctctgaggtcacgggctagtttaatcgaagtcgaccttagcgatcttaaggcccctgacgaggacggtgagctcgtgtcactggatgggtcagcagacctcgttagcgaaggagaccagaaaccaggggtgggcttcttcttcaaagatgaacaaaaagcagaagacgagctggccaagaagagggccgcattcctactgaaacagcagcgcaaagcggaagaagcccgtgtgcgtaaacagcagctcgaggccgaggttgaactgaaaagagatgaggccaggcgtaaagcggaagaagacagggtaagaaaggaggaggagaaagcaagaagagagctgatcaaacaagaatatcttcggaggaagcagcagcaaattttggaggagcagggcctgggaaagcccaagtcaaaacctaaaaagcctcgcccaaagtccgttcacagggaggaatcctgcagtgatagtgggacaaagtgtagctcgacgcccgataatctgagccggacacagagcggctcctctctgagtcttgcatccgccgcaactactgaacccgagtctgtacactccggaggaacaccatcccagcgggtggaatctatggaggctctaccaattctgagccgaaatccaagccgtagtactgacagagactgggagactgcttccgctgcaagcagcttagcaagcgtcgcagagtataccggcccaaaactgtttaaagagccgtcatctaagagtaacaaacccattatacataacgccattagtcactgttgcctggcaggcaaggtgaatgagccccataagaactctatcctggaggaattagagaagtgtgatgcgaatcattatattattcttttccgcgatgccggatgccaattcagggctttatattgttattatcccgacaccgaagagatttataagctaacaggcaccggccctaagaatatcacgaagaagatgatagataagttatacaagtatagcagcgaccgcaagcagtttaacttgatccccgctaaaacgatgtctgtgtcagtggacgccctgacaatccataaccatttatggcaacccaagagacccgcagtcccgaagaaggcccaaaccagaaaatag

SEQ ID NO: 27699 - DNA, 4809 bp, synthetic construct
  misc_feature 1..4809: note = Description of Artificial Sequence: Synthetic coding sequence
  source 1..4809: mol_type = other DNA
atggtggatgcatccggtcgcgcagctgctgaaggatggcgaaaaatggaggcccctccggacggggcagccgacctggtccctttggatcggtatgacgccgctcgggctaaaatcgccgctaacctccaatggatttgcgcaaaggcgtacggtcgggacaacatccctgaagacctgcgagaccctttctatgttgaccagtatgaacaggaacatatcaagccaccggtcatcaagctgctgctctcatcagagctatactgccgggtctgttcactcattctgaagggtgatcaggtggccgcattgcagggtcaccaaagcgtgatccaggcactgagtcgcaaaggcatctacgtaatggaatctgatgatacccctgtaactgagtctgacctgtcaagagcccctatcaagatgtctgcccacatggcgatggtggacgctcttatgatggcgtacacagtggagatgatctccatcgaaaaggtggtcgccagcgtgaaacgtttcagcacgttctccgcgtcgaaggaactgccctatgacctcgaggacgcaatggtgttttggattaacaaagtgaacctgaaaatgcgtgaaattaccgagaaggaagtgaaactgaagcagcagctccttgaatcacccgctcaccaaaaggtgagataccggagggaacacttaagcgcgaggcaatccccttattttcctctcttagaagatcttatgcgcgatggcagcgatggcgctgctctgcttgcggtcatccactactactgccccgagcagatgaagttggacgatatctgcttgaaggaggtcacaagcatggcagactctttgtataacatacgcctcttaagggaattttctaacgagtacctgaacaaatgcttctatctgacactggaagacatgttatatgccccactcgtccttaaaccaaacgtcatggtcttcattgcagagttgttttggtggtttgagaatgtcaaacccgacttcgttcagccacgggacgtccaagagctcaaagatgccaagacagtgctgcatcaaaagtcgtcacgtccccctgtccctatttcaaacgctactaaacggtcattccttggctctcccgctgcaggcactctggccgaacttcagccgccagtgcagctgccagccgagggttgtcaccggcattacctgcaccctgaagaacccgaatacctgggaaagggcacggctgcgttctccccctctcaccccctgctgcctctgcgccaaaaacagcagaagtcaattcaaggagaagatattcccgaccagaggcacagaagcaactcacttacaagagtggatgggcagcctagaggggctgctattgcctggcctgaaaaaaagacgaggccagcatcccagcctacaccatttgccctacaccacgctgcttcttgcgaagtcgatccatcttcgggtgactctataagtttagccaggagtatcagcaaagacagcctcgcaagtaatatcgtgaatcttacaccgcaaaaccagccccatcctaccgcaaccaagagccacgggaaatcactgctgtccaatgtttcaattgaagatgaggaggaagagcttgtcgcaatcgtgcgtgcagacgtggtgccgcagcaagccgatccagagttccctcgcgcaagtcctcgtgccctcggccttaccgccaatgccagaagtcctcagggacaactagatactagtgaatccaagccagacagcttttttctagaacctttgatgcctgcagtcttaaagcctgcaaaagaaaaacaggttatcactaaggaggatgagcggggagagggtaggccaaggtccattgtgagcagacgcccaagcgagggaccccagccccttgtccggaggaaaatgacagggtccagagatctgaatcgcacttttactccaatcccgtgcagcgaatttcccatgggcatcgaccctaccgaaacaggtccactgtcagtcgagacagccggagaggtttgcggtggacccttagccttaggcggtttcgatccgttccctcaaggcccttcgaccgatgggttttttcttcacgttggaagagctgacgaagataccgaagggaggctgtacgtaagctgtagtaaaagccctaatagtcatgacagtgagccatggacactgcttagacaggacagcgacagcgatgtggtcgatatagaagaggctgaacacgactttatgggtgaagcccatcctgtggtgttctcccgatatataggggaagaagagtccgctaaattgcaggaggatatgaaagtgaaggaacatgaggacaaggatgacgccagcggaagatctagcccatgcctttccactgctagtcagatgagctccgtgagcatggcctccggttcggttaagatgacctctttcgccgaaaggaagcttcaaaggctgaacagctgtgagactaaaagctctacgtcgagtagccagaaaacaactcctgacgcctccgaaagttgccctgcacctctgactacatggagacagaaacgcgaacagtctcccagtcagcacggaaaggatccagccagtttgttggcctcggaacttgtgcagctgcatatgcagcttgaggagaaacgacgcgctatcgaggcacagaagaaaaagatggaggcactgagcgcacgccagagactcaaactggggaaggcagcatttctgcatgtcgtgaagaaggggaaggctgaggccgcaccgcctttacggccagagcattttgccaaggagtacagccagcacaacggcgaagactgtggggacgccgtgtccaagacagaggactttctggtgaaggaagaacagagagaagagctcctgcatgaaccacaggacgtcgacaaggaaagtcttgcctttgctcaacagcacaaagccaaagatccagttgccctacacgagctggaacgcaataaagtcattagcgccgcactcctggaggacaccgtgggtgaggtagtggacgtaaatgagtgcgacctgagcattgaaaagctgaacgaaacaatttcgacactccagcaggcaatcctcaagatctctcaacagcaggagcagttactgatgaaaagccctacggtccccgtccctggctccaagaacaatagtcaggaccataaggtcaaagccccagtgcactttgtggagccactaagcccaacaggcgtggcaggtcatcgtaaggctcccagacttggccagggcagaaactctaggtccggacgacctgccgaattgaaggtgccaaaagatcgaccccagggttcgtcacgctcaaaaactcctacaccttctgtggaaacactgccccacctccgtccctttcccgcatccagtcaccctaggacaccgacggacccgggactggatagtgccttggagccatccggagaccctcatggaaagtgccttttcgatagctatcgcctgcacgatgagtcgaaccagcgcactctcactctgtccagctcaaaagatgctaatattctcagtgagcagatgtctctgaaggaggtgttggatgccagtgtgaaggaggtcggttcttctagttctgacgtctccggaaaggaatctgtccccgtcgaggagcccctacgcagtcgagcctcgctgattgaagttgatctgagtgatctgaaagctcctgacgaggatggagaactggtgtccctcgatggcagtgctgatttggtttcagaaggagatcagaaaccgggtgtggggttcttttttaaggacgaacagaaagccgaggatgaactggccaagaagcgagccgcattcctgcttaaacaacaacgaaaagctgaagaggcaagagttcgtaagcagcagctcgaggctgaagtcgagttgaaaagggacgaagctaggcgcaaggctgaggaggatagagtgcgcaaagaggaagaaaaagccaggcgggaactcatcaagcaagagtatctccgacgcaagcaacagcaaatcctggaggagcaaggtctcggaaagccaaagagcaaaccaaaaaaaccaagacccaagtctgtgcaccgcgaggagagttgtagcgactctgggacaaagtgtagcagtactcccgataatttgtcccgcacgcagtccgggtcttccctgtctttggcgagcgcagcaaccaccgagccagaatctgtgcacagtggtggcaccccttcacagagagtcgagagcatggaagccctgcctatcctgagtaggaacccttcccgttccacggatagagactgggaaacagctagcgctgctagttcattagcctcggttgctgagtacactggcccaaagctatttaaagaaccttccagcaagtctaataaaccgattattcacaatgctatatcccattgctgcctggcaggcaaggttaacgagccgcacaaaaacagcatcctggaggagctcgagaaatgcgatgccaaccattacataattcttttcagggacgccggatgccagtttcgcgctctctactgctactatccagacactgaagaaatctataaacttactggtactgggccaaagaatattactaagaagatgatcgacaagctgtacaagtacagctccgaccgaaagcagttcaatttaattccagccaaaaccatgtccgtgagcgttgacgccctaacaattcataatcatctgtggcaacccaaaagacccgctgtgccaaagaaggcccagaccagaaaatag

SEQ ID NO: 27700 - DNA, 4842 bp, synthetic construct
  misc_feature 1..4842: note = Description of Artificial Sequence: Synthetic coding sequence
  source 1..4842: mol_type = other DNA
atggtggacgcaagcggcagagcggcagccgaaggttggcgaaagatggaggcccctccagacggagcagcagatctggttccactggatcgatatgacgctgctcgcgctaaaatcgctgcgaacttgcaatggatttgtgctaaagcttacggaagggataatatacctgaggacctgcgagacccattctacgtggaccagtatgaacaagagcacatcaaacccccagtgatcaagctgctgctgtcctccgagctatactgtcgggtgtgctctttgatactcaagggagaccaggttgccgctctccagggtcaccaaagcgtgatacaggccctctcccggaaaggaatttatgtaatggagagtgatgacactcccgtcactgagtccgacttaagccgcgctcctattaagatgagcgcgcatatggctatggtggacgcactgatgatggcatacactgtagaaatgatcagcatcgagaaggttgttgcctccgtgaaacggttctccaccttcagcgctagtaaggagcttccatacgacctagaagatgctatggtattctggatcaataaggtgaatttgaaaatgcgcgaaatcactgaaaaagaagtgaagctaaagcagcaactgctggaatccccagcccaccaaaaaagcccctcaaaatggtattggaaactggtccccgtgaggtatcgcagggagcacttgagcgccagacagagcccatatttccccctcctggaagatctcatgagggatggcagtgacggggcagccctcttggctgttatccactattattgccccgaacagatgaaactcgatgatatctgtctcaaggaagtcacctcaatggccgacagcctctacaacattagattgcttagagaattctcaaacgaatacctaaacaagtgcttttatctcaccctagaggatatgctgtacgcccctcttgtccttaagccgaacgttatggtgttcatagccgagctcttctggtggtttgagaatgtgaagcctgattttgtgcagccgagggacgtgcaagaactgaaggacgccaaaaccgtgctgcatcaaaaatcaagccgccctccggtgcccatctccaacgcaacaaagcggtctttcctgggcagtcccgctgctggcactctggccgaactccaacccccagtacaacttcctgcggagggctgccacagacactatcttcaccccgaggagcccgaatacctgggcaagggaacagccgcattctctccatctcatccgctgctgcctctgagacagaagcaacagaagtcgattcagggggaggacatccctgaccaacggcatcgatctaatagtctgacccgagtggacggtcaacccaggggggcagctattgcttggccggagaaaaagacccggccagcaagccagccaacccctttcgctctccatcacgccgcttcctgcgaggtcgatccgtctagcggcgattctattagcttggcacgcagcatctctaaggatagcctcgctagcaatatcgtgaacttgactccacaaaaccagccacatcccacggcaacaaaatcccatggtaagtctctgttgtccaacgtgagcattgaagacgaagaagaggagctggtcgccattgtgagggccgacgtggtgccacagcaagccgacccagagttcccacgggctagccctcgggcattgggtttgaccgcaaatgctcgcagcccacaggggcagctggacacctcagaatctaaacccgattcattttttctggaacccctgatgcccgctgttctgaagcctgcaaaagagaaacaggtcattaccaaggaagacgagagaggagaggggaggccacggtctattgtcagtcggagaccctcagaaggaccccagccgttggtgcgtcgcaaaatgacgggatcaagagacttaaaccggacctttactccaatcccttgctcagaatttcccatgggaattgatcctacagaaaccggtccgctgagcgtggaaacagccggagaagtatgtgggggtcccctggcattgggcggatttgacccttttccgcaaggcccttcaaccgatggcttttttttgcatgttggcagagctgatgaagacaccgaaggtcgtctttatgtctcctgttccaagagccccaactcgcatgattcagagccctggactctgttaaggcaggactccgactcagatgtcgtggatatcgaggaggctgaacacgatttcatgggtgaggcccacccagttgtgttctcccgctacatcggcgaagaagaatccgccaagctccaggaggacatgaaggtaaaggagcatgaggacaaagatgacgcctccgggagaagtagtccgtgtttaagcaccgcttcgcagatgagctctgtgtccatggcctcagggagtgtgaagatgactagtttcgctgagagaaaactccagagactgaactcctgtgagactaaatcatctacttcaagttctcagaaaacaacacctgatgccagcgaatcatgccctgcccctctgaccacttggagacagaaaagagagcagtcaccttcccagcatggaaaagaccctgcctcgttgctcgcatctgaacttgtgcagctccacatgcaactggaggaaaagagaagagctattgaggctcagaagaagaaaatggaggccctttcagcgagacagaggctcaagctgggaaaggctgcttttttgcacgttgtcaagaagggaaaggcagaggccgcaccacccctgcggccagagcatttcgccaaagagtacagccagcacaatggcgaagactgtggcgatgccgtgagtaagaccgaggatttcctcgtgaaagaggagcagagggaggaacttctgcacgagcctcaggatgtggataaggagagcctggcatttgcgcagcagcacaaagccaaggatccggtagcattgcatgagctcgaacgaaacaaggttattagcgctgcactcctcgaagacaccgttggggaggtggtggacgtcaatgagtgtgatttaagtatcgagaagctgaacgaaactatttccacactccagcaggccattctcaagattagccagcagcaggagcagctgctgatgaaaagccctactgttcctgttcctggttccaagaataattctcaagatcataaagtcaaggctcccgtgcacttcgtggagcccctctcccccactggtgtggccggacaccggaaggctccaaggctggggcagggtcgaaattccagaagcggcagacccgctgaacttaaggtgcctaaggatcggcctcagggcagcagtcgaagcaaaacccccactccttccgttgaaaccttgccacacctcaggccctttccggcttcaagtcacccgcgaacacccaccgaccccggtctggatagcgcactggagccttccggtgatcctcacgggaagtgcttatttgactcgtatcgcctgcacgatgagtcaaaccagcggacgcttaccttatcgagctctaaggacgcaaacattctcagtgagcagatgtccctgaaggaagttctggatgccagcgtgaaggaggtcggttcaagcagttccgacgtcagtggcaaagaatcggtaccggtcgaggagcccctgaggtcccgcgcatcattaatcgaggtagacctgtccgatctgaaagccccagacgaagatggtgagctggtgagtctagatggctctgctgacctcgtgagcgagggggatcagaagcctggtgtgggatttttttttaaagatgagcagaaggctgaggatgagctggctaagaagcgcgcagcttttctgctcaaacaacaacgaaaggccgaggaagcgagggtgcggaagcagcaactcgaagctgaggtggaacttaaacgagacgaagcgagacgcaaggctgaagaggacagggtgcgtaaggaggaggagaaagctagaagggagttgatcaaacaagagtacctgcgtaggaaacaacagcagatattagaggaacaaggacttggaaagcctaaatcgaaaccaaaaaaaccaagaccgaagtccgtacaccgagaggagagctgctccgactccggtacaaaatgctcgtcgacaccagataacctttcacgaactcagtccggcagttccctctctctcgcatcagccgctactaccgagcccgagagcgttcacagtgggggtacaccatctcaaagagtcgagtcgatggaggccctgcccatcctgtcccgaaacccttctcggtcaacggacagggactgggaaaccgcctccgccgcttcctcactcgcgtcagtcgctgagtacacaggtccaaagttgttcaaggaaccatcctctaagtcgaacaaacccattatccataacgccatctctcattgctgtcttgcaggcaaggtcaatgagccccacaagaactccatccttgaggaattagagaaatgtgatgcgaaccactatataattctgtttcgggatgctggatgccaatttcgcgcactgtactgttactacccggacaccgaggaaatctacaagctgaccggcactggcccaaaaaatattacaaagaaaatgattgataagctctataaatacagtagcgatagaaagcagtttaacttaatccccgctaaaactatgagcgtgtctgtggatgctctcacaattcacaatcacctttggcagccgaagagacccgctgtcccgaaaaaagcccaaacccgaaaatag

SEQ ID NO: 27701 - DNA, 1983 bp, synthetic construct
  misc_feature 1..1983: note = Description of Artificial Sequence: Synthetic coding sequence
  source 1..1983: mol_type = other DNA
atgcggatgccatcctctacatgggcccgaattatgtcaagctgcggctgtgacgcttgcagagtcggacccagttcggttatgcggccaagcccacggtacccacgcgcttgggtgacccgcacatgggtccccatccccccacgcccaatggcctccagtggatctgtccctagggattgctggctgctagcagctatcgcaagcctgacactaaatgacactctgcttcaccgcgtggtcccgcacggtcagagctttcagaatgggtacgctggcatttttcacttccagctgtggcaattcggcgagtgggttgatgtcgtagtggacgacctcctgcccatcaaagatggtaaactggtattcgtgcattccgccgaaggcaatgaattctggtctgcactgcttgaaaaagcatacgcaaaggtcaatggctcctatgaagccctgtccgggggtagcacgagtgaggggtttgaagatttcaccggtggagtgactgaatggtatgagctgcgaaaagcccctagtgatctttatcagatcatccttaaggcattggaacggggatccttattgggctgtagtatcgatatctcatcagtgctggatatggaggctataacgttcaaaaagttagtgaaaggacacgcctactcagtgaccggtgctaagcaagtgaattaccgcggacaggttgtgagccttattaggatgagaaacccatggggtgaagtggagtggaccggggcttggagcgattcaagctccgaatggaataacgtggatccatacgaacgcgatcaacttcgtgtaaaaatggaagatggcgagttttggatgtccttccgggactttatgagggagttcacgcgtcttgaaatctgtaaccttacccctgatgcactgaagtcgcgcactattagaaaatggaacacaactttatacgaggggacatggcggcgaggctccaccgccggtgggtgccggaactaccccgcaaccttttgggtcaacccacagttcaaaattcgattggatgagaccgacgacccggacgactacggcgatagagagtcagggtgcagcttcgtcctagccctgatgcagaagcaccggcgtcgcgaacgtagatttggaagggacatggagaccatcgggttcgcagtgtacgaggtgcccccagaactggtgggccagcctgcggtccatctgaagcgggactttttccttgctaacgcttcacgggctagatctgagcagttcattaatttgcgggaggtgtctacacgcttccggctgccgcctggagagtacgtggtcgtcccgagcacgttcgagcctaataaggagggtgattttgttttgcgtttcttctccgagaagagcgctgggacggtggaactcgacgatcagattcaggctaacctgcctgacgagcaggtcctgtctgaagaagagatcgacgagaattttaaggctctgtttcggcagttggcaggtgaagatatggaaatatctgtgaaagagctgagaaccatcctgaataggattatctctaaacataaggacctgcgtacgaaaggattctcactggagagctgccggagtatggtaaacctcatggaccgtgacgggaacgggaagctcgggctcgtggagttcaacatcctgtggaacaggataaggaactacctgagtatctttaggaaattcgatctcgacaagagcggctcaatgagtgcctacgagatgcggatggccattgagtccgccggtttcaagctgaacaagaaactctatgaacttattattactcggtactcggagcccgatcttgccgttgattttgataacttcgtctgttgcctagtccggctcgagacgatgtttcgcttttttaagaccttggacaccgatttagacggggtggttacatttgacttgtttaaatggctgcagctaactatgtttgcctag

SEQ ID NO: 27702 - DNA, 2145 bp, synthetic construct
  misc_feature 1..2145: note = Description of Artificial Sequence: Synthetic coding sequence
  source 1..2145: mol_type = other DNA
atgagcgaggaaattattactcccgtctattgtactggcgtgtctgcccaggtacagaaacaaagggctcgagaactcggtctgggacggcatgagaacgcaataaagtatttaggtcaagactacgaacagctacgggtgcggtgcttgcaatctgggactctcttccgggacgaagcttttcccccagtgccccagtcccttggctataaagacctggggccaaacagctccaaaacatacggaataaagtggaaaaggccgaccgaacttctctctaatccgcagttcattgttgatggtgcaacaaggacagacatttgccagggggctctgggagattgttggctgctcgccgcaattgcctcccttactctcaacgacaccctactgcaccgcgtggtcccacacggacagtcattccagaacgggtacgcaggcattttccactttcaactgtggcagttcggcgagtgggtcgacgtcgtggtagatgatttgctccctatcaaggatggtaagctggtatttgtgcatagcgccgaagggaacgaattttggtccgctctcctcgaaaaggcttacgcaaaggttaacgggtcatacgaggccctgtcaggcggatccacgtccgagggtttcgaggatttcacggggggagttaccgagtggtacgagctgcgaaaagcccctagtgatttgtaccagattatccttaaagccctcgaacgcggatcactactgggatgttccatagacatcagttccgttcttgatatggaggccattacctttaaaaagctggtgaagggccacgcttacagcgtcaccggcgctaagcaggtgaattacaggggacaagttgtgagtcttatccgtatgaggaacccatggggcgaggtcgaatggacgggcgcttggtcagattctagtagcgaatggaataacgtggacccatatgagagagaccaactccgcgtaaaaatggaggatggagaattttggatgtcctttagggatttcatgcgagagttcacacggctcgaaatatgtaatctcacaccagacgctctgaaaagcaggaccattaggaagtggaataccacgctgtacgaaggtacctggagaagaggatccactgctggcggatgtagaaattatcccgctaccttttgggtgaaccctcaatttaaaattagactagatgagaccgacgatcccgacgactacggggacagagagtccggatgctcgtttgtcctggctctgatgcagaaacacaggcgcagggagcgccgattcgggcgagacatggaaactatagggttcgcagtgtacgaagtgccaccggagctcgtaggtcagcccgctgtgcatttaaagcgagacttcttcctggccaatgctagtcgggctcgaagcgagcagtttattaacctaagggaagtctcaacgagatttcggctccccccaggcgaatacgttgttgtgccatctactttcgaacctaataaggaaggcgacttcgtgctgcggttcttctctgaaaagtctgccggaactgttgagttggatgatcaaatccaggcaaacctcccagacgagcaagtgcttagcgaggaagagattgatgaaaactttaaagctctgttccggcagctagccggtgaagacatggagatcagcgtgaaggaactccgaaccatccttaatcggatcatatcaaaacacaaggacctacggacaaaagggttctccctcgagtcctgtcggagcatggtgaatttaatggacagagatggaaacggcaagttaggtctggttgagtttaatatcctgtggaacaggatacgcaactacctgtccatatttcggaagttcgatctcgacaagtctggttccatgtctgcctacgagatgcgcatggccatcgagagtgccggattcaagctaaataagaaattatatgagctgattatcacaagatactccgaacccgacctggcagtggacttcgataatttcgtatgttgtctcgtgaggctagaaactatgttccgattttttaaaaccctggacacagacttggacggagtggtgaccttcgatctgttcaagtggcttcagctgaccatgttcgcctag

SEQ ID NO: 27703 - DNA, 2145 bp, synthetic construct
  misc_feature 1..2145: note = Description of Artificial Sequence: Synthetic coding sequence
  source 1..2145: mol_type = other DNA
atgagcgaagagataatcacccctgtgtactgtactggtgtcagcgcacaggtccaaaaacaacgcgctcgggagctcggactgggcaggcacgaaaacgctatcaaatacctgggccaggattacgagcaactgagagtacgatgtctgcaatccgggactctgtttcgtgacgaggcatttccaccagtgcctcagtctctgggatacaaggatctgggccctaattcctcaaagacttacggaatcaagtggaagcgccctacggagcttctctctaacccacagtttatcgttgacggcgctacccgcaccgacatctgccaaggcgcattaggcgattgctggcttctcgcagcaattgcgtccttgacgctcaatgatacccttttacaccgagtggtcccgcatggacagtctttccagaacggttatgctggaattttccacttccagctgtggcaatttggcgagtgggtagatgtagtggtggacgacctcctgccgatcaaagatggtaagttagtatttgttcacagtgccgaaggaaatgaattctggtccgcgctgctcgaaaaagcctatgcaaaagtgaatggctcctacgaggctctgtccgggggttcgaccagcgagggatttgaagattttactggcggtgttaccgaatggtacgaactccgaaaagctccgtcagatttgtaccagataatccttaaagccctagagcgcggaagcctgctgggctgctctattgacatttcaagtgttcttgacatggaagctatcacttttaagaaacttgtgaagggacacgcctactcagtaactggggctaaacaggtgaattaccgcggacaagtcgtgagtctgatccgtatgagaaatccatggggcgaggtggagtggacgggagcatggtcagacagcagcagtgaatggaataacgtggatccatacgaaagagatcagctccgggtgaaaatggaggacggagagttctggatgagtttcagagattttatgcgcgagttcacacggctagagatttgcaacctcaccccggacgctcttaagtcacgtactatccggaaatggaatactaccctgtacgagggaacttggcgacgaggctccaccgccggaggatgccggaattatccagcaaccttctgggttaatccacagttcaaaatcaggttggacgaaacagacgatccagatgattacggggaccgagagagcggctgcagtttcgtcctcgcattaatgcagaaacaccgtcgtagagaacgacgctttggtagagatatggaaactattggttttgccgtttatgaagttccaccagagttagttggacaacctgccgtgcatctcaagcgagatttctttctggctaacgccagcagggcaagatcggagcaatttatcaacttgagagaggtgtccacccgctttcggttgcctcctggcgagtacgtagtagtgccttcgacattcgagccaaacaaggagggggacttcgtactgcggttcttcagcgagaagtccgcagggacggtagagctggacgaccagattcaagccaatctaccggatgaacaagtactgtcagaagaggagatcgatgaaaatttcaaggcccttttcagacagctggctggtgaagacatggagatctccgtaaaggagttgcgcaccattctgaatagaattattagtaaacacaaagaccttcgcaccaaaggcttcagtctcgaatcttgtcggtccatggtgaatctgatggatcgagacggcaatgggaaattgggattggtggagtttaatatcctgtggaatcgaatccgcaactacctgtccatattccggaagtttgatctcgacaagagcggttccatgtccgcctatgaaatgcggatggccattgagagcgccggtttcaagctcaataaaaagctctacgagctgataatcactaggtatagtgaaccagatctcgcagtcgacttcgacaacttcgtctgttgccttgtgcgtctggagacgatgttcaggtttttcaaaacactggatacagatcttgatggggtcgtaactttcgatttattcaagtggttgcaactgacaatgttcgcttag

SEQ ID NO: 27704 - DNA, 489 bp, synthetic construct
  misc_feature 1..489: note = Description of Artificial Sequence: Synthetic coding sequence
  source 1..489: mol_type = other DNA
atgagcgaggagattatcacgccagtgtattgtaccggggtttccgctcaagtccagaagcagagagccagggagctgggcctgggtcgccacgagaatgctatcaaatatcttggccaggattacgaacagctgagagtgagatgcctgcagtctggaactctctttagggatgaggctttcccccctgttccacagagcctgggatataaggatcttggtcctaattctagtaagacctatggaattaagtggaagcgacccactgaacttctgagtaatcctcaatttattgtggacggcgctacccgtaccgacatctgtcagggcgctcttggagactgctggctgctggcagccattgcatcattgacgctaaatgatactttactccaccgagtcgttccccatggccaaagctttcagaacggttatgctggcatcttccacttccagctgtggcagttcggtgaatgggtggacgtctag

SEQ ID NO: 27705 - DNA, 2145 bp, synthetic construct
  misc_feature 1..2145: note = Description of Artificial Sequence: Synthetic coding sequence
  source 1..2145: mol_type = other DNA
atgagcgaggagattataacgccagtgtattgcaccggcgtctctgcccaggttcagaaacagcgggctagggagctaggattgggtagacacgaaaacgccattaaatatctcggccaggactatgaacaactcagggtacggtgcctccagagcggtactttatttagagatgaggctttcccacctgttcctcagagtctggggtacaaggacctcggtccaaattcctcaaagacatatggcatcaagtggaagagacctaccgagctgctcagtaatcctcagtttatcgttgatggggcaacccgtacagatatctgccaaggagcacttggcgattgctggcttttggccgcaatcgcttctctcacacttaatgacacactcctgcatagagtagttcctcatggacaaagcttccaaaatggatacgcaggcatttttcattttcagttgtggcagttcggagagtgggtggatgtggtcgtggacgacctcctcccgattaaggatggaaagttagtgttcgtccattccgcggagggcaatgagttttggtcagccctgctggagaaagcctatgcaaaagtcaacggttcctacgaggcactctccggtggctctacatctgagggattcgaggactttactggcggagtcaccgagtggtatgaactgcgcaaggctccaagtgacctgtatcagatcatcctgaaggctctcgaacgcggaagcctcctcggctgtagcatcgatatcagctcagttctggacatggaggccatcacattcaaaaagctggtcaaggggcacgcatactcagtgaccggcgctaaacaggtgaactaccgcggacaggtagtgtcattaatacgaatgcgcaatccttggggcgaggtggagtggaccggagcgtggagcgattcttcctcagagtggaacaacgtcgacccttatgagcgtgatcagcttcgagtgaagatggaggacggcgagttctggatgtccttccgcgactttatgagagagttcacacggctggagatctgcaatctgacaccagacgcattaaagtcccgtactattcgcaaatggaatacaacactgtatgagggaacctggagacggggttcgaccgccggtgggtgtcggaactatccggcaactttctgggtgaatccacagttcaaaataaggctggatgagacagacgatcccgatgattacggcgatcgcgaatcagggtgtagtttcgtgttagcactcatgcagaaacatcgccgtcgagagcgcagatttggccgagatatggagaccataggcttcgctgtatatgaagtcccacctgagctggtcggacaacccgcagtgcacctcaaacgcgatttttttctggccaacgccagccgtgcaagatcagagcagtttatcaacctaagagaggtgtccactcgctttcggctgccgcctggagagtacgtggttgtgcccagcacattcgaaccaaataaagagggcgactttgtactgcgatttttttctgagaaaagcgccggaaccgtggagctggacgatcagatccaggccaatctgccggatgagcaggtgttgagcgaggaggaaatcgatgagaatttcaaggccttgtttagacagttggccggagaggatatggagataagcgtgaaggagctcaggaccatcctgaaccgcataatctctaagcacaaggatctgaggactaaaggattctctctggagagctgccgcagtatggtgaacctaatggacagggacggaaacggcaagttaggcctggtagaattcaatatcctttggaatcgaataagaaactacctgagtatcttcagaaagttcgacctggataaaagtggctccatgagtgcctatgaaatgaggatggctatcgaatcagctggattcaaactgaacaagaaactctatgaattgatcatcaccagatactccgagccggatttggcggtcgacttcgacaattttgtctgctgtctggtccggcttgagacaatgtttagattcttcaagaccctcgataccgacctcgatggcgtggttacttttgacctgttcaagtggctgcagctcacaatgttcgcgtag

SEQ ID NO: 27706 - DNA, 459 bp, synthetic construct
  misc_feature 1..459: note = Description of Artificial Sequence: Synthetic coding sequence
  source 1..459: mol_type = other DNA
atgagcgaggagattatcacccccgtttactgcaccggtgtttctgctcaagtgcaaaagcaacgggcaagggaactgggtttaggccgacacgagaatgccatcaaatacttaggccaagactacgaacaacttagggtgagatgcctccagagtggcacactgtttcgagacgaggcattcccacctgttccgcaaagcttgggatataaggatctcgggcctaactcatctaaaacctacgggattaagtggaagcgcccaacagagctcctcagcaatccgcagtttatcgtggatggcgctactcggaccgatatttgccagggagctctgggggactgttggttgttggccgcaattgcttccctcacactaaacgacacactcctccaccgtgtggtgcctcatggccagagtttccaaaatggatacgccggtatattccactttcaatag

SEQ ID NO: 27707 - DNA, 489 bp, synthetic construct
  misc_feature 1..489: note = Description of Artificial Sequence: Synthetic coding sequence
  source 1..489: mol_type = other DNA
atgagcgaagagataattacccccgtctactgcactggcgtgagtgcccaggtccagaaacagagggctcgcgaacttggcctggggaggcatgagaatgccatcaagtacctggggcaggactacgagcaacttcgtgttaggtgtctgcagtcaggaaccctcttcagggatgaggcttttccaccggtgccgcagtccctgggctacaaagacctggggccaaactcctcaaagacttacggcataaaatggaaacgcccaacagaactgctgtctaatccccagtttatcgtcgacggtgcgacaaggactgacatttgccagggcgcactcggagattgttggctgctggccgctatagcctcacttaccctaaacgacacactgctgcacagggtggttccccacggccaatcttttcagaacgggtatgccggaatatttcatttccagttatggcagtttggtgaatgggttgacgtatag

SEQ ID NO: 27708 - DNA, 492 bp, synthetic construct
  misc_feature 1..492: note = Description of Artificial Sequence: Synthetic coding sequence
  source 1..492: mol_type = other DNA
atgagcgaggaaatcataacccctgtgtactgcactggcgtgtccgctcaggtacagaagcagagggcaagagaactgggcctgggcagacatgaaaatgccattaaataccttggacaggactatgagcagctcagagtgcgttgcctacagtctgggacgctttttagggacgaagcttttcccccagtaccccagtcacttgggtataaagatctcggccctaattcaagcaagacctacggcatcaaatggaagaggcccaccgagctcctatcgaatccccagtttatcgtcgatggcgcaacccggaccgatatctgtcagggcgcattgggcgattgctggcttctcgccgctatcgcatccttgaccctgaacgacactttgctccatcgtgtcgttccccacggacagtcatttcagaacggctacgccggaatcttccattttcaactgtggcaatttggcgaatgggttgacgtagtctag

SEQ ID NO: 27709 - DNA, 576 bp, synthetic construct
  misc_feature 1..576: note = Description of Artificial Sequence: Synthetic coding sequence
  source 1..576: mol_type = other DNA
atgagcgaagaaattatcacacccgtatattgcactggggtgtctgctcaagtccagaagcagcgtgctcgggagctcgggctgggcaggcacgaaaatgcaattaagtatctgggacaggactacgagcagctcagagtgaggtgcttacaatcaggtacgctgttcagagacgaggcttttccgccagtcccacagtctcttggatacaaggacctagggccaaactcaagtaagacgtatgggatcaaatggaaaaggccaacagagctcctgtcaaatccccagttcatcgtggatggtgccacaaggacggatatatgccagggcgcactcggcgactgttggctgctcgccgctatcgcttcacttacgctgaacgatacgttgttgcatcgtgtggtgcctcacgggcagtcattccagaatggctatgcaggcatttttcacttccagttgtggcagtttggggaatgggtcgacgtcgtggtggacgacctgctgcccatcaaagacgggaagctcgtattcgtgcactccgctgagggaaacgagttctggagtgctctgctctag

SEQ ID NO: 27710 - DNA, 513 bp, synthetic construct
  misc_feature 1..513: note = Description of Artificial Sequence: Synthetic coding sequence
  source 1..513: mol_type = other DNA
atgagcgaggagatcataactccagtgtactgtaccggggtttccgcccaggtccaaaaacagcgggctcgagaactgggtctcggtaggcacgaaaacgccataaaatatcttggtcaggactatgagcagctgagggtgagatgtttgcagtcgggtacattgttccgggacgaggcctttcccccagtgccacagtcactgggctacaaggacctcggaccaaatagtagtaagacttacggaatcaaatggaaacgaccgaccgaactcctgtccaacccgcagtttatcgtcgatggggcaacccggaccgatatctgtcagggggcattgggggattgttggcttctggccgcaatcgcatcacttactttgaatgatacactgttgcatagggtcgtgccacatggccagagctttcagaacggttatgctggaattttccacttccagctgtggcagttcggcgagtgggtggacgttgtcgttgacgatcttctgcccatatag

SEQ ID NO: 27711 - DNA, 369 bp, synthetic construct
  misc_feature 1..369: note = Description of Artificial Sequence: Synthetic coding sequence
  source 1..369: mol_type = other DNA
atgtcagaggagatcattacacccgtatactgcacaggcgtctcagcgcaggtgcagaagcagcgtgccagggagctggggctggggagacatgaaaatgccataaagtaccttggccaggactatgaacagcttcgggtgcggtgcctgcaaagcggcacactctttcgggatgaggcgttccctcccgttcctcaaagcttaggttataaggatctcgggcctaactcctctaagacctatgggattaagtggaagagaccaacagagctgctgagtaatcctcaattcattgtggacggcgcaacgagaaccgacatttgtcagggcgctctgggtgattgttggttgctggccgcaattgcatag

SEQ ID NO: 27712 - DNA, 192 bp, synthetic construct
  misc_feature 1..192: note = Description of Artificial Sequence: Synthetic coding sequence
  source 1..192: mol_type = other DNA
atgtctgaggagattatcacaccggtctactgtactggggtgagcgcccaagtgcagaaacagcgagctagagaattgggacttggtaggcatgaaaacgcaattaagtatctcgggcaggactatgagcagctgcgggtgcggtgtctgcaatccggcacacttttccgagacgaggccttcccaccttag

SEQ ID NO: 27713 - DNA, 2145 bp, synthetic construct
  misc_feature 1..2145: note = Description of Artificial Sequence: Synthetic coding sequence
  source 1..2145: mol_type = other DNA
atgagtgaagagattatcacaccagtgtactgcacgggtgtgagcgctcaagtccagaagcagcgcgcacgggagctcggattgggcagacacgagaacgcaattaagtacctggggcaagattacgagcagttgcgagtgaggtgtttgcagagtggcaccctttttagagatgaagcttttcccccagtcccacaatccttgggatacaaagatctcgggccaaactctagcaagacttatggcataaaatggaagcgacccactgagctgctctctaatccccagttcatagtcgacggagccactcgcactgatatctgtcagggagctttgggagactgttggttgctggccgctatcgccagcctgactctgaatgacacactgctacacagagtagtgccacatggccagtcttttcagaatggatatgcgggaatcttccactttcaactgtggcaatttggtgagtgggtggatgttgtcgtggacgacctacttccgataaaagatggaaaactggtgttcgtccattcagcagaaggcaatgagttttggtctgccctactggagaaggcttacgctaaggttaacgggagttacgaggccctttcaggcggttctacaagcgaaggattcgaggactttacgggaggcgttaccgagtggtacgaattgagaaaggcccctagcgacctttatcagatcatcttaaaggctctggaaagaggctccctcctgggttgttcaattgacatcagctctgttttggacatggaggcgatcacatttaagaagttggtgaagggccatgcatactcagttaccggagcaaagcaggtgaattaccggggacaggtggtgagcctgattcggatgcgcaacccttggggagaagtagaatggaccggggcatggagtgattcatcttccgagtggaacaatgtggatccgtatgaaagggaccagctgagagttaagatggaggacggggaattttggatgagttttagggatttcatgcgcgaatttactcgcctggaaatctgcaatctgacccctgatgccctaaaatcgagaacaatccgtaaatggaacacgaccttatacgagggaacttggagaagagggagtaccgcaggcggttgtagaaactacccagctaccttctgggtgaacccccagttcaaaattcgcctggacgagactgatgatccggacgactacggtgaccgggagagtggatgtagcttcgttctggcactgatgcaaaagcatcgaaggcgcgagaggagattcggacgtgacatggaaacaatagggtttgccgtatatgaggtccctcctgagctggtgggccagcccgctgtccacctcaaacgggacttctttctagcgaatgccagtcgcgctaggtccgagcaattcatcaacctccgggaagtgtctacgaggttccgtctcccacccggtgagtacgtcgtggttccaagcacgtttgagcctaacaaagagggtgattttgttctccggtttttctctgagaaaagcgccggaacagtggagctcgatgatcagattcaggccaacttgccagacgagcaagtgctcagcgaggaagaaatagacgagaatttcaaagccctgttcaggcagttagcgggtgaagacatggaaattagcgtgaaggaattacgcactattctcaaccgcatcatatcaaagcataaggatctcagaacgaagggcttctctctcgaatcatgtcgttcaatggtcaacctcatggatcgagacggaaacggcaaattgggactcgttgagttcaatatcctgtggaaccgcatccggaactatctttccattttccggaaattcgacctggacaagagtggttccatgtctgcctacgaaatgcgtatggccatagagtccgccggtttcaagcttaataagaaactatacgaactgattattacaaggtattccgagccagatctagctgtagactttgataacttcgtctgctgcctcgtcaggctggagaccatgtttagattttttaaaacattggacaccgatctagatggtgttgtaacctttgacctgtttaagtggctgcagctcaccatgttcgcatag

SEQ ID NO: 27714 - DNA, 2145 bp, synthetic construct
  misc_feature 1..2145: note = Description of Artificial Sequence: Synthetic coding sequence
  source 1..2145: mol_type = other DNA
atgtcagaagagattatcaccccagtatattgcacaggggtatccgcccaggtgcagaaacagcgggcaagagagcttggtcttgggaggcacgaaaatgcaatcaaatatctcggacaggattatgaacagctcagggtccgatgtctccagagcggtacgttgttccgagacgaggcgttccctcctgtgccacaaagcttgggctataaggatcttgggcctaattcctccaaaacatatgggataaagtggaagcgcccaaccgagctgttaagtaatccccagtttatagttgatggagccaccaggacagacatctgccaaggagccttgggagactgctggctattagcggcaattgcctctctgactcttaatgatactctactgcacagggtggtcccccacgggcagtcattccaaaatggatacgccggaatttttcacttccagctctggcaatttggagagtgggtcgacgtcgtggtcgatgatttactgcctattaaagatggcaagcttgtgtttgtgcatagcgccgaagggaatgagttctggtcagctctgctcgagaaggcttatgccaaggttaatgggagctatgaggcgttatccggcggatcaacctctgaaggatttgaggatttcacgggcggagtgacggagtggtacgagctgcgaaaagcccctagtgatctttaccagattattctgaaagcactggaaagaggttccttgcttgggtgttcgatcgacataagcagtgtcctcgacatggaagccattacatttaagaagctggtaaagggtcatgcatatagcgttactggagcaaaacaagtcaactataggggacaggtggtttcactgatacgcatgaggaatccttggggcgaagtcgaatggactggtgcatggagcgattcgtcatcagagtggaacaacgtggacccctatgaacgcgatcaacttcgtgtaaagatggaagatggcgagttttggatgagctttcgggacttcatgagagaattcaccagactggagatctgcaacctgaccccagacgccctgaaatcccgcaccattcgcaaatggaatacaactctttatgagggaacttggagaaggggcagcacagccggtggttgcagaaactacccagctactttctgggtaaacccccagtttaaaattagactggatgaaacagatgatccggatgactacggcgatcgcgaatccggctgcagtttcgtattggccctgatgcagaaacataggagaagggagcggaggtttggcagggacatggagactatcggtttcgctgtctacgaagttccaccagagctggtcggccaaccagccgtgcatctcaaaagggacttcttcctagccaatgcttctcgagccagatctgaacaatttattaatctgagggaggtgtccactcggttcaggcttccgcctggagagtacgtggtggtgccctctaccttcgaaccaaataaggagggggacttcgtgctgcgtttctttagcgagaaatcagccggaaccgttgagctggatgaccagattcaggctaacttgcccgatgaacaagttctgtctgaggaggagattgatgaaaacttcaaagctctattcaggcaattggccggagaggacatggagattagcgtgaaggagctcagaacgatcctcaacaggatcatcagtaagcacaaagacttgaggaccaagggcttcagcttggagagctgccgctctatggtaaaccttatggaccgagacggcaacggcaagctcgggttagtggaattcaatatcctctggaatcgcattaggaactatctgtcaatcttccgcaaatttgacctcgataagagcggcagtatgtctgcctacgagatgcgaatggctatcgaatcggctgggttcaaactcaataagaagctatacgagcttatcattacacgctacagcgagccagatcttgccgttgatttcgacaatttcgtgtgctgtttagttcgcctggagacaatgttccggttctttaaaacactggacactgatcttgacggggtcgtcacctttgatcttttcaagtggctccagcttaccatgtttgcttag

SEQ ID NO: 27715 - DNA, 447 bp, synthetic construct
  misc_feature 1..447: note = Description of Artificial Sequence: Synthetic coding sequence
  source 1..447: mol_type = other DNA
atgagtgaagagattatcaccccagtctactgtaccggggtgagtgctcaggtgcaaaagcagcgggctcgcgaactggggcttggcaggcacgaaaacgccattaagtatctggggcaagattacgagcaactgcgtgtgcgctgcttgcagagtggcactttgttccgagatgaggccttccctcctgttcctcaaagtcttggatacaaggatttgggtccgaatagctcgaagacctatgggattaagtggaagagaccaaccgagcttcttagcaatccccagtttatagttgacggggctacccggacggacatttgtcagggcgcattgggcgactgttggttacttgcagctatcgcctctctgacactgaacgacacactcctacatagagtcgttccccacggtcagagctttcagaatggatatgccggaatatag

SEQ ID NO: 27716 - DNA, 411 bp, synthetic construct
  misc_feature 1..411: note = Description of Artificial Sequence: Synthetic coding sequence
  source 1..411: mol_type = other DNA
atgagcgaggaaatcattacaccagtgtattgcactggcgtgtccgctcaggtgcagaagcagagggctagagagttaggtttgggccgtcatgagaatgctatcaagtatctgggccaggactacgaacagctaagggtgcggtgtcttcagtcaggaaccttgttcagagatgaagcattccctccggtcccccagtctttgggctacaaggatttgggtcccaattcttcgaagacctacggaatcaaatggaagaggccaacagaacttctgtcaaatccacaattcatcgtggacggcgctaccaggacagatatatgtcaaggtgccctcggcgactgttggttgttggctgccattgcttctctcaccctaaacgatacattactccatcgtgtcgtaccgtag

SEQ ID NO: 27717 - DNA, 2103 bp, synthetic construct
  misc_feature 1..2103: note = Description of Artificial Sequence: Synthetic coding sequence
  source 1..2103: mol_type = other DNA
atggcaggcattgctgcaaaacttgccaaagatcgcgaggccgctgaaggccttggatcacacgatagggccatcaagtacttgaaccaggattacgaagcccttcggaatgagtgcttggaggctggcacgctgttccaagatccctcttttcccgctatccctagtgcgctagggtttaaagagcttgggccatattcatccaagacaagaggcatcgagtggaaacgccctacagagatctgcgcagatccacagttcattatcggcggagcaacgaggaccgatatatgccagggagcccttggcgattgctggctgctcgccgcaatagcttctctcacgctaaatgaggagatcctggccagagtcgttccactgaaccaatcgtttcaggagaattacgcgggtattttccactttcagttctggcagtacggggagtgggtggaggtcgtcgtggatgaccggctgcctacgaaggacggcgagctgctattcgtccattctgccgagggaagcgagttttggagcgccctattggagaaagcctacgcaaagatcaacgggtgctatgaggctctgagcggcggtgccacaacagagggcttcgaagactttactggtgggattgctgagtggtatgaactgaagaaaccccctccaaatctgtttaagatcattcaaaaggcactgcagaaaggatccctcctcgggtgttcaatcgatataacctccgctgccgatagtgaagccatcacctttcagaaactggtaaagggtcacgcctactctgtcacgggcgcagaggaggtagagtcaaatggctctctgcagaagctgattagaatccgtaacccctggggggaggtggagtggactggtaggtggaacgacaattgtcctagctggaacaccatcgatcccgaggaaagagaacggctcactagaaggcacgaggatggggaattctggatgtcctttagtgactttctgcgtcactacagcagactggagatctgcaacctcaccccggatacgcttacttccgatacatataaaaagtggaagttgacaaagatggacggcaattggcgcagagggagcacagccggtggctgcaggaactatccgaatactttttggatgaatccccagtatctgatcaaactggaggaggaggatgaagacgaggaggacggtgaatctggatgcacatttctggtgggcctgatccagaaacaccggagaagacagaggaagatgggtgaagatatgcacactatcggtttcggaatatacgaagtgccggaagaattaagtggccagaccaacatccacctgagtaagaattttttcctcactaacagggcccgagagcggtccgacacttttatcaatctcagagaggtgctgaataggttcaaacttcctccaggtgaatacatattagtgccttcaacatttgagccaaacaaggacggagatttttgcatcagggtgttttctgagaaaaaggcagattaccaggcagtcgacgatgagatagaggccaacttagaggagtttgacatctccgaggacgacatcgacgacggtttcaggcgtttgttcgcccaactcgcaggagaagacgccgagatcagtgctttcgagctccaaacaatcttgagacgggttttggcaaaaagacaggacatcaagtcagatgggttctccattgagacgtgcaagatcatggtggacatgctggacagcgatggctctggcaagctgggccttaaagagttctacatcctgtggacaaagatccagaagtatcagaagatttatcgagagattgacgtggacaggtcagggacaatgaattcctacgagatgcggaaggctctggaggaggcaggcttcaaaatgccatgccagctccatcaggtaatcgtggctcgattcgcagatgaccagctaatcatcgattttgataatttcgttcgctgcctggtccggctggaaacactgtttaaaatatttaagcagttggatccggaaaacacgggaaccatcgaactggacctcataagctggttgtgttttagtgttctctag

SEQ ID NO: 27718 - DNA, 2190 bp, synthetic construct
  misc_feature 1..2190: note = Description of Artificial Sequence: Synthetic coding sequence
  source 1..2190: mol_type = other DNA
gctcctggtcccggtcgagccccagcagagcgctccgctgaatctccccgtcctttttcagcgcagtatggaagacgcgatcgcagcatggcgggaatcgctgcgaaactggcaaaagaccgggaagcagccgaggggctgggctcccacgatcgggcaatcaaatacctaaaccaggattatgaggccctccggaatgaatgccttgaggccggaactctgtttcaggatcctagtttccctgctatcccttcagcacttggcttcaaggaacttggcccttatagctctaagactagaggcatagagtggaaacgaccgaccgaaatctgtgccgatccacagtttatcattggcggagccacacggaccgatatctgtcagggagccctcggcgattgttggctgctggcagctatcgcttctttaaccctcaacgaggaaattttagcgagagtggtgcctctgaatcagtcttttcaggaaaactacgctggaatctttcatttccagttctggcaatatggcgagtgggtcgaagtcgtcgtcgacgataggctacctactaaagatggtgaacttctgtttgtgcactctgcagaaggctctgagttctggtccgctctcctggagaaggcttatgccaaaatcaacggctgctatgaggccttgagcggcggtgccacaaccgagggcttcgaggacttcacagggggaattgcagagtggtatgagctgaaaaaaccacccccaaacctgttcaaaattatccagaaagctctgcagaaaggctccctgttgggatgctctatcgacatcacatccgccgcagacagtgaagctattactttccagaagctggtgaagggtcacgcatacagcgtaacaggggctgaggaggtggagtccaacggatctctccagaagcttatccgaattaggaacccatggggggaagtggagtggactggcaggtggaacgataattgcccgtcctggaacactatagatcctgaggaaagagagagattgaccaggcgccacgaggacggcgagttttggatgtcattcagcgacttcctaagacactacagtcgactggagatttgtaatttgacgcccgacaccctgacatcagacacctacaaaaaatggaagctcaccaagatggacggtaattggcggagagggagcaccgcagggggttgtagaaactatcccaatactttttggatgaatcctcagtatctgattaaattagaagaagaggatgaggacgaggaggacggcgagtcaggctgcacctttctggtgggcctgatccagaagcacagacgcaggcaaaggaagatgggcgaagacatgcacaccatcggatttggtatttacgaggtacatcctcagttgtccggtcagaccaatatacacttgtcaaagaactttttcctgaccaacagggctcgcgagcgcagtgacacctttattaatttaagggaagttctcaatcgatttaaacttcccccaggggagtatatcctggtgcctagtactttcgagcccaataaagacggcgacttctgcatcagggtcttctctgagaagaaggccgattaccaggcggttgatgacgaaatcgaagctaacttggaagagttcgacatctctgaggatgatattgacgatggattcaggagattgtttgcccagctggccggagaggacgcagaaatctcagccttcgaactccagaccattctgaggcgcgtcctggccaagcgtcaggatataaagagtgacggattctccatcgagacatgcaagattatggtggatatgcttgactctgatggctctgggaaacttggcctgaaggagttttacatactgtggacaaagattcagaagtaccagaagatctaccgggaaattgacgtggacaggtctggaactatgaattcctatgagatgaggaaagcactagaggaggccggttttaaaatgccctgtcaactgcaccaggtgatagtggcacggttcgctgacgaccagcttataattgactttgataactttgtccgatgcctcgttcggctggagaccctgtttaagatatttaagcaactagaccctgagaataccggcaccatagaactggacctgatcagttggctttgtttcagcgtgctgtag

SEQ ID NO: 27719 - DNA, 1869 bp, synthetic construct
  misc_feature 1..1869: note = Description of Artificial Sequence: Synthetic coding sequence
  source 1..1869: mol_type = other DNA
atggagatctgcgccgacccgcagttcattattggaggagcaacgaggacggatatttgtcaaggcgcactcggcgattgttggctcctggccgcaatcgcctccctgaccctgaacgaagagattctagctcgcgtagtccccttaaaccagtcttttcaagaaaattacgcagggatcttccacttccagttctggcagtacggggaatgggttgaggtagtcgtggatgatcgactgcctaccaaggacggagagttactattcgtccatagcgctgaaggctctgaattttggtcagctctcttggagaaagcttatgccaagatcaacggctgctacgaggcactctctggaggggctacaaccgaggggtttgaagacttcacaggcggaattgccgaatggtatgaactaaagaagcctccacccaacttattcaaaataatacagaaggccctccaaaaggggtctctgctggggtgttccatagatatcactagcgccgcagatagcgaagcaattactttccagaagttggtcaagggccacgcctacagcgtaactggcgcagaggaggtggaaagtaacgggagtctgcagaagttgattagaatccgaaatccctggggtgaagtcgagtggacaggaagatggaatgataactgtcccagctggaacactattgaccctgaggagcgcgagcggttgacaaggcggcatgaggatggagagttctggatgagtttcagcgactttctgaggcattattcccggcttgaaatctgcaatctgactcccgatacccttacgtccgatacatacaagaagtggaagctgactaagatggacggcaactggcggagaggctccaccgccggtggctgtagaaactaccccaacactttttggatgaaccctcagtacctaatcaagttggaagaagaagatgaggacgaggaggatggcgagagcgggtgtaccttcctggtaggactaatccagaaacacagacggaggcagaggaaaatgggtgaagacatgcatacaatcggattcggcatttatgaagtacctgaagaactcagtggccaaactaacattcatctctccaaaaatttctttctcacaaatcgggctcgagagagatcggacacattcattaacctgcgcgaagttctcaatcggtttaagctaccaccgggtgaatacatcctcgtgccatccacattcgagcccaataaggacggcgacttttgtatccgagttttcagtgaaaagaaggcggactaccaggcagtggacgacgagatcgaggctaatctagaagaattcgacatcagcgaggacgatattgacgatggctttaggaggctgtttgcccagctggccggagaagacgccgaaatcagcgctttcgaattgcaaacaattctgaggcgcgtattggccaaaaggcaagatatcaaaagtgacggattttccattgagacctgcaaaatcatggtagatatgctggactcagacgggagtggcaaactgggactcaaggaattctacatcctttggaccaaaattcaaaagtatcaaaaaatttatcgagaaatcgacgtggacaggtctgggactatgaacagctacgagatgcggaaagctttggaggaggcaggttttaaaatgccctgtcaactccatcaggtgattgtggcgagattcgcagacgaccagctgatcatcgacttcgataacttcgtccgctgcttagtaagactggagacattgtttaaaatatttaagcagctggaccccgagaatacgggaactatagagctggatctaatttcttggctctgtttcagcgtgctttag

SEQ ID NO: 27720 - DNA, 396 bp, synthetic construct
  misc_feature 1..396: note = Description of Artificial Sequence: Synthetic coding sequence
  source 1..396: mol_type = other DNA
atggagatatgcgctgacccgcagtttattataggaggggctactcgcaccgacatctgtcagggagctctcggcgactgctggcttttggcagccatcgcatcgctgacccttaatgaggagattctagcccgtgtggtgcctttaaaccagtcattccaggagaactatgcgggtatttttcactttcagttctggcagtacggagagtgggtggaagtagttgttgacgaccgactgccaaccaaggatggggagctgctctttgttcactcagctgaaggatctgagttctggtcggcactgctggagaaagcttacgcgaagatcaatggctgctatgaggcccttagcggcggagcgacaaccgaaggatttgaggacttcacgggctag

SEQ ID NO: 27721 - DNA, 156 bp, synthetic construct
  misc_feature 1..156: note = Description of Artificial Sequence: Synthetic coding sequence
  source 1..156: mol_type = other DNA
atgaagaatcgggaagccgcaagggagtgtcggagaaagaaaaaagagtacgttaagtgtttggagaaccgggtcgcggtgctggagaatcagaacaaaacactgattgaggaactgaaggcactgaaggacctgtactgtcacaaatccgattag

SEQ ID NO: 27722 - DNA, 984 bp, synthetic construct
  misc_feature 1..984: note = Description of Artificial Sequence: Synthetic coding sequence
  source 1..984: mol_type = other DNA
atgaccatggagtcgggcgctgagaatcagcagtcgggtgatgcagccgttaccgaagctgagaaccagcagatgaccgtgcaagcacagccacagatcgccaccctcgcgcaggtgtcaatgcctgccgcacacgccacctcaagcgcacctacggtaaccttggtgcagctgccgaatggccagaccgtgcaggtacacggcgtcatacaggccgcacagccatcggtcatccaatcaccccaggttcaaactgtacagatatcaacgatcgccgaaagcgaggatagccaggaaagcgtggatagtgtgaccgactcacagaagcggagagagatcctgagccgtcgaccctcttaccgaaagatcctgaatgacctctccagcgatgcacctggcgtgccccgtattgaggaagaaaagtctgaagaagaaactagcgcacctgcgatcacgaccgtgaccgtacccactccaatctaccagacatcatcagggcagtatatcgcgatcactcagggaggtgctatccagctggctaacaatggtacagacggcgtgcaggggttgcaaaccctgaccatgacaaacgcagccgctacccagcccggaactacaattctacaatatgcgcagacgacagatggccaacagatcctggtgccaagcaatcaggttgtcgttcaggcggcttcaggtgatgtgcagacctatcaaatccgcaccgctccaacaagtaccatcgctcccggtgtagttatggcctcctcgcctgccctgcctacgcagccagcagaagaagccgcaaggaagagggaagttcgactgatgaagaatcgggaggccgcacgggaatgcagacgcaagaagaaggaatacgttaaatgtctggagaacagggtcgcggtgctggagaatcagaataaaaccctgatcgaggaacttaaagccctgaaggacctttactgtcacaagagcgactag

SEQ ID NO: 27723 - DNA, 693 bp, synthetic construct
  misc_feature 1..693: note = Description of Artificial Sequence: Synthetic coding sequence
  source 1..693: mol_type = other DNA
atgaccatggaaagcggtgccgagaaccagcagagcggtgatgcggctgtgactgaggccgaaaaccagcagatgactgtacaggctcagccgcagattgctaccctggcacaggtctctatgccggctgcccacgccacgtccagcgcacctaccgttacactcgtccagctgccaaatggacagaccgtccaagtccatggggtgatccaagcagcccagccctctgtcatccagtctccgcaggtacagacagtgcagagttcctgtaaggatctgaaaaggctattttcaggcacacagatctcaaccatagccgagtcagaagactcccaggaatccgtggactctgtgaccgatagccagaaaaggcgggagattctttcgaggcgaccaagctacagaaaaatccttaacgacttgtcctctgacgcacccggagttcctcgcattgaggaagagaagtcagaggaagaaacttcagctctgcctactcagcccgcagaagaagccgctcgcaaaagagaagtccgattaatgaagaatcgtgaggctgcaagagagtgtcggaggaaaaaaaaggagtacgtcaagtgtcttgagaaccgggtggccgtcctggagaaccaaaacaagactctgattgaagagctgaaagctcttaaagacctgtactgtcataagagtgattag

SEQ ID NO: 27724 - DNA, 240 bp, synthetic construct
  misc_feature 1..240: note = Description of Artificial Sequence: Synthetic coding sequence
  source 1..240: mol_type = other DNA
atgacaatggagagtggtgcagagaatcagcaaagcggtgacgctgctgtaactgaagctgagaatcaacagatgaccgtgcaggcccaaccccaaatcgccacacttgcacaggtgagcatgccagcggctcacgctaccagctcagcgccaactgttaccctggtccagctccccaacgggcagaccgtccaggtgcatggagtgattcaagccgctcagcctagcgtcattcagtag

SEQ ID NO: 27725 - DNA, 984 bp, synthetic construct
  misc_feature 1..984: note = Description of Artificial Sequence: Synthetic coding sequence
  source 1..984: mol_type = other DNA
atgaccatggagagtggagccgagaatcaacagtccggcgatgccgcagttaccgaggctgagaatcagcagatgacggtgcaggcacagcctcagatagccacactagctcaggtcagcatgcccgcagctcacgcaacaagctcagctcctactgtgactctggtgcaattgccgaacggacagacagttcaggtgcacggagtgattcaggcagcccagcctagcgttatccagagcccacaggtccagaccgtccagatttcaactatcgcagagagcgaagatagccaggaaagtgtggatagtgtgactgatagccagaaacgaagggaaattctgagtagacggccatcataccgtaagatcctaaacgacctgagtagcgacgccccaggggtccctaggattgaagaagagaagtctgaagaagagacctcagcaccagccatcaccacagtgactgtccctactccgatttaccagacaagcagtggacagtatatcgcaatcacccagggtggggcaatccagctggcgaataacggcacagatggggtgcagggattgcaaaccttgaccatgaccaatgcagctgctacccagcccggaacaacaattctgcagtatgctcagacaacagacggacaacagattctggttccctcaaatcaggtggtcgttcaggcagcgtccggagatgtccagacgtaccagatcaggaccgcaccgacaagtactatcgccccaggcgttgtgatggccagctcgcctgccctgccaacacagcctgcagaagaggccgctcgcaaacgagaggtaagactgatgaaaaatagggaggccgcacgtgaatgtcggcgaaaaaaaaaagagtatgtcaaatgcctcgaaaatcgggttgcggtgctcgaaaaccaaaacaaaaccttaatcgaggaactgaaagctcttaaggatctttactgtcacaagtccgattag

SEQ ID NO: 27726 - DNA, 1026 bp, synthetic construct
  misc_feature 1..1026: note = Description of Artificial Sequence: Synthetic coding sequence
  source 1..1026: mol_type = other DNA
atgacgatggaaagcggcgctgagaatcagcagtctggtgatgccgctgtgacggaggccgagaatcagcaaatgaccgtgcaagcccagccccagatcgccacactcgctcaagttagcatgcctgccgcacacgctacaagcagtgccccaaccgttacgctggtccagttgccaaacggccagacggtgcaggtgcacggcgttatacaggctgctcagccctcagtcatacagtctccccaggtccagactgtgcagagttcctgcaaagaccttaaacgccttttcagcggcacacaaatcagcacaatcgctgaatctgaggactcgcaggaaagcgtggattcggtcaccgattcacagaagcggagggagatactcagcaggcggccatcgtaccggaaaatcctgaatgacctttcttctgacgcgccaggtgtaccacggatcgaggaggagaaatctgaagaggaaacaagtgctcctgcaattactaccgtgactgtgcctactcccatctatcaaacttcatccgggcagtatatcgctattacccagggtggcgcaattcagttggccaataatgggacggatggcgttcagggacttcagacacttacaatgactaatgcagccgcaacccaaccgggaacaactattctgcaatatgcccagacgacagacgggcaacagattcttgttccttctaaccaggtggttgttcaggcagcctctggggatgttcagacgtatcagatccgaaccgccccaaccagcactatcgcacccggtgtggtgatggcctccagccccgctctgcctacgcagcccgcagaggaagccgctagaaaaagagaagtccgcctaatgaagaaccgggaggctgcacgggagtgtcgtcgcaagaagaaagagtatgtgaagtgcttggagaatcgcgtcgccgtgctcgagaatcagaataagacactgatcgaggagctgaaggccctgaaagatttgtactgtcacaagtctgactag

SEQ ID NO: 27727 - DNA, 549 bp, synthetic construct
  misc_feature 1..549: note = Description of Artificial Sequence: Synthetic coding sequence
  source 1..549: mol_type = other DNA
atgaccatggagagtggcgcagaaaaccagcagagcggtgacgccgcagtcacggaagcagagaatcagcagatgaccgttcaagctcaaccacaaatagcaacgctcgcacaggtaagtatgcctgcagctcatgctacctccagcgctcccaccgtgactctggttcagcttcctaacggtcagacggtgcaggtgcatggtgtcatccaggcggcacagccgtcagtgattcaaagtccccaagtgcagacagtacagtcctcatgtaaagacttgaagcggctctttagcggcacccaaatctcaaccatcgctgaaagcgaggactcccaggagagtgtggattccgtgacagactctcagaaacggagggaaattctgagcaggagacctagctatcgcaaaattctcaatgacttgtcaagtgacgcccctggagtcccgaggatcgaggaagagaagagcgaagaagagaccagcgcaccggctattaccaccgtcactgtccccactcctatttaccaaacaagctctggccaatactag

SEQ ID NO: 27728 - DNA, 399 bp, synthetic construct
  misc_feature 1..399: note = Description of Artificial Sequence: Synthetic coding sequence
  source 1..399: mol_type = other DNA
atgacaatggagtccggggcagaaaatcagcagtcaggcgacgcagccgtgacagaggctgagaatcagcagatgacagttcaagcccaaccacagattgctacactggctcaagtctctatgccagctgcccacgccacctctagtgcccctacagtgacgctggtgcagctgcccaacggtcagacggtgcaggtgcatggggtcattcaggccgcacagcctagcgtgattcagtccccacaggttcagacagtccagtcttcttgtaaggatctcaagagattgttttccggcactcagatcagtacgatcgctgagagtgaggacagccaagaaagtgtggactcggtcacagattcccagaaaagacgggaaatactcagcaggcggccatag

SEQ ID NO: 27729 - DNA, 705 bp, synthetic construct
  misc_feature 1..705: note = Description of Artificial Sequence: Synthetic coding sequence
  source 1..705: mol_type = other DNA
atgacgatggagtctggtgcggagaaccagcagagtggggatgccgcagtcacagaagcagagaatcagcaaatgaccgtccaggcccaaccacaaatagcaactctggcccaagtgtccatgcccgctgcccatgccacatcttcagcgccaacagtcaccctcgttcagctgcccaatggccagacagtgcaggtccatggtgtaatccaggccgctcagccatcagtcattcagagtcctcaggttcagactgttcagatttctacgatcgccgagagcgaggattcacaggaatctgtggactccgtgacagattcacagaagcgaagagagatcttgtcccggaggccctcgtacagaaaaatcttgaatgacctgtctagcgacgccccaggagtccccagaatcgaggaagagaagtccgaggaggaaacctcggcccctgcaattaccaccgtgactgtgcccacacccatctatcagacaagctccgggcagtatattgccatcactcagggtggcgctatccagcttgccaacaacggtacagatggcgtgcaggggctgcagacactgaccatgactaatgccgctgccacccagcctggaaccacaatcctgcaatacgctcagacgacggacgggcaacaaatattagtgccgtcaaatcaagtagtcgtgcagggaacccagaaattgtag

SEQ ID NO: 27730 - DNA, 462 bp, synthetic construct
  misc_feature 1..462: note = Description of Artificial Sequence: Synthetic coding sequence
  source 1..462: mol_type = other DNA
atgcccgcagcacatgctacctcctctgcccctactgtgacccttgtgcaattacccaatggccaaactgtccaggtccatggggtcattcaagccgcacagccctctgtcattcagagtcctcaagtgcagaccgtccagagcagttgtaaggaccttaaacgactcttctccggtacgcagatatcaactatagcagagagcgaagacagtcaggagagcgttgacagcgtcactgactcccagaagcggagggaaattttatcccgtagaccttcttaccggaagatcttgaacgacctcagctccgacgccccaggggttccacgaatcgaggaggagaaaagtgaagaggagacatctgctccggctatcactaccgtgacagtccctactccaatctaccaaacctccagcggccagtacacatatctacgggacaccacttattcctgccaatag

SEQ ID NO: 27731 - DNA, 1998 bp, synthetic construct
  misc_feature 1..1998: note = Description of Artificial Sequence: Synthetic coding sequence
  source 1..1998: mol_type = other DNA
atggctcacgagatgattggtacgcagattgtgaccgagcgcctggtcgcactgctggagagcggaacagagaaggtccttctgatagatagtcggccattcgtggaatacaacacaagccacatacttgaagccatcaatatcaactgtagcaagctgatgaagaggcggcttcagcaggacaaggtgctgatcaccgaactgatacagcactcagccaagcataaagtcgacatcgactgttcccagaaagtcgtggtgtacgatcagtcatctcaggacgttgctagcctttcaagcgactgtttcctgaccgtgctccttggcaagctagaaaaatctttcaatagtgtgcatctgttagccggagggttcgccgagtttagcaggtgttttccgggtctgtgtgagggtaaatctacattagtccctacatgtattagccaaccatgtctccctgtggcaaacatcggccctactaggatcctaccaaacctttacctcgggtgccagagagatgttctcaataaggaattgatgcaacagaacggaatcggctatgtgctgaacgcctcaaatacgtgccccaaacccgacttcattccggagagccatttcttaagagtgccagtgaatgacagtttttgcgagaagatcttaccttggctcgacaagtcggttgattttatcgaaaaggccaaagcctctaacgggtgtgttttggtgcactgtctggcgggaattagtcggagtgccacaatcgccatcgcttacatcatgaagagaatggacatgtccttggatgaggcttacaggtttgtgaaggagaaacgtcccacaatctctccaaactttaattttttgggtcagttactggactatgagaaaaaaatcaagaaccagactggtgcatccggccctaagtcgaaactgaaactgctgcacctggaaaaaccgaacgagccggtacctgccgtcagtgagggagggcagaaaagcgagactccactgtcacctccatgtgctgatagcgccacaagtgaggctgcaggccaaaggcctgtgcacccagctagcgtcccatcggtgccttcagtccagccatcacttttagaggacagtccccttgtgcaggctctgtccgggcttcacttgagcgctgaccgacttgaagatagcaataagttaaagcggtctttctcactcgacataaagtctgtatcctactctgctagtatggccgcttctttacatggctttagttcctcagaggatgccctggaatattacaagccttcaacaacacttgacggcaccaacaaactttgccagttttcacccgtacaggagttatctgagcagacccccgaaacgtccccagataaggaggaagcatccataccaaaaaagctgcagactgctcgtccaagcgactcacagtccaaacgattgcacagcgtccgcacctcctcctccggtactgctcagaggtctctgctttccccactgcacaggagtggctcggtagaagacaactaccacacaagctttttgtttggactatcgaccagccagcagcatctgaccaagtcagccggattgggcctgaagggatggcacagtgatatcctggcccctcagacatctacaccaagcctgacatctagttggtactttgcgacggagtcaagccacttctactcagcctctgcaatttatggaggttcggcgtcttattctgcctatagctgctctcagctacctacttgcggagatcaggtttattctgttcgcagaaggcagaaaccttcggacagagcagactctcggagaagctggcacgaagagtcacccttcgagaaacaatttaagcgccgatcatgccagatggaattcggcgaatcaattatgagcgagaatcggtctcgtgaggagctcggcaaggtcggaagtcaatcttcgttctcaggatccatggaaattatcgaggtgagctag

SEQ ID NO: 27732 - DNA, 939 bp, synthetic construct
  misc_feature 1..939: note = Description of Artificial Sequence: Synthetic coding sequence
  source 1..939: mol_type = other DNA
atgcgcatgttgcttgccttgcttgctctttccgcagcccgaccatcagctagcgctgagtcccactggtgttatgaggtgcaggccgaatcttccaattacccatgtctggtacctgtgaagtggggaggaaattgccagaaagaccgtcagtccccgattaacatagttactactaaggcgaaagtcgacaagaagctgggcaggttcttcttctctggttacgataaaaagcagacttggacagtgcaaaataatggacactcagtgatgatgcttctagaaaataaagcaagcatcagtggtggcggactgcccgcaccatatcaggccaagcaactccacctgcattggtctgatctcccctataagggctccgagcattcattagatggagagcattttgcaatggaaatgcatattgtacacgaaaaagaaaaaggcacaagtcgcaacgtgaaggaggcacaggatcctgaggatgagattgcggttctggcctttctcgttgaagctggcactcaggtcaacgaaggctttcagcccttggtcgaggcactgtctaatatcccaaaaccagagatgagtaccacaatggcagaatccagccttctggatctgctacccaaggaagagaagctccgccattactttcgttacctcgggtccctgaccaccccgacctgcgacgagaaagtggtttggactgtgttccgggaaccgatccagctgcaccgggagcagatactcgctttctcacagaagctgtactacgacaaggaacagactgtgagcatgaaggacaacgtccggccattacagcaacttgggcagcggactgtgattaagtctggagccccaggtcggccattgccttgggcgctgccagcactgttggggcctatgctggcatgcctgttagcagggtttctgcgttag

SEQ ID NO: 27733 - DNA, 1380 bp, synthetic construct
  misc_feature 1..1380: note = Description of Artificial Sequence: Synthetic coding sequence
  source 1..1380: mol_type = other DNA
atggctcccctgtgtccctccccttggctgcccctgctgatccctgcgcctgcccctggactcaccgtccagctcttgcttagcctgctgctcctggtaccagtgcacccgcagcgcttgccacgcatgcaggaggacagccctcttgggggaggcagcagcggcgaggatgaccccctgggcgaggaggatctcccttccgaggaagatagtccccgtgaagaagacccaccaggcgaagaagaccttcctggggaagaagatttgcctggtgaagaggacctccctgaggtgaagcctaagagcgaagaagaagggagcttgaaactggaggacttgcccacggtggaggcccctggcgatcctcaggaaccccagaataacgcacatcgggataaggagggcgatgaccagtcacactggaggtatggcggagatccaccctggccccgtgtgagccctgcctgcgctggcagatttcagagtcccgtcgacattagacctcagctggcagccttctgcccagctctgcgcccactggaactgttaggttttcagttaccgccacttcccgaattgcggcttaggaataacggacattcggtgcagttgacgcttccacctggactggaaatggccttaggcccaggacgggaatacagggctctccaactgcacttgcactggggcgcagctggacggccaggatccgagcatacagtcgaaggacaccggtttccagccgagatacacgtggtacacttgtctacggccttcgccagggtcgacgaagcccttggacggcctggcggactggcagtgttggctgccttcctggaggagggtcctgaggaaaatagcgcatacgagcaactgctgtctaggcttgaggagattgccgaggaaggctccgagactcaggtccccggattggatatttcagcacttttgccttccgacttctctcgatactttcagtatgagggtagtctaactaccccaccctgcgctcaaggagtgatttggactgtgttcaatcagacagttatgttgtctgctaaacagctgcatacactcagcgatacactgtggggtccaggcgactctagattgcaactcaattttcgcgctacgcagcctctgaatggtagggtaatagaagcgagcttccccgctggggtcgacagctcccccagggccgctgagccagtgcagttgaacagttgcctggcggcaggagatatcttggccctggtgtttgggctgctattcgcagtgacatcagtggctttcttggtccagatgcgcagacaacaccggcgaggcaccaaaggtggcgtgagttaccgcccagccgaagtggccgagactggggcttag

SEQ ID NO: 27734 - DNA, 1071 bp, synthetic construct
  misc_feature 1..1071: note = Description of Artificial Sequence: Synthetic coding sequence
  source 1..1071: mol_type = other DNA
atggcccctttatgccctagcccatggcttcccttgttgatcccagcacctgccccagggctcacagtgcaattgctactgtcccttctactcctggtgccagtacatccccagcggctgcctcggatgcaagaggactcccccctgggaggtggtagttcaggagaagatgacccgttaggggaagaagatctcccaagcgaggaggacagcccccgagaggaagatcccccaggcgaagaagatcttccaggtgaagaagatctgccaggcgaggaggatttgcccgaagtgaagcccaagtcagaagaagagggcagcctgaagttagaggacttacctaccgtcgaggctcctggtgatccacaagaaccacagaacaatgcacaccgggacaaagagggagatgatcagagtcactggaggtacggcggtgaccctccgtggccacgggtttcacctgcttgcgctggacgtttccagagtcccgtagacatcaggccccagttggccgctttctgtccagccctgcgtcctctggagctcctgggattccagttacctccccttccagagctgcggctgcgcaataacggccatagtgtccaactgacacttccaccaggactcgaaatggccctgggacccggacgcgaatatcgggctctgcagctgcatctccactggggagccgctggcagaccaggctcggagcatacagtggaggggcatcggttccccgcagagatccacgttgtgcatttgtcaactgccttcgccagggttgacgaggcactcgggagacctgggggactggccgttctcgccgcttttctcgaggagggccctgaggaaaactccgcctacgagcagttgctctcaaggttggaggagattgctgaggaggggtccgagacccaggtgcccggactagacatcagcgccctcctgccctcggacttctctcggtatttccaatacgaaggatctctaacaacccccccatgcgcacagggcgtcatttggaccgtgtttaatcagaccgtaatgttgagtgctaaacaatcctag

SEQ ID NO: 27735 - DNA, 2775 bp, synthetic construct
  misc_feature 1..2775: note = Description of Artificial Sequence: Synthetic coding sequence
  source 1..2775: mol_type = other DNA
atgccaggtccatcccctggccttcggagagccctcctcgggctctgggcagccctcggtctcgggctgtttggcctctcagctgtctcgcaggagcctttctgggccgatctccagccaagagtggcttttgtcgaaagaggtgggtctctctggcttaattgctctacgaactgtcctcggccagaaagaggtggcctcgagaccagcctgcgcaggaatggaacccagcgcggactcaggtggctggcaagacagttggtggacatccgtgaaccagaaacccaacctgtgtgtttttttagatgcgcgagacgaaccctgcaggccagaggactgatccgaacctttcagcgacccgatcgagtcgagcttatgccactgccgccatggcagcccgtcggggaaaactttacactgtcctgccgggtcccaggagcgggaccacgagccagccttactctgacactcttgagaggagctcaagagctgattcggaggagctttgccggagagccaccaagggccaggggagctgtgctgacagcgaccgtcctcgctaggagagaagaccatggcgctaacttttcctgcagagccgaactggatctccgcccacatggcttggggctgttcgagaactcaagcgcacctagggagttacggactttttcactgagccctgatgctcccaggttggccgctcctcggcttttagaagtgggaagtgagagacctgtgtcgtgcaccctcgacgggctgtttcctgcttctgaggcaagagtctacttggccctaggcgatcagaatctgagcccagatgtgaccctggagggggacgccttcgtggcgaccgccaccgcaaccgcctctgcagaacaggaaggcgctcgccaactggtttgtaacgtgacactgggaggagaaaatcgggaaacccgcgagaacgtaaccatttacagcttccccgctccactgttgacgctcagtgagccttccgtgtctgagggtcagatggtgacagtaacctgtgccgcaggcgctcaagctctcgttaccttagaaggggtacctgccgctgtgccaggacagcctgcacagttacagctcaacgcaactgaaaatgatgacagacgtagtttcttttgcgacgcgactctggatgtcgacggggagaccttgattaaaaacaggtccgcagagctgcgtgttttgtacgctcctaggctggacgactctgactgtccaaggagctggacgtggcccgaaggacccgagcagacattaagatgtgaggcacgaggtaacccagagccctctgtgcattgcgcgcgtagcgacgggggtgccgtgttggcactaggcttactcggcccagtgactcgggctctgtccgggacatatagatgtaaggctgccaatgaccaaggagaagccgtgaaagacgtcaccctcacagtggaatatgctccagcacttgacagtgtgggctgtcctgagcggattacttggttggaagggacggaggcgtccctctcttgtgtagcccacggagtgccacccccagacgtcatctgcgttcgaagcggggagctgggcgcagtgatagaaggactgctccgggtggcccgagagcatgctggtacataccgctgtgaggcaacgaaccctcggggatcggctgcgaagaacgtagcagttactgtggagtatggacccaggttcgaggagccttcttgtccatcaaattggacgtgggtggagggatcgggccgtctcttttcctgcgaggtcgatggcaagccacagcccagcgtgaaatgcgtcgggagcgggggagccaccgagggcgtgctgcttccactggctccgccagacccttcaccacgtgcgcctaggattcctcgggtgctggctccgggtatttacgtgtgtaatgcgaccaaccggcatgggtctgtggctaagaccgtcgtggtttcggcagagagcccccctgagatggatgagagcacttgtccttcacatcagacttggctggagggcgcagaagccagtgctcttgcatgcgcagcacgcggacgcccatcacctggggttcggtgctctcgggaaggcatcccctggcctgaacagcagcgggtgtctcgggaggatgccggaacatatcactgcgtcgcaactaacgcccatggcaccgatagtcgtaccgtgactgtgggcgtggagtaccgtcccgttgttgctgaattagccgcttcgcctccaggaggcgttcggcctgggggaaacttcactcttacctgccgcgctgaagcttggccccctgcacaaatttcctggagagcacccccaggggctctgaacatagggctttcatctaataacagcacactaagcgtggcaggcgctatgggctctcacggtggcgaatatgagtgtgcagccaccaatgctcacggcaggcacgctcgacgcatcaccgtaagagtagctgggccatggctgtgggtggctgtggggggagccgctgggggtgctgctctattggcagccggtgctggtttggctttttatgtgcagtcgacagcctgtaagaagggtgaatataacgtccaggaagccgagtcatctggtgaggcagtgtgcctgaacggggctggcggtggagccggaggagccgcaggagctgagggtggaccagaagccgctgggggagctgcggagagccctgccgaaggagaggtgtttgctattcagttgacctctgcttag

SEQ ID NO: 27736 - DNA, 1263 bp, synthetic construct
  misc_feature 1..1263: note = Description of Artificial Sequence: Synthetic coding sequence
  source 1..1263: mol_type = other DNA
atggaatccccaagcgctcctccccatcgatggtgtattccatggcaacgtttgctgcttaccgcaagtttgctgaccttctggaatcctcctacaacagccaaactcacaattgagtctacccctttcaacgtggcggaaggaaaggaagtgttgctgctcgtccacaacctgccacagcacctcttcggctattcgtggtataagggagagagagttgacggcaaccgtcagattataggatatgtcataggcacacagcaagctactcccggtccagcttactccggcagggaaataatttatccaaatgctagcctcctgatccagaacattatccagaacaaactctctgtggaccactccgatcccgtgattctgaatgttctgtacgggccagacgaccctaccatcagcccctcttacacatattaccggcctggggtcaatctgagtctgagttgtcacgccgcaagcaaccccccagcgcagtactcctggctcatagacgggaacattcagcagcacacacaggagctgtttatctccaatattaccgagaaaaactcgggcctgtacacctgccaagctaataactccgcaagcggtcacagtagaactacagtgaagacgattaccgtgagcgctgagttgcccaagcctagcatttctagcaataatagcaagcctgtggaggacaaggatgccgtagcgttcacttgcgagccagaagcacagaacaccacgtatctgtggtgggtaaacggccagtccctccctgtgagccccagactccagttgagcaacggaaatcgcaccctgacactcttcaatgttacccggaacgatgccagggcttacgtgtgtggtatccagaattctgtgtctgccaatcgctcagatcctgtgaccctcgacgtgttgtatggtcctgatacccccattatctctccccctgattcttcttatctctccggtgcgaacctaaacttatcatgccatagtgcttccaatccctcgccccagtactcctggaggatcaatggaatcccacagcaacatacacaggtgctgtttattgccaaaattacaccaaacaacaatgggacctatgcctgctttgtgagcaacttggcgactgggagaaacaacagcatcgtgaagagtatcacggtcagcgcctcaggtacatcccctggactgtcagccggtgccaccgtggggatcatgataggagtgctagtgggtgtggccctgatctag

SEQ ID NO: 27737 - DNA, 2109 bp, synthetic construct
  misc_feature 1..2109: note = Description of Artificial Sequence: Synthetic coding sequence
  source 1..2109: mol_type = other DNA
atggaatctccaagcgcccctccacatcggtggtgcattccctggcagagactgttgctgactgcctccctgctgaccttttggaacccccctaccaccgctaagctcaccatcgagtctacaccatttaacgtcgccgagggaaaagaagtgctccttctggtgcacaatctcccccaacacttgttcggctattcctggtacaaaggggaacgcgtagatgggaatcgtcagataatcgggtacgtgattgggacccagcaagcgacacccggtcctgcatattctgggcgtgagatcatataccccaacgcatctctccttattcaaaacattattcagaacgatacagggttttacacccttcatgtaatcaagtctgacctggtgaatgaagaggcaaccgggcaattcagggtataccccgaattacctaagccttcaattagcagtaataacagtaaacctgtggaagataaggacgctgttgccttcacctgcgagccagagactcaggacgcaacgtatctgtggtgggtgaacaatcagtcattgccggtgtcgccccgtctgcagttatccaatgggaaccgcacattgacccttttcaacgtcacccgaaacgacaccgcctcatataagtgtgaaactcaaaatcctgtgagcgctcgacgttcggactctgtaattttaaacgtcttatacgggccagacgcacccactatttcacccctcaatacttcttatagatcgggtgaaaacctcaacctctcatgccatgcagccagtaatccccctgctcagtactcttggtttgtcaatggaacatttcaacagagcacacaggagttatttatacccaacattaccgtaaacaactcaggcagctacacatgtcaggcccacaattcggacacagggctcaatcgaaccactgttacaaccatcactgtgtacgccgaacctcctaagccttttatcacatccaataactctaaccctgtagaggatgaggacgccgtggccctgacctgcgagcccgagatccagaataccacttacctgtggtgggttaacaatcaatctttgcctgtgtcaccaaggttgcaattgagcaacgacaaccgcacactcaccttgctttcagtgacaaggaatgatgttggcccttacgaatgtggtatccagaacaagttatccgtggaccattctgatcccgtgatcttgaacgtgctctacggccctgacgatcctactatctctccatcttacacttactacagacccggagttaacctctccctcagctgtcacgcagcttcaaacccacctgcccagtactcatggttgatcgacggcaacatccaacagcacacgcaggagctatttatatccaacatcactgagaagaatagcggcttgtacacctgtcaagccaataacagcgctagtggccactctaggactacagttaagacaatcacagtctccgccgagctgcccaagccatcaattagctctaataatagcaagccggtggaggataaggatgccgtagccttcacatgcgagcctgaagcccaaaacacgacgtatttgtggtgggttaacggccagtccttaccggtttcgccgcgtctgcagctaagtaatggaaacaggactctcacattattcaacgtgacaagaaacgatgcacgcgcatatgtgtgcggcattcagaactcggtcagcgcaaacagatcggaccccgtaaccctggacgtcctttacgggcctgacactccgatcattagccctcctgatagctcgtacctgagcggcgctaatctgaatttgagctgccatagcgcctccaatcctagcccccaatacagctggcgaattaacggcataccccagcagcacacccaggtcctgttcattgccaagatcacacccaataacaacggtacttatgcatgcttcgtcagcaatctggccacaggaagaaacaatagtatcgtgaaaagcattactgtctctgccagtggcacttcacctggtctcagcgctggtgcaaccgtgggcattatgatcggcgtgctcgttggcgttgcccttatctag

SEQ ID NO: 27738 - DNA, 1035 bp, synthetic construct
  misc_feature 1..1035: note = Description of Artificial Sequence: Synthetic coding sequence
  source 1..1035: mol_type = other DNA
atgggaccacctagtgcacctccgtgcaggctgcacgtaccgtggaaggaggtcttgctgaccgcttccctgctgaccttctggaatccgccaacaaccgccaaactgactatcgagtccacacctttcaatgtggccgaaggaaaggaggtgctgctgctcgcacacaaccttcctcaaaatagaatcggctattcctggtacaaaggcgaaagagtcgacggcaacagtctgatcgtgggctacgtgatcggcactcagcaagctacaccaggacctgcatattcaggtcgtgaaaccatctaccccaacgcctctcttctgatacagaacgtgacccagaacgatacaggcttctataccctgcaggttataaagtctgacctcgtgaacgaggaggccaccggtcagtttcacgtgtaccctgaactgccgaagccttctatctccagtaataatagtaatccagtggaggacaaggacgccgtggccttcacttgtgaaccagaggtacagaatacgacttatttgtggtgggtaaatggccaaagccttcccgtgtcccctagactgcagctgtcgaacggaaacatgaccctgacactactgagtgtcaagcggaatgacgccggttcctacgagtgcgaaatccagaatcccgcatccgcaaataggtccgaccctgtcactctgaacgtgctgtacggccctgacgggcctacaataagcccaagcaaagcaaactacagaccgggagagaacttaaatttgagctgccatgccgcaagcaatccccctgctcagtactcttggttcatcaatgggacatttcagcaaagcacccaggagcttttcatccccaatatcactgtgaataactccggatcatatatgtgccaagctcacaactccgccacaggtctgaatcgcacaacggtcaccatgatcactgtgagcggaagcgcgcctgtgctcagcgcagtggccacagttgggattacaatcggggtcctcgctcgggtggccttgatatag

SEQ ID NO: 27739 - DNA, 1977 bp, synthetic construct
  misc_feature 1..1977: note = Description of Artificial Sequence: Synthetic coding sequence
  source 1..1977: mol_type = other DNA
atggtgccgcgtttgctgttgcgagcatggccacggggaccagcagtgggccctggcgcacccagtaggccactgtccgctgggtccgggccaggacaatacttgcaacgttccattgtgcccaccatgcactaccaagattcactgcccaggctaccaattcccaagctggaggacacaatccgtaggtacctctcagcgcagaagcctctgctgaatgatggccagttccgcaagaccgaacagttctgtaagagtttcgaaaatgggatcgggaaagaattgcacgagcagctggttgcactggataaacagaataagcatacatcatacattagcggaccatggttcgatatgtatctcagcgccagggactctgtggtgcttaacttcaatccattcatggcatttaatcctgaccccaagagcgagtacaacgaccaattgaccagggcaacaaatatgaccgtctcagccataaggtttctcaaaactctgagggccggtcttctggaaccagaggtcttccaccttaatcccgcaaagtcagacacaattacctttaagcggctcatccgatttgtgccatctagcctgagttggtatggggcatatttggtgaacgcctaccccctggacatgagtcagtacttccggctctttaacagtacccggctgcccaagccgagccgtgatgagctgttcacggatgacaaggctcgccacctgttggtcctgcgtaaagggaatttctatatatttgacgtgctcgaccaggatggaaacatcgtctcgcccagcgagatccaggcccatctgaagtatatcctatctgactcaagtccggcacccgagttccccctggcttatctgacaagcgaaaatcgcgatatctgggccgaacttcggcagaagctcatgagtagcggaaacgaggaatctctgagaaaagtcgattcagcagtgttctgcctttgcctagatgacttccccatcaaggatttggtccacctcagccacaacatgcttcatggcgatggaacaaatagatggtttgacaaatccttcaacctgatcatagccaaagacggatctaccgccgttcattttgaacatagctggggcgacggagtggctgtactacggtttttcaacgaagtgttcaaagacagcactcagacccctgccgttaccccccagtctcagcccgcaacaaccgatagcactgtcacagttcagaaactcaatttcgaactcacagatgcactgaagactggcattaccgccgcaaaagagaaatttgatgccaccatgaagactcttaccatcgactgcgtccaattccaacgaggtggtaaggagttcttaaagaaacaaaaactgtctcctgacgcagttgctcagttagcatttcagatggctttcctgcggcagtacggccagacagtggcaacctatgagtcatgcagtacagctgcattcaaacacggcagaacagagacgatccggccagcctctgtgtacacaaagcgttgctcagaggcttttgtgcgcgagccatccaggcactccgcgggtgagctccaacaaatgatggtagaatgctctaaataccacgggcagctgacaaaggaagcagccatggggcagggcttcgatcggcatctgttcgctttgcggcacttagctgccgcaaaggggatcattctgcccgaattatacctagaccccgcatacggacagattaatcacaacgtgctcagtacatcaaccctctcatccccagccgtgaaccttggcggttttgctccagttgtgagcgacggcttcggcgtgggatacgctgtgcacgacaactggatcggatgtaacgtaagctcgtacccaggtcgcaacgctagagaattcctacagtgcgtggagaaagccctagaagacatgttcgacgccctggagggaaagagtattaagagctag

SEQ ID NO: 27740 - DNA, 1077 bp, synthetic construct
  misc_feature 1..1077: note = Description of Artificial Sequence: Synthetic coding sequence
  source 1..1077: mol_type = other DNA
atgagggccactcccctggccgcaccggcaggttcattgtccaggaaaaagcggttggagctggacgataatctggacaccgagagacctgtgcagaagcgagctcgctccgggcctcaaccccgactccccccatgcttgctgccactgtccccccctactgcaccagacagggccacggccgtagctacagcaagtcgactcggtccctatgtgttactggagcctgaagaggggggtagagcataccaggccctccattgtccaacgggaaccgagtacacttgcaaggtctatcccgttcaggaggctttagctgtccttgagccttatgccagattgcctccacataaacacgtggccaggcctactgaggtccttgcaggtacacagctgctttatgctttctttacacgcacccatggcgatatgcatagcctcgtgaggagtcgtcacaggattccagagcccgaggccgcagtgctattccgccagatggctacggctctggcgcattgtcatcagcacggccttgtgctgagggacctgaagctctgcagattcgtctttgccgaccgtgagcgcaagaagctcgtcctggaaaacctagaagattcttgtgtgctgaccggcccagatgactctctgtgggacaaacacgcatgccctgcatacgtgggcccagagatactgtcaagccgcgctagttactcaggaaaagccgctgacgtctggtcactgggagtcgccctgttcactatgcttgccggacactatccctttcaagattctgagccagtgctgctgtttggaaaaatccgtcggggagcttacgctctgcccgcaggtctgtctgccccagcccgatgcctcgttcgctgtctcctacggagggagccagccgagcggctgacagcgacagggatattgctgcacccttggcttagacaagatccgatgcctttggctccgactcgaagccacctatgggaagctgcccaggtcgtacctgatggtctcggcctcgacgaagccagggaggaggaaggagatcgcgaggttgtcttatacgggtag

SEQ ID NO: 27741 - DNA, 1176 bp, synthetic construct
  misc_feature 1..1176: note = Description of Artificial Sequence: Synthetic coding sequence
  source 1..1176: mol_type = other DNA
atgtctggaccggtgcccagcagggcccgtgtctacacggatgtgaatacacaccgacctcgcgagtactgggattacgagtcacacgttgtggagtggggcaatcaggacgactatcagctggtccgtaagctcggcagaggaaaatatagcgaggtgttcgaagctattaatatcaccaataatgaaaaggtagttgtgaagatcttaaagccagtcaaaaagaagaaaatcaagagggagattaaaattttggaaaaccttagaggagggcctaatatcataaccctcgccgacattgtcaaggaccctgtgagtcgtacgcccgctttggtgttcgaacatgtaaataatactgattttaagcagctgtatcagacattaactgattatgacatccggttttacatgtatgagatattaaaggcattggattattgtcattcaatgggaatcatgcatcgggatgtaaaaccccacaacgtgatgattgaccatgagcacagaaaactgcgcctaatcgattggggcctcgccgagttctatcaccctgggcaagagtataatgtcagggttgcatcaaggtattttaagggtccagagctcttggtagactatcagatgtacgattatagtttagatatgtggtccttgggatgcatgctggcttctatgatttttaggaaagagcccttcttccatggccatgataactacgatcagctggttagaattgccaaagttctggggaccgaggacctctatgattacatagacaagtacaacatcgagctcgacccaaggttcaacgacatactgggcaggcactcccgcaaaaggtgggagagatttgtccattccgagaaccagcatcttgtgtctcctgaggctctggacttcctcgataagctccttcgatatgatcaccagtctagattgaccgctcgagaagctatggagcatccctacttctacaccgtcgtcaaagatcaggcaaggatgggaagcagcagtatgcccggaggctcaacaccagtcagcagtgctaacatgatgagtggaatctcctctgtgccaacaccttccccactcggacccctggccggatctcctgttatcgctgccgcaaaccccctcggaatgcccgtacctgcagcggctggcgcacagcagtag

SEQ ID NO: 27742 - DNA, 1194 bp, synthetic construct
  misc_feature 1..1194: note = Description of Artificial Sequence: Synthetic coding sequence
  source 1..1194: mol_type = other DNA
atgtccggacctgtcccctcccgagccagagtatacacagatgtgaacacacatagacctagagagtactgggattacgagagccacgtcgtggaatggggcaaccaggatgattaccaattggtgcgcaaacttggccgaggcaagtactcagaagttttcgaagccattaacatcaccaataatgaaaaagttgtagtcaagattctgaaacccgtcaaaaaaaaaaaaatcaagcgcgagattaagatactggagaatctgaggggtgggcctaacatcatcactctggcagatattgtgaaggaccctgtatcccgtacccctgccctggtgtttgagcatgttaataacacagacttcaagcagctataccaaacacttaccgattacgacatccgcttttacatgtatgagatactgaaggccctggattactgccactcaatggggatcatgcatagagacgtgaaaccccataacgtcatgattgatcatgaacatagaaagttgaggctgatcgactggggacttgctgagttttatcatcctgggcaagagtacaacgtgcgcgtggccagtcgctattttaagggacctgaattgttagtcgattaccaaatgtatgactacagcttggacatgtggagcttggggtgtatgttagcatctatgattttccgaaaagagcctttcttccacggccatgataattacgatcagcttgtccgtattgctaaagtgcttgggaccgaggatttgtatgattacattgacaaatataatatcgagctggatcctagattcaacgacattctgggcaggcactcacgaaagcggtgggaaagattcgtacatagtgagaatcagcaccttgtctcccccgaggcattggatttcctcgacaagcttttaagatatgaccaccagagcaggctgacggctagagaggctatggagcacccgtacttctataccgtggttaaggatcaagccagaatgggatcatcctcaatgcccggtggcagcaccccagtgtccagtgccaatatgatgtccggaatctcttccgtgcccaccccatcccctctgggaccccttgctggcagccctgtcatcgcagccgctaacccactcgggtgcttgttccagctccccctgaggtccgcagtcaccgccctgtcagtttcctag

SEQ ID NO: 27743 - DNA, 768 bp, synthetic construct
  misc_feature 1..768: note = Description of Artificial Sequence: Synthetic coding sequence
  source 1..768: mol_type = other DNA
atgtacgagatattgaaggctttggattactgtcactccatgggcattatgcaccgggacgtcaagccacacaacgtcatgattgaccacgaacaccgaaaactacggttgatcgattggggattagccgaattctaccatcccggtcaagagtacaatgtgagggtagcttctaggtacttcaaaggcccagagctgctggttgattatcagatgtacgattactccctggatatgtggtcattgggatgcatgcttgccagcatgatcttccgcaaggagcccttttttcatggacacgataattacgatcagcttgtcagaatcgcaaaagtcctgggaacagaggatctgtacgactatatcgacaagtataatatcgagctcgatcctcggttcaacgacattcttggccgacattcccggaaaaggtgggagcggtttgttcacagcgaaaatcaacacttagtatcccccgaggccttggattttctggataaactgctcaggtacgaccaccagagtcggctgaccgctagagaggctatggaacatccatacttttacaccgtggtaaaagaccaggcaagaatggggtcttcaagtatgccgggtgggagcacaccagtgagctcagcaaacatgatgtctggcatctcgtccgtccctacaccttctcctcttggccctctggccggatctccagtgattgccgcagcaaatccattaggaatgcccgttccagctgctgctggggcacaacagtag

SEQ ID NO: 27744 - DNA, 1158 bp, synthetic construct
  misc_feature 1..1158: note = Description of Artificial Sequence: Synthetic coding sequence
  source 1..1158: mol_type = other DNA
atgagcggcccagttccatctcgcgctagggtctacactgatgtgaatacacaccgcccaagggagtactgggactatgaatcacacgtcgtcgaatggggaaaccaggatgactatcagctggtcagaaaactcggcaggggtaagtacagcgaagtcttcgaggcaatcaacatcaccaataacgaaaaagttgtggtcaagatactgaagcccgtgaaaaagaagaagatcaagagggaaatcaaaattctcgagaatcttcgaggagggcctaatatcattacgctcgccgacatagtcaaagacccagtctcaaggacaccagccctggtgttcgagcatgtgaacaacacagacttcaaacagttataccaaactcttacggactacgacatccgcttttacatgtatgaaatattgaaagctttggattactgccacagtatggggataatgcaccgggacgtcaagccccacaatgtaatgattgatcatgaacataggaagctgcggcttattgattggggtctcgccgaattctatcaccccggtcaggaatacaacgtaagagttgcctcaagatactttaaaggccctgaactgttagtggattaccagatgtatgactacagcctggacatgtggagtctggggtgcatgctggcaagcatgatattcaggaaggagcccttcttccacggtcatgataattacgaccagctcgttagaattgctaaggtcctgggaacagaggacctgtacgactatatagataagtacaacattgagctagatcccagatttaacgacattctcggccgtcacagcagaaagagatgggagaggttcgtccactcagaaaatcaacaccttgtcagtcccgaagcattggatttccttgataagctgctgcgatacgaccatcaaagtcgtctaactgccagagaggcgatggaacacccatacttttacacagtcgtgaaggatcaagcaaggatggggtcaagttctatgccgggaggatcaacaccagtgtcatcagccaatatgatgtctgagatgaaattctgcagggtcgcacaagccggactagagcttctctcctcaactgtgtaccctccctggccacctaaggtactgcggttggaagcctag

SEQ ID NO: 27745 - DNA, 1053 bp, synthetic construct
  misc_feature 1..1053: note = Description of Artificial Sequence: Synthetic coding sequence
  source 1..1053: mol_type = other DNA
atgcctggcccagcagcaggtagtagggcacgggtgtatgcggaggtaaatagcctgcgttcgcgagaatattgggactatgaagcacacgtcccatcctgggggaaccaggatgattaccagctggtccgcaaactgggaagggggaaatatagtgaggtgttcgaagcgataaatattaccaacaacgagcgggtcgtggtgaagatcctcaagccagtgaagaaaaagaaaatcaaaagagaggttaagattctggaaaacctcaggggtggaaccaatattataaagttgattgacacggttaaagaccccgtatctaagacacccgcactggtgttcgaatacatcaacaacactgacttcaagcagctgtaccagatcctgaccgacttcgacatacgtttttacatgtacgaactgctgaaagcactggactactgccatagcaagggcattatgcacagggacgtgaagcctcacaatgtgatgattgaccaccagcagaagaaactcaggctaatcgattggggcctggccgagttttatcacccagcccaggaatacaacgtgcgggtggcctcccggtattttaaaggcccagaactgcttgtcgattaccagatgtacgactactcattagatatgtggtcgctggggtgtatgctcgccagcatgattttccggagagaacccttctttcatggacaagacaactatgaccagctggtgagaattgccaaggtcttagggacagaggagctctatgggtacttgaaaaaatatcacatagatctggacccgcattttaatgacattctggggcaacacagtaggaagcgatgggagaactttatccactctgagaaccggcacctcgtgtctcctgaagcccttgatcttctggataaactcttaaggtatgaccaccagcaacggctaacggccaaggaggccatggagcatccatacttctaccctgtggtgaaggagcaaagccagccatgcgccgataatgccgtactgagttccggacttaccgctgcgaggtag

SEQ ID NO: 27746 - DNA, 600 bp, synthetic construct
  misc_feature 1..600: note = Description of Artificial Sequence: Synthetic coding sequence
  source 1..600: mol_type = other DNA
atggaggctcgggacaagcaggtgctacggagcttacgcttggaactgggggcagaggttctcgttgaggggttggtacttcaatacctgtaccaggaaggcattttaactgaaaatcacatccaggaaattaatgcccagaccacaggccttaggaagactatgctcctgctggacattttgcctagtagaggaccaaaggcttttgacaccttccttgatagcctgcaggagttcccttgggttagagagaagctcaagaaagctcgggaagaggcgatgacggacctgccagcgggagacaggctcactggcatcccatctcatatcctgaactcttccccttctgatcggcaaatcaaccagctggctcagagattaggacctgagtgggaacccatggtgctgagccttgggctgtcacagaccgatatttatagatgcaaggcaaaccacccccacaacgtgcagagtcaggtcgtagaggctttcatacgctggcgacagcgatttggcaagcaagctaccttccagtcactgcacaatggccttagggccgtagaggttgaccccagcctgctcctccatatgcttgagtag

SEQ ID NO: 27747 - DNA, 366 bp, synthetic construct
  misc_feature 1..366: note = Description of Artificial Sequence: Synthetic coding sequence
  source 1..366: mol_type = other DNA
atggaggcccgagacaagcaggtactaaggagcctccgcctcgaactgggggctgaggtcctggtagaggggctggttcttcaatatctgtaccaggagggaattctcaccgagaatcacatccaggagatcaatgcacagaccaccggcctgcggaagactatgttgttgctagatatactgccatcccgcggacctaaggctttcgacaccttccttgattcactccaagaattcccctgggtgcgcgagaaattgaagaaggcacgcgaagaggctatgaccgatcttcccgcagagatgcgcaaattaaggccaaaggattctgttacatgtttagcgagccagctgacctggcgcttttag

SEQ ID NO: 27748 - DNA, 600 bp, synthetic construct
  misc_feature 1..600: note = Description of Artificial Sequence: Synthetic coding sequence
  source 1..600: mol_type = other DNA
atggaggcaagagacaagcaggttctcagaagtctgcgcctcgaacttggtgcagaggtactggttgagggattagttctgcagtacctgtaccaggagggcatattgactgaaaatcatatccaggaaattaatgcccagaccaccggtttgcgcaaaactatgttactcctggatattctgccgtctcgtggccctaaagctttcgacacgtttctcgattccctccaagaatttccgtgggttagagagaaactgaagaaggctcgcgaggaggctatgactgacttgcctgccggtgaccggctgacggggataccctctcacatactcaacagtagccccagcgataggcagattaaccagcttgcgcagcgcctgggtccagagtgggagccaatggttctttctctgggcctgagccagaccgatatatacagatgcaaagcgaaccaccctcataatgtgcagtctcaggtggtggaagccttcattaggtggcgacaacgcttcggtaagcaggcaacgttccagtctctgcacaatggcctgcgcgctgtggaagttgacccaagcctcttgttgcacatgttggaatag

SEQ ID NO: 27749 - DNA, 312 bp, synthetic construct
  misc_feature 1..312: note = Description of Artificial Sequence: Synthetic coding sequence
  source 1..312: mol_type = other DNA
atggaggccagagacaaacaagttctacgctccctgcgtcttgagctcggagccgaggtactcgtcgaaggacttgtgctgcagtacctataccaggaaggaattctgaccgagaaccatatccaggagatcaatgcccagaccactgggctccgaaaaacaatgctgctgctcgacatccttccttccagggggccaaaggcctttgatactttcctggactccctgcaggagttcccttgggtccgtgagaaactgaaaaaggccagagaggaagccatgaccgatcttcctgccggatgttggccttag

SEQ ID NO: 27750 - DNA, 1443 bp, synthetic construct
  misc_feature 1..1443: note = Description of Artificial Sequence: Synthetic coding sequence
  source 1..1443: mol_type = other DNA
atgtccgccgaagtgatccatcaggtggaagaagcattggacaccgacgagaaagagatgctgctgttcctgtgcagggatgtcgccatcgatgtagtccctcccaacgtgagagatctgctagatatccttcgtgagaggggcaaactgtcggtgggagacctcgctgaactgttgtaccgtgtgagaagattcgatcttttgaagagaatcctgaagatggaccgtaaggccgtcgagacccacctcctcagaaacccacacttagtaagcgactacagggtgcttatggcagagattggtgaagatttggataagagcgacgtgtcaagtttaatcttcctcatgaaggactatatgggcaggggtaaaatcagtaaagagaagtcatttcttgacctcgtagtggagctcgagaaactcaacttggtagcaccagatcagctggacctacttgagaagtgtctaaaaaacattcacaggattgatctcaagacgaagatccagaagtacaaacagtcggtgcaaggcgcaggcacctcatatagaaacgtgctgcaggcggcaattcagaaaagcttgaaagatccctccaataactttcgtctccacaatggaaggagtaaggagcagcgattgaaggagcaactgggcgctcagcaagagccagtaaaaaagtctatccaggaatcagaggcttttctgcctcagtctatccccgaagaacggtacaaaatgaagtcaaagcccctggggatttgcctgattattgactgcattggcaatgagaccgagctgctgcgcgacacctttacatctctgggctacgaggtgcagaagtttttgcatttgtctatgcacggaatctcacagatcctgggccagttcgcttgcatgcccgagcaccgcgattatgattcattcgtttgcgtgctcgtgagccgaggcggatctcagagtgtgtacggagttgatcaaacacattcaggacttccgctgcaccatatcagacggatgttcatgggggattcatgcccatatcttgccggaaaacctaagatgtttttcatccaaaactatgtggtgtcagagggtcagttggaagatagcagtctgctcgaagtcgatggccctgccatgaagaacgtggagttcaaggcccagaaacgtgggctgtgcactgtgcacagagaggctgatttcttttggtctttatgcacggcagacatgagcttacttgagcagtcacactcgtccccctcgttatacctccaatgcctgtcacagaaactgcggcaagagcgcaaaagacctctgctggacctccatattgaactaaacggatatatgtacgattggaactcccgggtctcagccaaagagaagtactatgtgtggctgcagcacactctcaggaagaaactgatcctgagctatacttag

SEQ ID NO: 27751 - DNA, 1389 bp, synthetic construct
  misc_feature 1..1389: note = Description of Artificial Sequence: Synthetic coding sequence
  source 1..1389: mol_type = other DNA
atgtctgctgaagtaatccaccaggtggaggaagcccttgacaccgatgagaaagagatgctgttgtttctgtgccgggatgtggccattgatgttgttcctccaaacgttcgtgatctgctggacattctcagagaaaggggtaagctgtcagtgggtgatctcgcggaactcctatatagagtccggagattcgatctgctcaagcgcatattaaaaatggataggaaggctgtggagacacacctgctccggaacccacacctcgtgagcgattatcgtgttctgatggccgaaatcggcgaggaccttgataagtcagacgtcagctcattgattttcctaatgaaagattatatgggcaggggcaaaatttcaaaggagaagtccttcctcgacctcgtggtagagctggagaaactgaacctggtggcccctgaccagctcgacctgttagagaagtgtctgaagaacattcatcgaattgatctcaaaacgaagatccagaagtacaagcaatctgtgcaaggggcaggaaccagctacaggaacgtgttgcaggcagctatccaaaagagcctaaaggacccgtccaacaactttcggctccacaacggacggtcgaaggaacagcggctaaaggagcagctgggcgcacagcaggagccagtgaagaagtctatccaggaatcagaagcatttctgccacaatcaatacccgaggaacgttacaagatgaagagtaaacctctcgggatatgtttgattatcgactgcattgggaacgagaccgaacttctgcgggatacatttacgagcctaggctacgaagtccagaagtttctgcacctcagcatgcacggtatatctcaaatccttggacagtttgcctgcatgccggagcaccgagattacgactcttttgtgtgtgtcttggttagcaggggtggttctcagtccgtctacggagttgaccaaactcactccggtctgccattgcatcatatcaggcgaatgtttatgggtgatagttgtccatatctggcaggaaaacctaagatgttttttatacaaaactacgtcgtatctgaaggccagttggaggatagctctctgctcgaagtagacggtcccgcaatgaaaaatgttgagtttaaagctcagaagagaggtctgtgtactgtccacagggaggcagatttcttttggtcgctgtgcaccgctgacatgtcattgctggagcagtcccactcttcacctagcttgtacctgcagtgtctgagccagaagttgagacaagagcgcggtactatccccggatctggaatcacagaatccaaagatatgcacttctcctcacttggctgcattttgctggatgtcttgtag

SEQ ID NO: 27752 - DNA, 1047 bp, synthetic construct
  misc_feature 1..1047: note = Description of Artificial Sequence: Synthetic coding sequence
  source 1..1047: mol_type = other DNA
atggctgaaatcggggaagacctggacaagagcgacgtctcttccttgattttcctgatgaaagattacatgggacgtgggaagatttcaaaggagaaatccttcctggatttagtggtggaactggagaaattgaatctggtggcccctgaccaactggatctcctggagaaatgtctcaagaatatccaccggatcgacttgaaaaccaagatacagaaatacaaacagtctgtacagggtgcaggcacatcctaccggaatgtgcttcaggctgccatccaaaagtcccttaaagatccctcaaataactttcgcgaggaaccagtcaagaaaagcattcaggagtcggaagccttcctgccacagtccatccccgaggagaggtacaaaatgaaatccaagcccctggggatctgtcttatcatcgattgcattggcaatgaaacagagctgctcagagacaccttcacatcactaggctatgaggttcagaagtttttgcacctgtctatgcatggaatcagtcagatccttggacaatttgcctgcatgcccgagcaccgggactatgactcgttcgtgtgcgtgctggtatcaagaggcggttcccaaagcgtgtatggggtggatcagacccattcgggactgcccctgcaccatattcggcgaatgttcatgggagactcctgcccttacttagccggaaagccaaagatgttctttatccagaactacgtggtctccgagggacagctggaggattctagcttgctggaagtcgacggcccagcgatgaagaatgtcgaattcaaagcccagaagcggggactgtgtacagttcaccgtgaagcagatttcttctggagcctgtgcactgctgacatgtccctgcttgaacaatcacactcaagccccagcctttacctccagtgtctctcccaaaagctcaggcaggagcgcggaacaattcctggatccggaataaccgaatcaaaggatatgcacttctcttctttagggtgcatccttttggacgtgctctag

SEQ ID NO: 27753 - DNA, 903 bp, synthetic construct
  misc_feature 1..903: note = Description of Artificial Sequence: Synthetic coding sequence
  source 1..903: mol_type = other DNA
atgtctgctgaggtgattcaccaggtagaggaggctttagacaccgacgagaaggaaatgttactgtttctgtgtagggatgtggccatagatgtggtaccacctaacgttcgggacttattggatatactacgggaacggggaaaactatcagtaggggatttggccgagctgttgtacagagtccggcgattcgatctcctgaagaggattctgaagatggaccgcaaagcagtggaaacacatctgcttcgcaatccccacctggtgagcgactaccgcgtgctcatggctgagattggtgaagatttggataagtcagatgtgtcttcactgatcttcctgatgaaagattatatgggacggggtaagataagtaaagaaaagagtttcttggacctcgtagtggagctcgaaaaattaaatttagtcgctccagatcagctggatctactggagaaatgtctgaaaaatatccacagaatcgacctgaaaaccaagattcagaagtataaacagtcagtgcagggcgctgggacgtcctataggaatgtcctgcaagccgctattcagaaatccctcaaggatcctagcaataatttcagactgcataatggcaggtcaaaagaacagcggctaaaggaacagctgggtgcccagcaagagccagtaaagaaatcaattcaagagtcggaggcttttttgcctcagtccattccagaagagcgttacaaaatgaaatcgaaaccacttggaatctgtctgataatagattgcattggcaatgaaaccgaaaacgcgcatagctggatttttaccctcaattcaatggccacttgtatgataggtacagctgagttcctgcccagaaggaatattatgagcggctgttctaccctttag

SEQ ID NO: 27754 - DNA, 753 bp, synthetic construct
  misc_feature 1..753: note = Description of Artificial Sequence: Synthetic coding sequence
  source 1..753: mol_type = other DNA
atgtcagccgaagtgatccaccaggtggaagaggccctggataccgatgagaaggagatgctactttttctctgccgggacgtggcaattgacgtcgttcccccaaatgtgagagacctcctcgatatactgcgcgagcggggtaagctgtcagtcggggacctggctgagctcctgtaccgcgttcgcaggttcgatctgctaaagcgcatcctcaaaatggaccggaaggccgtcgaaacccacttgctgaggaaccctcacctggtctctgactaccgcgtattaatggctgagataggtgaagatctggacaaatccgatgtatctagcctgatatttctgatgaaagactatatgggaagaggaaaaatctcgaaagaaaagtctttcctggacctggtcgtggagctggaaaaacttaacttagtggcaccagatcagctggatctgctcgagaaatgcctgaaaaatatccatagaatcgacttgaaaacgaagatccaaaaatacaaacagagcgggggatggaacggaacctggatgacaaaggcctcattctcactatggttggaaattgcaagcttgtatattcttcatatacctgacctacctaccccgctgccatgcatcttcatgatttccgcgaaatgttgccaggctgtgttaaacatttccgtattcaaaaaggagagcgggatctgtaccggatggcaaagttatggacactccggggtcctgcacgtgtgttag

SEQ ID NO: 27755 - DNA, 357 bp, synthetic construct
  misc_feature 1..357: note = Description of Artificial Sequence: Synthetic coding sequence
  source 1..357: mol_type = other DNA
atgagcgcagaggtgattcaccaggtggaagaagccctggacaccgatgagaaggagatgctcttattcctttgtcgagatgtggcaattgacgtggtcccgccaaatgtccgcgatttgttagacattctcagggagagagggaagctatccgtcggagacctggctgagctcctgtacagggttaggaggttcgacctactgaaacggatcctaaagatggatcggaaggccgtggagacacatctgctgcgaaaccctcacctcgtgtccgactaccgagtcctgatggcagaaataggagaagacctggataagagtgacgtttcatcccttatcttcttaatgaaggactag

SEQ ID NO: 27756 - DNA, 1443 bp, synthetic construct
  misc_feature 1..1443: note = Description of Artificial Sequence: Synthetic coding sequence
  source 1..1443: mol_type = other DNA
atgtcagcagaagtcatccaccaggttgaggaagcgcttgacaccgacgaaaaggaaatgttactgttcctgtgccgggatgttgcaattgacgtcgtgccaccaaatgttcgcgacctcctggatattctgcgggaacggggtaagctttcagtcggcgatttggccgagctgctctaccgggtgagaaggtttgacctactgaagcgtattttgaaaatggacaggaaggctgtcgaaacacatttgctacgcaatccccacctggtctctgattacagggtcctgatggctgaaattggtgaggatcttgacaagagcgatgtgtcgagtctgatatttctcatgaaagattatatgggcagagggaagatctctaaagagaaatcttttctggatctggtggtggagctggagaagttgaacctggtagcaccagatcagcttgacctcctggagaaatgccttaaaaatattcatagaatcgacctcaagacgaagatccagaagtacaagcagagtgttcagggcgcagggacaagctatcgaaacgtactccaggctgccatccaaaagtccttgaaggatcctagcaacaactttcgtctacataatggtagatcaaaggagcagcgactgaaagagcagctgggcgctcaacaggaaccagttaaaaaaagcatccaggagtctgaagcatttctaccacagtctatacccgaggaacggtataagatgaaatctaagcctctggggatttgcttgattatcgattgcatcggcaatgagaccgaacttctgcgcgacacctttacatcactgggatatgaagtgcagaagtttttgcatctgagcatgcatggcatcagccaaattcttggccagtttgcgtgtatgccagaacaccgcgattacgatagctttgtctgtgtcttggtgagtcgaggcggatcccagagcgtgtacggtgtcgatcagactcattcaggcctgccactgcatcatatacggcgtatgtttatgggtgactcttgtccttacttggcagggaaaccaaagatgtttttcatccagaattacgtggtctcagagggacagcttgaggatagctcccttctggaggtcgatggccctgctatgaagaatgtcgaattcaaagcgcagaagagaggactctgcacagttcacagagaggccgattttttctggagcctctgcacggcagacatgtccctgttagagcagagtcatagctctccatcattgtatctgcagtgtcttagtcaaaaacttcgccaggagaggaagagaccgctgctcgatttgcatatagaattgaatggttatatgtatgactggaacagcagggtttccgccaaagaaaaatactatgtctggcttcaacatactcttaggaagaagctcatcctctcctacacatag

SEQ ID NO: 27757 - DNA, 189 bp, synthetic construct
  misc_feature 1..189: note = Description of Artificial Sequence: Synthetic coding sequence
  source 1..189: mol_type = other DNA
atgtccgccgaggttattcatcaagtggaggaggcactcgacactgacgagaaggagatgcttctgttcctgtgcagagatgtggccattgatgtggttccccctaacgtgagggatttgctggatattcttcgagaacgcggtaagctgtccgttggagacctcgccgagctcttatatcgggtttag

SEQ ID NO: 27758 - DNA, 195 bp, synthetic construct
  misc_feature 1..195: note = Description of Artificial Sequence: Synthetic coding sequence
  source 1..195: mol_type = other DNA
atgagcgccgaggtgatccaccaggttgaggaggcattggacacagatgagaaggaaatgcttctgtttctctgccgtgatgtagctatcgacgtggtcccgcctaacgtccgcgatcttctcgacatccttagagagcgagggaaactgtcagtcggagatctggctgagctgctgtatcgcgttcgtcgctag

SEQ ID NO: 27759 - DNA, 390 bp, synthetic construct
  misc_feature 1..390: note = Description of Artificial Sequence: Synthetic coding sequence
  source 1..390: mol_type = other DNA
atgtctgcagaagtgatccatcaggttgaagaggcactggatactgacgaaaaggaaatgttactgtttttgtgtcgcgatgtggccatagacgtggtgccgcctaacgtcagggatctccttgacatactgcgggaacgcggaaagttatctgtcggcgacctcgccgagttgctttatcgtgttagaagattcgatctcctgaagcgcattctaaagatggataggaaagctgttgagacacacttattaagaaacccgcatttggtgtccgattatagagtactgatggctgagatcggtgaagatctggacaagagtgatgtgtcgagcctgatctttctcatgaaggattatatgggacgcggtaaaataagtaaagaaaagtag

SEQ ID NO: 27760 - DNA, 1155 bp, synthetic construct
  misc_feature 1..1155: note = Description of Artificial Sequence: Synthetic coding sequence
  source 1..1155: mol_type = other DNA
atggccgaaatcggggaagacctggataaatcggatgtctcttccctaattttccttatgaaggattacatggggcgagggaaaatttcaaaggaaaagagctttctggacctagtcgtggaactggagaagctgaatctggtagccccagatcaactcgacctgctggagaaatgcctgaaaaacattcaccgaatcgaccttaaaacgaaaatacagaagtataagcaatcagtgcagggggctggaacttcttatcgcaacgtactccaggccgctatccagaagtcacttaaggacccgtcaaacaacttcagacttcacaatgggcgtagtaaggaacagagactgaaggaacagctgggtgcacagcaggagccagtgaaaaaatccatccaggaatctgaggccttcctgccccagtcaattccggaggaacggtataagatgaagagcaagccccttgggatctgtcttattatagattgtattgggaatgagacagagttactccgggacaccttcacgagcttgggctatgaggtacagaagtttctgcacctgagcatgcatgggatcagtcaaatactcggccaattcgcttgcatgcctgagcatcgtgactatgactcatttgtgtgcgttctcgtatctagaggtggttcacaaagcgtgtacggcgtggatcagactcacagcggtctgcctctgcatcacattaggcggatgtttatgggggacagctgcccatatcttgccggaaagcctaagatgttcttcattcagaattacgtggtgagcgaaggccaattggaggattcatcactacttgaggttgatggtcccgcaatgaaaaatgttgagtttaaggcgcaaaagaggggactgtgtactgtgcaccgagaggcagacttcttctggtcgctgtgcaccgctgatatgtctctgctagaacagtcacacagttccccttcgttgtaccttcagtgtttgtcccaaaagctgagacaagaacggaagaggcccctccttgatctacatattgagctgaacggttacatgtatgactggaatagccgtgtttcggctaaagagaaatattacgtttggctgcagcatacccttaggaagaagctcatcctgtcttatacctag

SEQ ID NO: 27761 - DNA, 666 bp, synthetic construct
  misc_feature 1..666: note = Description of Artificial Sequence: Synthetic coding sequence
  source 1..666: mol_type = other DNA
atgtctgctgaggtgatccaccaggtcgaagaagccctcgatacagacgagaaggagatgttgctgttcctctgcagagatgttgccatcgacgttgtcccacctaacgtgcgggatctcctggatatcctgagagaacgtggcaagttaagcgtgggcgatctggctgaactgctctatagggtgcggcgtttcgatttactgaagcggatactaaagatggatcgaaaggctgtggagactcaccttttgaggaatcctcacctcgtctccgactacagggttttgatggctgagattggagaagacctggacaagtctgacgtgagctccttgattttcttaatgaaagattatatggggagaggaaagataagcaaggaaaagagcttcctggatttagtcgtggaacttgagaagttgaaccttgtagccccagaccaactcgatctgctcgaaaaatgcttaaaaaatatccacaggatcgacctgaaaaccaaaatccagaagtataaacaatctgtgcagggtgctggaacctcgtacaggaacgtgcttcaggccgcaattcagaagagtctgaaagacccaagcaataatttccggatgattaccccgtatgcccattgtcctgatctgaagattcttggcaactgctccatgtag

SEQ ID NO: 27762 - DNA, 1338 bp, synthetic construct
  misc_feature 1..1338: note = Description of Artificial Sequence: Synthetic coding sequence
  source 1..1338: mol_type = other DNA
atgtccgccgaagtcatccaccaggtcgaagaggctctggacaccgatgagaaggagatgcttctattcctctgcagagatgtggcaattgacgtcgtgcctcccaacgtcagagacctgctggacattttgagggagcgcggtaagctgtcagtcggcgacctggctgagctgctgtatagagtgagacggttcgatctcctgaaaagaatcctaaagatggataggaaggccgtggaaacccatctgctgcgcaatccccacctagtgtcagactatagagttttgatggctgagatcggcgaggatctggacaaatccgatgtgtcctcgttgatattccttatgaaggactacatgggcagaggaaagatcagcaaagaaaagtcgtttctcgacctcgtggtcgagctggagaagctgaacttggtggcccctgatcagctggatctcctcgagaagtgtctaaaaaacatccatcggattgatcttaagacaaagatccaaaagtacaagcagagtgtccaaggtgctgggaccagttatcgcaatgttcttcaggccgctattcaaaaatccctcaaagacccatccaacaactttcgatccatacctgaagagcgctacaaaatgaagtccaaaccgctcgggatctgtttaattatcgactgtataggcaacgagacggagttgctgcgggacacgttcacctctctagggtacgaggttcagaagttccttcatctgagcatgcacgggatcagtcaaatcttgggccagtttgcctgcatgcctgaacacagagattatgactctttcgtctgcgtactcgtaagtagaggcggaagtcagtctgtgtacggcgtggatcagactcattcaggccttccccttcatcacatccgaaggatgttcatgggcgattcctgcccctatttggctgggaagccaaaaatgtttttcattcagaactatgttgtttcagagggacaattggaggactcaagtctgctggaagtggacggtcccgctatgaaaaacgtagaatttaaggcacagaaaagggggttatgcactgtgcaccgcgaggcagacttcttttggagtttgtgtaccgccgacatgtctctgctggagcagagccacagctctccctcactgtacttgcagtgtctgagccagaagctccggcaagagagaaaacgtccactgctggacttgcatatcgaattaaacggctacatgtacgactggaattcaagggtgagtgccaaggagaagtactacgtatggcttcagcatacactgcgaaagaagttaatcctgtcttacacctag

SEQ ID NO: 27763 - DNA, 1152 bp, synthetic construct
  misc_feature 1..1152: note = Description of Artificial Sequence: Synthetic coding sequence
  source 1..1152: mol_type = other DNA
atggccgataaggtcctgaaagaaaagcgtaagctgtttattcgctctatgggtgagggtaccatcaatggactgctcgacgaactcctgcaaactcgcgtgttaaataaagaagaaatggagaaagtgaagagagaaaacgctacagtgatggataagacgagagcactgatcgactcagtcatcccgaaaggcgctcaggcctgtcagatttgcattacatatatttgtgaagaggactcttatctcgctggtacattgggactgagcgctgcccctcaggcggtgcaagataacccagcaatgccaactagtagcggttccgaggggaacgtaaagttgtgctcgctggaagaagctcaacggatatggaagcagaaaagcgccgaaatatatcctatcatggacaaaagctcccggacacgtctggccctgataatctgtaatgaggagtttgactccatcccacgcagaacgggagccgaggtggacatcacaggcatgactatgttgttgcagaatctagggtactcagtggatgtcaagaaaaacttgactgcatctgatatgacaactgagctggaagccttcgcgcaccggcctgagcacaagacaagtgactccacgttcctagtctttatgtctcacggaatcagggagggcatctgtgggaagaagcattcagaacaggtcccagacattttgcagctgaacgcaatttttaatatgctgaacaccaaaaactgcccttctctgaaagacaagccaaaggtgattataatccaggcatgtcggggagactcccccggagtggtgtggtttaaggacagtgtcggtgtgtctggaaatctgtccttgccaaccacagaggaattcgaggacgatgctatcaagaaggcccatatcgagaaagacttcatcgcattctgttcatccacccctgacaacgtgtcttggcgtcaccctaccatgggcagcgtcttcataggccgactgattgaacatatgcaggaatacgcttgttcctgtgatgtcgaagagattttccgaaaggtaaggttctccttcgagcaaccagacggcagagcacagatgcccaccacggaacgggtcacattaacgaggtgcttctacctgtttccaggtcattag

SEQ ID NO: 27764 - DNA, 792 bp, synthetic construct
  misc_feature 1..792: note = Description of Artificial Sequence: Synthetic coding sequence
  source 1..792: mol_type = other DNA
atggccgacaaagtactcaaggaaaaacggaagctgttcatcagatctatgggcgaagcccctcaggcagtccaggataaccctgctatgcccacatcctccggcagtgagggaaacgtgaaactctgttctctggaagaggcccagaggatctggaagcagaagtccgcggagatttaccctattatggataaatccagtcggacaagactcgcactgatcatttgtaacgaggaattcgattcaattccaaggcgcaccggagctgaggttgatattaccggaatgaccatgttgctgcaaaacctggggtattccgtggatgtgaaaaaaaatcttacggcaagtgacatgaccaccgagctggaggcatttgcccacaggccggagcacaagacatcggattcaacttttctcgtgtttatgagccacggcattcgagagggcatatgcggcaaaaaacactcggagcaggtcccggatatcctccagctcaatgccatcttcaacatgttaaatactaaaaactgccccagtcttaaggataagccaaaagtaataattattcaagcttgcaggggtgacaatgtgagctggaggcatccgaccatgggctcagtgttcattggtcggctgattgagcacatgcaggaatacgcatgttcctgcgatgttgaggagatctttcggaaggtgcgatttagtttcgagcagccagatggtcgagctcaaatgcccacaacagagagagtcacactgacaaggtgcttctacctattccccggtcactag

SEQ ID NO: 27765 - DNA, 267 bp, synthetic construct
  misc_feature 1..267: note = Description of Artificial Sequence: Synthetic coding sequence
  source 1..267: mol_type = other DNA
atggctgataaagtgttaaaggagaagcgcaagctgttcattaggtctatgggagaagacaatgtgagctggagacacccaacaatgggttccgtattcataggcaggctaatcgagcacatgcaagaatacgcttgcagctgtgacgtggaggagatctttaggaaagtgagattcagctttgaacaacccgacggcagggcccaaatgccaactacagagcgcgtgaccctcacacggtgcttttacctgttccccggacattag

SEQ ID NO: 27766 - DNA, 1152 bp, synthetic construct
  misc_feature 1..1152: note = Description of Artificial Sequence: Synthetic coding sequence
  source 1..1152: mol_type = other DNA
atggcagataaggtcctcaaggaaaagcggaaactgttcatcaggtcaatgggggaagggactatcaacgggctcttggatgaactgctgcagacccgtgtgctgaataaggaggaaatggaaaaggtgaagagagagaacgctactgttatggacaaaacccgcgcactgatcgacagcgtgatacccaagggagcccaggcttgccagatttgcattacatatatttgcgaggaggactcctacctagctggcactctcggactgtcagccgctccacaagctgtgcaggataaccccgctatgcccacatcttcaggctccgaagggaacgtcaaactttgttccctagaggaagcgcagcggatatggaagcagaaaagcgctgagatttatcctataatggataaaagttctaggacccggctggctctgataatatgtaacgaagaatttgactccatccccaggcggacaggcgctgaagtcgacattactggcatgacaatgctgctgcaaaatctcggttattctgttgatgtcaaaaagaacctgactgcatcagatatgacaaccgagcttgaagcttttgcccaccggcctgaacacaagacctccgactcaacgttcctagtgttcatgtcccacggaatccgagaaggaatatgcgggaaaaagcattctgaacaagtccctgacatactgcagctcaatgctatatttaacatgctcaatacaaagaactgcccaagtctgaaggataagcccaaagtgatcatcatacaggcctgtcgcggtgacagccccggagtcgtctggtttaaggactcagttggagtgtcaggaaacctgagtctgccaaccactgaggagtttgaggatgatgccattaagaaagcccatatcgagaaagactttatcgccttctgctcctccaccccagacaacgtgtcatggagacaccccaccatgggcagtgtctttatcggacgcctgattgaacacatgcaagagtatgcctgctcctgcgacgtggaggaaatcttccggaaagtgcggttcagctttgagcaacctgacgggagggcacagatgccgactaccgagcgcgtgacactcacgcggtgcttttatttatttccaggtcactag

SEQ ID NO: 27767 - DNA, 267 bp, synthetic construct
  misc_feature 1..267: note = Description of Artificial Sequence: Synthetic coding sequence
  source 1..267: mol_type = other DNA
atggctgacaaagtgctgaaggagaagcggaagctgtttatcaggtcaatgggcgaggataatgtgagctggagacaccccaccatggggtcagttttcatcgggagactgatcgagcacatgcaggaatacgcatgctcatgcgatgttgaggaaatattcagaaaggttcgcttctcatttgaacagcccgatggcagagcgcagatgcctactacagagcgcgtgacccttacacggtgcttctatctgttccctggacactag

SEQ ID NO: 27768 - DNA, 1215 bp, synthetic construct
  misc_feature 1..1215: note = Description of Artificial Sequence: Synthetic coding sequence
  source 1..1215: mol_type = other DNA
atggcagacaaggtgcttaaggaaaagcggaaactgtttatacgctccatgggcgagggcacaatcaacgggttactggacgagctgctccagacccgtgtgctgaacaaggaagagatggaaaaggtgaagcgggagaacgcgaccgtaatggataagacaagagcactgattgattcggtaatccctaaaggcgctcaggcttgtcagatctgcattacttacatttgcgaagaagattcttacctggctgggaccctaggactcagtgctgaccagacttccggtaactaccttaacatgcaagattcacagggggtattgtctagctttcctgctccgcaggccgtgcaagacaatcccgctatgcccacctcctctggttcggaagggaacgttaaactctgctccctggaggaagcccagcgaatttggaagcagaaatccgcagagatctacccaataatggacaagtcatctagaacacgcctggccctgattatctgtaatgaggagttcgattctatcccgaggcgaaccggggctgaggtagacatcactggaatgaccatgcttctccagaacttggggtattccgtggatgtgaaaaagaatctgactgccagtgatatgaccaccgaacttgaagctttcgcccatcggccagagcacaagaccagcgacagtactttcctggtatttatgtctcacggaatacgcgaaggcatctgtggcaaaaagcatagcgaacaggtgcccgatattctgcagttaaatgcgatcttcaacatgctgaacaccaagaattgtcccagcctgaaagataaaccgaaagtcatcattattcaggcatgccgtggtgattcacccggagttgtttggttcaaggatagcgttggtgtttccgggaatctgagtctgcccacaaccgaggagtttgaggacgatgctataaagaaagcccacatcgaaaaggatttcattgctttctgctcttctacgcctgataatgtgagttggaggcacccaacaatggggtccgtgtttattggtcggttgatcgaacacatgcaagaatacgcttgttcctgcgacgttgaagaaatcttccgcaaggtgcggttctcctttgaacagcccgatggtcgcgctcagatgcccacaacagaacgggtcacgctgactcgctgcttttacctgtttccaggccactag

SEQ ID NO: 27769 - DNA, 792 bp, synthetic construct
  misc_feature 1..792: note = Description of Artificial Sequence: Synthetic coding sequence
  source 1..792: mol_type = other DNA
atggcggacaaagtgctgaaagaaaaacggaagctgttcatcagatcaatgggcgaagcccctcaggcagttcaggacaatcccgcaatgcctacttcctcaggaagcgagggcaatgtgaagctctgttccctggaggaggcccaaagaatttggaaacagaaatctgctgaaatataccccattatggataagagctcacgaactagattggccttaattatttgtaatgaggagttcgacagcattccacgaagaacgggcgctgaagttgatatcacaggaatgaccatgctccttcaaaatctcggttactctgtggacgttaaaaaaaatctaaccgcctccgacatgaccaccgagcttgaagcattcgcgcaccggcctgagcacaagacctcagactctaccttcctagtgttcatgtctcacgggatacgcgagggtatctgcggtaaaaaacattctgaacaagtgcccgacatactccagctaaacgctatttttaatatgctgaatactaagaactgccctagtctgaaggacaaacccaaggttataatcattcaggcctgtcgcggagataatgtctcctggagacaccctactatgggctctgtcttcatcggccgactgatagagcatatgcaggagtacgcctgctcttgtgacgtggaagagatttttagaaaggttcgcttttcttttgaacaacccgatggcagggcccagatgccgacaacagaacgcgtgacgcttaccagatgtttttatctcttccccggacactag

SEQ ID NO: 27770 - DNA, 1152 bp, synthetic construct
  misc_feature 1..1152: note = Description of Artificial Sequence: Synthetic coding sequence
  source 1..1152: mol_type = other DNA
atggccgacaaggttttgaaggaaaaacgcaaactctttattcggagtatgggagaaggaactattaacggcctattggacgaactccttcaaaccagggttctgaataaagaagaaatggaaaaggtcaaacgggagaatgccacggttatggacaagacaagagctctaattgatagtgtgatccccaagggggctcaggcctgccagatctgtattacctacatatgtgaggaagacagttatttggccggtacactcggcctgtccgccgcaccgcaggccgtgcaagataatcccgctatgcccacatcaagcggatccgagggtaacgtgaagttatgctcactggaagaggcccagaggatttggaagcaaaagtccgccgaaatatatcctatcatggataaaagctctcgtaccagactggcactgataatatgcaacgaggaattcgactctattccaaggcgcacgggcgcagaggtagacatcacagggatgactatgctgctccagaacctcggctacagtgttgacgtcaaaaaaaatcttacggcttctgatatgactaccgaactggaagcgttcgcccatcgcccagagcacaaaaccagcgattcaacattcctggtttttatgtcccacggaatcagggaagggatctgcgggaaaaaacatagtgaacaggttcctgacattctgcaactaaacgctatttttaacatgctgaacacgaagaattgcccgtcattgaaggataaaccaaaagtgattattatccaggcatgccggggtgattctcccggtgtagtatggtttaaagactctgtgggtgtatctggcaacctcagcctccccaccaccgaggagttcgaggacgatgcgattaagaaagcccacattgaaaaagacttcattgctttttgctcctctacacctgacaacgtctcctggagacacccaacaatggggtctgtttttattggacgtctgattgagcatatgcaagagtacgcttgctcctgtgatgtggaagagatattccgaaaggtccggttctccttcgagcagcccgacggtagagcccagatgcccaccacggaacgcgtgacacttactcggtgcttctatctcttcccaggccattag

SEQ ID NO: 27771 - DNA, 936 bp, synthetic construct
  misc_feature 1..936: note = Description of Artificial Sequence: Synthetic coding sequence
  source 1..936: mol_type = other DNA
atggctgacaaagtcttgaaggagaagagaaaactgtttatcaggtccatgggcgaagctccgcaagcagttcaagataacccggctatgccgaccagcagcggctctgaaggaaacgtgaagctgtgttccttggaagaagcccaacgcatctggaaacagaagtcagccgagatataccccatcatggataagtccagcagaactagactggcactcatcatttgtaacgaggaatttgattccatccccagaaggaccggagccgaagtagacatcaccggtatgacaatgcttttgcagaacctcgggtattcagtggatgtcaagaagaacttgactgcttcagatatgactactgaactagaagcttttgcgcacaggccggagcacaagacttctgacagtacttttctggtgttcatgtcacacggaatcagagagggcatatgtgggaaaaaacattcagaacaggttccggatattctccagcttaacgcaattttcaatatgctaaacacaaaaaactgcccctccctcaaagataagcctaaagtgataatcattcaggcctgtcgaggcgacagcccgggagttgtatggtttaaggactccgtcggagtgtctggcaatttaagtctccctaccactgaggaatttgaagatgatgccatcaaaaaggcacacattgagaaagactttatcgcgttctgctcttctactccggacaatgttagttggcgccaccccaccatgggctccgtattcatcggaagactgatcgagcacatgcaagaatacgcgtgttcctgcgacgttgaagagatcttccggaaagtacgcttttcctttgagcaaccagatggccgagcccagatgcccacaactgagcgagtgactctgactaggtgtttttatttgtttcccggacactag

SEQ ID NO: 27772 - DNA, 906 bp, synthetic construct
  misc_feature 1..906: note = Description of Artificial Sequence: Synthetic coding sequence
  source 1..906: mol_type = other DNA
atggagaaggtgaagcgggagaacgccaccgtgatggataagacgagggccttgatagacagcgtaatccccaaaggggctcaggcctgccaaatttgcatcacatatatttgcgaggaagatagttatctggcaggcacactgggccttagcgctgatcagacgtccggtaactacctcaacatgcaggattcccaaggtgtattgtctagcttccccgcacctcaggctgtgcaggataatccagcgatgccaacctcaagcggaagtgagggcaacgttaaactgtgcagcttagaggaggcacagcggatttggaagcagaagagcgccgagatttatcccattatggataaatccagccggacccgcctcgcacttatcatctgcaacgaagagtttgattcaatccccaggcgcactggcgctgaggtggacattaccggcatgactatgctcctccagaatttgggatactcagtggatgtgaagaagaacctaacggcttctgatatgacaacggagttagaagctttcgctcacaggccggaacacaagacctctgattctacattcctcgtcttcatgagccatggaattcgcgagggcatatgcggaaaaaagcactctgagcaggtgccagacattctgcagctgaacgcgatcttcaatatgctgaacacgaaaaactgtcctagtctgaaagataagcccaaagtgatcataatccaggcctgtaggggcgattcaccaggtgtcgtgtggttcaaggatagcgtcggtgtgtcaggaaacctgtccctgcccacaactgaagagttcgaagacgacgctatcaaaaaggctcatatcgagaaggactttatagccttttgcagtagcacccccggtaagtcccagagttag

SEQ ID NO: 27773 - DNA, 333 bp, synthetic construct
  misc_feature 1..333: note = Description of Artificial Sequence: Synthetic coding sequence
  source 1..333: mol_type = other DNA
atggcagacaaggtgctcaaggagaagagaaaactgtttatacggagtatgggcgaggggaccatcaatggtctcctcgatgagctgcttcaaacgcgggttctgaacaaagaagaaatggagaaagtcaagagggagaatgcgacagtgatggacaagacaagggccctgatcgactcggtcatccccaagggagcgcaggcctgtcagatctgtattacatacatctgcgaagaagattcttatttggccggtacgttgggactcagtgctgatctgtccaacaatgggcaagttaaacctcatacctcctgcagtcattacctgcagtag

SEQ ID NO: 27774 - DNA, 267 bp, synthetic construct
  misc_feature 1..267: note = Description of Artificial Sequence: Synthetic coding sequence
  source 1..267: mol_type = other DNA
atggccgacaaggtgttgaaggaaaagagaaagctctttatccgctctatgggcgaggacaacgtttcatggcgccacccaaccatgggatccgtcttcatcggtagactgatcgagcacatgcaagagtacgcctgtagctgtgatgtcgaggagatctttcggaaggtgcgctttagtttcgagcagcctgacggcagggcacaaatgccaacaaccgaacgggtcaccttgactcgatgcttctatctgtttccagggcattag

SEQ ID NO: 27775 - DNA, 1215 bp, synthetic construct
  misc_feature 1..1215: note = Description of Artificial Sequence: Synthetic coding sequence
  source 1..1215: mol_type = other DNA
atggccgataaagtgctgaaggagaagaggaagcttttcattcggagcatgggcgaagggaccatcaacggactcctggatgagctgctgcagacacgagtgctgaataaggaggagatggaaaaagtcaaaagagagaacgccaccgtcatggacaagacacgggcactgattgacagcgtcatcccaaagggtgcgcaggcttgccagatttgcataacctacatatgcgaagaagatagttatctggccggtacgctggggttatcagcagatcagactagcggcaactaccttaacatgcaggacagtcagggcgtactctccagcttcccggctccccaggccgtgcaggacaatccagccatgcccacctcctccggcagtgagggcaacgtgaagctgtgctccctggaggaggcgcagcgaatctggaagcagaagtctgccgaaatctacccaatcatggataagtcctccagaactaggctggccctgattatctgcaatgaggagttcgacagcattcctcggaggaccggggctgaggtcgacattactggaatgacgatgttactccaaaacctgggttatagcgtggatgtgaagaagaatctgacagccagcgacatgacaactgagctggaggccttcgcccatagacctgagcataagacgtctgattccacttttctggtctttatgtcgcatggtatccgcgagggtatctgcggcaagaaacacagtgaacaggtgccagatattcttcaactgaatgctattttcaatatgctcaacactaaaaactgtccctcgctcaaagataagcccaaggtgattattatacaggcttgccggggagattcaccaggtgttgtgtggttcaaggacagtgtgggagtctctggaaatctctcactgccaactacggaagagtttgaagatgatgcaattaaaaaggcacacatcgaaaaagattttattgcgttctgcagctctacccccgacaacgtgtcctggaggcacccgacgatgggcagcgtgttcatcggaaggcttattgagcacatgcaggaatatgcatgttcttgtgacgtcgaagagatttttcgcaaggtgaggttcagttttgaacaacccgacggtagggcccagatgcctactacagaaagagtgactctgacaaggtgcttttacctgtttccaggacattag

SEQ ID NO: 27776 - DNA, 792 bp, synthetic construct
  misc_feature 1..792: note = Description of Artificial Sequence: Synthetic coding sequence
  source 1..792: mol_type = other DNA
atggcagataaagtgttgaaggagaaacgaaagctctttatccgttccatgggcgaggcccctcaggcagtccaagacaatcccgctatgcctacctctagcggatccgaagggaatgtgaagctctgcagtttggaagaggcacagcgtatctggaaacaaaaatccgccgagatttatccaataatggataagagcagtagaacgagactagcgctgattatctgcaatgaggaattcgattctattcctcgcagaaccggtgccgaggtggatataaccggaatgactatgctgttacagaacttagggtatagcgtcgatgtgaagaagaacctgaccgcgagcgacatgactaccgaactggaggcattcgctcatcggcctgagcacaaaactagtgactccactttcctggtgtttatgtcacacggcattcgcgagggtatttgtgggaaaaagcatagtgagcaggtgcccgatatcctccagcttaatgctatattcaatatgcttaatacaaaaaactgtccgtcactgaaggataagcctaaagtcatcatcatccaggcctgccggggagacaatgtttcctggcgccaccccaccatggggtctgtattcatcgggcgtttgatcgagcatatgcaggagtacgcttgttcctgcgatgtggaggaaatatttcgtaaggtcagattttcctttgagcagcctgatgggcgagcacagatgcctacgacggaacgcgttacgttgacccgctgcttctatctgttccctggacattag

SEQ ID NO: 27777 - DNA, 1368 bp, synthetic construct
  misc_feature 1..1368: note = Description of Artificial Sequence: Synthetic coding sequence
  source 1..1368: mol_type = other DNA
atgaagagtcagggacagcactggtactctagctcggataagaactgcaaagtctccttcagagagaaactgttaataattgactcaaacctgggtgtccaagatgttgagaatctcaaattcttatgtatcggccttgttccgaataaaaaactggaaaagagctcaagcgcaagcgatgtgttcgagcacctgttggccgaggacttgctttctgaggaggatcccttctttctggccgagcttttgtatatcatacggcagaaaaagctgctgcaacatctcaactgcactaaggaagaggtggagcggctgcttccaaccaggcagagggtgtctctgttccgcaatcttctgtacgaattaagcgaaggaatcgactcagagaatctgaaagatatgatcttcttgcttaaagacagtttgcctaaaacggagatgacctcactgagttttctagcattcctggagaaacagggcaaaatcgacgaagacaacctgacttgcctcgaggacctgtgcaaaacagtggtgccaaagctgttgagaaatatcgaaaagtataaaagggagaaagctattcagattgtgacaccaccggttgacaaagaggccgaatcctatcagggagaagaggaactggtcagccagacagacgttaagacatttctcgaggccctgccccaggagtcatggcagaacaagcatgcgggatctaatgaaatcttgagccacgtgtttcaatggcttggatttacagtgcacattcacaacaatgtcaccaaggtggaaatggagatggtactgcaaaaacagaaatgtaaccccgctcatgctgatggcgactgctttgtcttctgtatattaacccacggcaggtttggagctgtgtattctagtgatgaggcgctgatccccattcgggagataatgtcccattttactgccctccaatgccctagactagccgaaaagcccaagctcttcttcatccaagcttgccagggggaagagattcaaccatccgtgagcatcgaagctgacgctcttaaccccgagcaggctcccacctccctgcaggactccatacctgccgaagctgattttttgctgggccttgctaccgtgcctggttatgtatcatttcggcacgtcgaagaggggtcttggtacatccagtccctgtgcaaccacttgaaaaaactcgtcccccgacacgaggacatactatccatcctcactgcggtgaatgatgacgtcagccggagggtcgacaaacagggcacaaagaagcagatgccccagcctgccttcacacttcgaaaaaaacttgtgttcccagtgccactagatgctttatcactgtag

SEQ ID NO: 27778 - DNA, 1437 bp, synthetic construct
  misc_feature 1..1437: note = Description of Artificial Sequence: Synthetic coding sequence
  source 1..1437: mol_type = other DNA
atgaagtcacagggacagcactggtactcctcgagtgataagaactgcaaggttagcttccgtgagaagctgttgattatagactcgaacctgggagttcaagatgtcgaaaacctgaaatttctgtgtattggcctggtgcccaacaaaaagttggagaagtcctcttcagctagtgatgttttcgaacatttgctcgccgaagacttgctgagcgaggaggaccccttcttcctggcggagctgctgtacataatccgacaaaagaagctgctccagcacctgaactgcactaaggaggaggtggaacgtctgctcccaacaagacagagagtgagcttgttccgcaatcttttatacgagctgagtgaaggaatcgactcagaaaatctgaaggacatgatcttcttacttaaggattccctgcctaaaacggaaatgactagccttagcttcttggcttttctcgaaaaacaaggaaaaattgacgaggacaatctgacgtgtttagaagatctttgcaagactgtcgttcctaaactgttgcggaacatcgagaaatataagcgggagaaagccattcagattgtcaccccacctgtggataaggaggcggagagttaccagggtgaggaagagctggtgtcccagaccgacgtgaaaacttttctcgaggccctgcctagagccgcagtttatagaatgaaccgaaaccaccggggtctgtgcgttatagtgaacaaccatagtttcactagtctgaaggatcgacaaggcacacacaaggacgctgaaattctgagccacgtgttccagtggcttggctttacagtccacatccataataacgtcactaaggtggaaatggagatggtccttcagaaacagaaatgcaatcctgctcatgccgatggagattgctttgtcttttgtatcctgacgcatggaaggttcggagccgtgtattcctccgacgaggcgttgataccaatccgcgaaataatgagccattttacggcgctacagtgtccacgtctcgctgagaaaccaaagctgtttttcatccaagcctgtcagggggaggaaatccaaccaagcgtgtctattgaagcagacgcgttgaaccccgaacaggcacccacaagtctccaggacagtataccggctgaggccgatttcctcctgggcctggctacagtgcccggatacgtttccttcaggcacgtggaggaaggaagctggtatattcagagtctgtgcaatcatctcaaaaagctggtgccacgcatgttaaaatttctcgaaaagaccatggagatccggggtcggaagaggacggtgtggggagcaaagcagatatcggccacgtcactgcccacagccatctctgctcagaccccccgacccccaatgagaaggtggtcttctgtgtcctag

SEQ ID NO: 27779 - DNA, 1566 bp, synthetic construct
  misc_feature 1..1566: note = Description of Artificial Sequence: Synthetic coding sequence
  source 1..1566: mol_type = other DNA
atgaaatcccagggacagcactggtatagtagtagcgacaagaattgcaaagtatcttttagagagaaactgttgattatagactccaatctaggtgtgcaggatgtggagaacctgaaattcctttgcattggcctggttcctaataaaaaactggaaaagtcaagctccgcctcagacgtgttcgagcacctcttagctgaggatttgcttagcgaggaagatccatttttcctggctgaactgctctacatcatacgccagaagaaactgttacaacacttgaattgcaccaaggaagaggttgaacgcctcctccccactcgacaacgggtcagtttgttcagaaacctgctttacgagctcagtgagggcattgactccgaaaacttgaaagatatgatctttctgctgaaggacagtttacctaagaccgaaatgacatcgttgtctttcctcgccttcttggaaaagcagggtaagatcgatgaggataacttgacctgcctggaggacctctgtaaaaccgtcgtgcccaaactcctgcgcaatatcgagaaatataagcgcgaaaaagcaatccagatcgtgacaccacccgtcgataaggaagctgagtcttaccaaggagaggaggagctggtaagtcagacagatgttaagacatttctagaggcactgccacaggagagctggcaaaacaagcatgccggaagtaacggtaacagagccaccaacggtgctccaagcctggtgagccgtgggatgcagggtgcctcagctaacacactgaattctgagacttcaacaaaacgggctgcagtctatcgaatgaatcggaaccacaggggactctgcgtgatcgtgaacaatcacagttttacgtctttgaaagataggcaaggcacccacaaagatgccgaaatcctgagccatgttttccaatggctagggttcacagtccacatccacaataacgttaccaaggtcgagatggaaatggtcctccagaagcagaagtgcaaccccgctcatgctgatggcgattgtttcgtgttctgcattctgacacacggcaggtttggcgctgtgtactcctccgacgaggctttgatacctattcgggagattatgtcacatttcactgctctacagtgtccccgactcgccgagaagccaaagctgtttttcattcaggcctgccagggggaagaaattcagccttctgtttctatcgaggctgacgcgctgaatcccgagcaagcgcctacctcactgcaggactcaatcccagccgaggctgattttttgctgggccttgcaactgtaccgggatatgtgagtttcagacacgtagaagaaggttcatggtacattcagtccctctgtaatcacttaaagaaactggtgcccagaatgttaaagttcttggagaaaactatggagatccgcggtaggaagcggacagtatggggggctaaacagataagtgctacttcactcccaactgctatctcggctcagaccccgcgacccccaatgaggcggtggtcttctgtgagttag

SEQ ID NO: 27780 - DNA, 1569 bp, synthetic construct
  misc_feature 1..1569: note = Description of Artificial Sequence: Synthetic coding sequence
  source 1..1569: mol_type = other DNA
atgaaaagtcagggtcagcattggtactcttccagtgataaaaattgtaaagtctcattcagggaaaagctgttgatcatcgattccaatctgggtgtccaagatgtcgagaatcttaagttcctgtgcattgggctcgtgcctaataagaaattagaaaaaagtagctccgcgagcgacgtatttgagcacctgttggctgaagacctactgagtgaggaagacccttttttcttagccgagcttctatatattattcgacagaaaaaattgctccaacacctcaactgtacgaaggaagaagtcgaacgcttgctgcctactcgccagcgggtgtcactttttaggaacctgctgtatgagttatccgaaggcatcgattcagagaacctgaaggacatgattttccttttaaaggattctctccctaagacggaaatgactagtctcagtttcctggcattcctggagaagcagggaaaaatcgacgaggacaacctcacatgcctggaggacttgtgcaagacagtggtgccaaaactgctacgaaacatagagaaatataaacgggaaaaggctattcaaatcgtcacacccccagtggacaaagaggcggaatcctaccagggcgaagaggaactggtgtcgcagacagacgttaagactttcttagaggccctgccgcaggaatcgtggcagaataaacacgccggatccaacggaaatagggcgacgaatggggcaccaagcctggtgagtaggggaatgcaaggcgctagcgccaacaccttaaatagtgaaaccagtacaaaacgagcagctgtttataggatgaaccgcaaccatagagggttgtgcgtcatcgtgaacaaccattcatttacttctctgaaggaccggcagggcacccacaaggacgcagagatcctgagccatgttttccagtggctgggtttcacggtgcacattcataacaatgtgaccaaggttgaaatggagatggtcctgcagaagcaaaaatgcaatccagcacacgctgacggagactgtttcgtgttctgcatattgacccatggcaggttcggcgctgtgtactcttcagatgaggccctgatacccattagggagatcatgagccatttcacagccctacagtgcccaaggctagctgaaaaaccgaaactgttctttatccaggcttgccagggcgaggagattcaaccaagcgtgtctatagaagcagatgcactgaaccctgagcaagcacccaccagtctgcaggactctatacccgctgaagccgattttttactagggctggccaccgtgcccggatatgtctcatttaggcatgtggaggagggatcttggtatatccagagtttgtgtaatcatttgaaaaagctagtgccaagacacgaagacattctgagcattctcacggccgtcaatgacgacgtatcccgacgagttgacaaacagggtaccaagaaacagatgccccagcctgcctttacacttagaaaaaagctcgtgttccctgttcccctcgacgccctcagcctgtag

SEQ ID NO: 27781 - DNA, 1440 bp, synthetic construct
  misc_feature 1..1440: note = Description of Artificial Sequence: Synthetic coding sequence
  source 1..1440: mol_type = other DNA
atgaagtctcaggggcagcactggtacagcagttcagacaagaactgtaaggtctcatttagagaaaagttgctgatcatagatagcaatctgggagtgcaggatgtggagaaccttaagttcctgtgtatcgggttagtgcccaacaagaaactggagaaatccagctccgctagcgatgtgttcgaacatcttctggctgaagacctcttatctgaggaggatcctttcttcttagcagaactcctttacatcattcgccaaaaaaaacttttacagcatctgaactgtacaaaggaggaggtcgagcggttactcccaaccagacaaagggtatctttgttcaggaatctactgtatgaactgtccgaagggattgatagtgaaaaccttaaagatatgattttcttgcttaaggacagtctgcccaagacagagatgactagcctgtccttccttgcattcctagagaagcaagggaagatagatgaggacaatctgacctgtctggaagacctgtgcaagacagtcgttcccaagttgttgaggaatatcgaaaaatataaaagagaaaaagctatccagatcgtcacaccacccgtcgacaaagaggcggagtcttatcagggtgaggaagaactggtgtcccaaactgatgtgaaaacatttttggaagccctgcctcgggcagccgtgtatcgaatgaatcgcaatcaccgaggcttgtgcgtgattgtcaacaatcattccttcacttctcttaaagacaggcagggaacacacaaggacgctgagatcctctcacacgtcttccagtggctgggatttacagtgcacatccataataacgtgaccaaggtcgagatggagatggttctccaaaaacaaaagtgtaatcctgcacatgccgacggcgactgctttgtgttttgtatcttaactcatggacgctttggcgctgtctacagtagcgacgaagccttaatacccatccgggagatcatgtctcactttaccgccctccaatgcccccgactggccgaaaagccaaagctatttttcattcaggcctgtcagggcgaggaaatacagccatctgtctccattgaggctgatgctttgaaccctgagcaagcaccaactagcctgcaggatagtattcctgcagaagccgacttcctgctcgggctcgctacagttccgggatacgtgagctttaggcacgtggaggagggctcatggtacatccagtccctgtgcaatcatttgaaaaaattggtaccacgccacgaagatatcctgtccatactgactgccgtcaacgacgacgtcagtagaagggtggataagcagggcaccaagaagcagatgcctcagcccgcattcacattaaggaagaagctcgtcttcccagttcccctggacgctttgagcttgtag

SEQ ID NO: 27782 - DNA, 822 bp, synthetic construct
  misc_feature 1..822: note = Description of Artificial Sequence: Synthetic coding sequence
  source 1..822: mol_type = other DNA
atgaaaagccagggccagcactggtatagcagcagcgacaaaaactgcaaggtctccttccgggagaagctactcatcatcgatagcaatctaggagtccaggatgtggagaacctaaaatttttatgtataggcctggtccccaacaaaaaactcgagaagagcagtagcgccagcgacgtctttgagcatctgctggccgaagacctactgagcgaagaagatcccttctttctagccgagttactttacattatcagacagaaaaagctactgcagcacctgaattgtacaaaggaagaagtggagagactcctgccaacacggcagcgtgtgagtctgtttcgcaacctgctgtatgagctcagtgaaggcattgactctgagaaccttaaagatatgatattcttgctgaaagactccctccccaaaaccgaaatgacatcattgagtttcctggcttttctggagaagcagggcaagattgacgaagataacctcacctgcctggaggacctgtgcaagacggttgttccaaaacttctgcggaacatagaaaagtacaagcgggagaaggcaattcaaatagtgacccccccagtggacaaggaagccgaaagctatcagggggaagaagagctcgtttctcagacagatgtgaagacgttcctggaggctttaccccaggagtcctggcagaacaagcatgcaggctcaaatgaaggctcctgtgtgcaggacgagagtgaaccacaacggccactgtgtcactgccagcaacctcagctctacttgcccgaggggcagacgaggaatccatag

SEQ ID NO: 27783 - DNA, 1533 bp, synthetic construct
  misc_feature 1..1533: note = Description of Artificial Sequence: Synthetic coding sequence
  source 1..1533: mol_type = other DNA
atggccgcagctgcccttcgggatcctgcacaggtgccggttgccgcagacttattaacagaccacgaggaaggatacgtaactttcgaggatgtagccgtttacttttcacaggaggagtggagactcctcgatgacgcccaacgactgctgtaccgaaatgtgatgcttgaaaattttactctgctggctagtctcggcttggcttcctccaagacccatgagatcacccaactggaatcatgggaagagcctttcatgccagcctgggaggtggtcaccagcgctatcccaagaggttgctggcacggggctgaggctgaggaggccccagagcagatagccagtgtcggcctgttgagtagcaacatccaacagcatcagaagcaacactgcggcgaaaaaccactgaagaggcaggaaggacgggtacccgtgttgcgttcttgtaaggtgcacctgagcgagaagtccctgcaaagcagggaggttggaaaagcactgcttattagttccggggtccttaaacaccaggtgacccatactggtgagaaatctcacagatcttccaaaagtcgtgaggccttccacgccggaaaacggcattacaaatgtagtgaatgtggtaaagcatttggtcagaagtacttgctggtccaacatcagcggcttcatgcaggtaagaagacctacgaatgttcagaatgcggtaagctgtttcgggacatgagcaatttgttcattcatcaaatagtgcatacgggtgagagaccatacggctgcagcaactgcggaaagtccttttcccgcaatgcccatttaatcgagcatcagcgagtccacaccggagagaagccttttacctgtagcgaatgtggaaaggcttttcggcacaattccacccttgtacagcaccataagatacataccggtgtgaggccctatgaatgctctgagtgcggcaaactattctcttttaacagctcgctgatgaagcatcagcgcattcacacaggggagaggccctacaaatgctctgaatgcgggaaattctatagtcataaatctaacctgatcaagcattggagggtccacaccggtgaacgcccatacaagtgttctgattgcggaaagttttttacgcagtgttctagccttatgcagcaccaaaaagtgcacaccggggagaaacctttcaaatgcaatgagtgcgggagattctttagggagaacagtaccttggtgcgacaccagagggttcatacgggcgctaaaccgtacgagtgcagagagtgtggaaaatttttttcccagtcctcaactctgatgcagcacagaaaggtgcacatcggagaaaaaccctttaagtgcaatgagtgtggaaggctgtttagagagaactctagcctggtgaaacaccagagagtacacactggggcaaagccatacgaatgcagagaatgcgggaagttctttcgccataactccagcctgtttaagcacaggcgcatacacactggtgaaatgcagtag

SEQ ID NO: 27784 - DNA, 729 bp, synthetic construct
  misc_feature 1..729: note = Description of Artificial Sequence: Synthetic coding sequence
  source 1..729: mol_type = other DNA
atgtctaatccacggtctctcgaggaggaaaaatatgacatgagcggtgctcgtcttgctctaatcctctgcgtgacaaaggctagggagggatcagaagaagacctggacgcgctagagcatatgttccgccaactacgcttcgagtcaaccatgaagcgcgatcccacagccgagcaatttcaagaggaactcgagaagttccagcaggccatcgattcccgtgaagatcctgtgtcttgtgctttcgtggtgttaatggcacacgggagagaggggtttttgaagggagaggacggcgagatggtcaagttagaaaacctgttcgaggcgctcaataacaaaaattgtcaagctctccgggctaagccgaaggtgtatattattcaggcctgccggggtgagcagagagaccccggagagaccgtgggcggtgacgagatcgtaatggtgatcaaggactctccacagaccattcccacctacaccgatgctttacatgtctatagtactgtggaagggtatatagcctaccgccatgatcagaaaggctcttgctttatacagacactggtggacgtgtttacgaagaggaaagggcatatcctggagctgctgacagaagtgacaagacgcatggccgaggctgagttagtgcaggagggaaaggcacgcaaaacaaatccagagatacaaagcacactgcggaagaggctctacctccagtag

SEQ ID NO: 27785 - DNA, 1359 bp, synthetic construct
  misc_feature 1..1359: note = Description of Artificial Sequence: Synthetic coding sequence
  source 1..1359: mol_type = other DNA
atggctgcgccatcagcgggatcatggagtacatttcaacacaaagagctcatggcggcagataggggaagacgtatcctcggcgtttgcgggatgcaccctcaccatcaagaaacacttaagaagaatcgagtcgtgctcgccaagcagttgctgttgtcagagctgctagagcatttgctggagaaagacatcatcacgttggagatgagggaactcatccaggccaaggttggatccttttctcagaatgtcgagctgctgaacctgctccctaaacggggaccccaggcattcgacgctttctgtgaagcgcttcgagagacgaagcagggacacctagaagacatgctgctaactaccctgagcggactgcaacatgtcttgccccctttgtcttgtgattacgacctcagcctaccctttcccgtgtgcgaaagctgcccactctataagaaacttcgattgtccaccgataccgtggaacactctttagataacaaggatggcccagtgtgcctccaggtcaagccatgcacccccgaattctaccagacccattttcaactcgcctatcgcttgcagagtcggcctcgaggactcgctctagtgctgagcaacgtgcactttactggggaaaaggagttggagtttaggagtggcggtgatgtggaccactctactcttgtcacactatttaaactgctcgggtatgatgtccacgtgctatgtgaccaaactgcccaggaaatgcaggagaaattgcagaacttcgctcagctccctgcacatcgcgtgacagactcttgtatcgtggccttgctgtctcacggggtggagggggctatatatggagtggatggtaagttgctgcaactccaggaagtgtttcagctgtttgataatgcaaactgtcctagtctccagaataagccaaaaatgttttttatccaggcttgccgtggcgatgagacagataggggagtcgaccagcaggatgggaaaaaccatgctggttctccgggatgtgaggagtccgacgcaggcaaagagaaactccccaaaatgagattaccaacacgtagtgatatgatatgcggctatgcatgtctgaagggcactgccgcaatgcggaacacaaagcgcggatcctggtacatcgaagccctcgcccaggtgttctcagagcgcgcatgcgacatgcacgtggctgacatgctggtgaaagtgaacgctctgatcaaggatagagaaggatatgcacccggtaccgaatttcataggtgtaaggaaatgtccgagtactgcagtaccctttgccggcacctttatctgttccctgggcatccccctacctag

SEQ ID NO: 27786 - DNA, 327 bp, synthetic construct
  misc_feature 1..327: note = Description of Artificial Sequence: Synthetic coding sequence
  source 1..327: mol_type = other DNA
atggcagcgccatcagcaggctcctggtcaacctttcagcacaaggagctcatggcagcagatcggggaaggcgaatcttgggagtctgcggcatgcacccgcaccatcaggagacgctgaagaaaaatcgggtggtattggccaagcagctgttgttaagcgagctgctggagcatctgctcgagaaggatatcatcactctggagatgagggagctcatccaggccaaggtagggtccttcagtcagaacgtcgagctgttgaacctcctgcctaagcgaggccctcaagcctttgacgccttctgcgaggcccttcactcatag

SEQ ID NO: 27787 - DNA, 942 bp, synthetic construct
  misc_feature 1..942: note = Description of Artificial Sequence: Synthetic coding sequence
  source 1..942: mol_type = other DNA
atgcacccccaccatcaggagacacttaaaaagaaccgcgtggtcctggcaaagcagttgctgctgtcggaactgttggagcacttgctggagaaggacattatcacgctcgaaatgcgggagctgatacaagcgaaggtaggctccttctctcagaatgtggaactcctaaatctgcttccaaagcgtggccctcaggcgtttgatgccttttgcgaggctctcagggagaccaaacagggacacctggaagacatgttgcttaccaccctctcaggcctgcagcacgtgctaccaccgctctcatgtgactacgacctttccctgccatttccagtctgcgagtcttgtccgctgtataagaagttgaggctctcaacagatacggttgagcatagcttagataacaaggacggacccgtttgcctgcaggttaagccctgtactccagaattttaccagacccatttccagctcgcctatcgtctgcagagcagaccaagggggctggccctcgtgttatccaacgttcacttcacaggggagaaggagctggagttccgcagcggcggagacgtggatcacagcacactcgttactctttttaagctactgggttatgatgttcacgttctttgtgaccagactgcccaggagatgcaggagaagctgcaaaactttgcccagttgcccgctcacagagtgaccgatagctgcattgtcgctctgctatcacacggtgtggagggagcaatctacggcgtcgacggtaaactcctgcagttacaggaagtgttccagctgttcgataatgctaattgtcccagcctgcaaaataagcctaaaatgtttttcattcaggcctgtcgcggagccggtgcaataggatcgctgggccatctgctgttgttcactgctgccaccgccagcctcgctctctag

SEQ ID NO: 27788 - DNA, 993 bp, synthetic construct
  misc_feature 1..993: note = Description of Artificial Sequence: Synthetic coding sequence
  source 1..993: mol_type = other DNA
atgcttaagctgaaaacgaaattcgggagttggcaaactctttgcaagaggagcaatgtctggcaggacaaatgcttcttcaagccgtttaacatcgaccagataagtccaaataaaaaggcccatccaaatatggaggcaggccctcctgaaagtggggagtccactgatgccctgaaactttgtccccacgaagaattcttgcgactgtgtaaggaacgcgcagaggaaatctatcctatcaaagagaggaataatcgcaccagactcgccttgatcatctgtaacaccgaattcgaccatctccctccccgaaatggagcggattttgatattactggtatgaaggaactgctggagggcctcgactacagtgttgacgttgaggagaacttaaccgctcgtgacatggagtccgcccttcgagcgttcgctacccggccagagcataagtcttcagactcaactttcttggttcttatgagccacggcatcttggaaggcatttgtggtaccgtgcacgatgagaagaagccagatgttcttttatacgacacaatttttcaaatcttcaacaacaggaattgtttatctcttaaggataaacctaaggtcatcatcgtacaggcctgccggggagctaataggggcgaattatgggtccgcgatagtcctgcgtctctggaagtagcctcatcacagtccagcgagaacttagaagaggatgcagtatataaaacccacgtcgagaaggatttcattgccttctgtagttccacaccccataatgttagctggcgcgattcaactatgggttccatttttataacacagttaatcacctgttttcaaaaatactcatggtgttgccacttagaagaggtgtttagaaaggtgcagcaatcattcgaaacgcccagagctaaggctcagatgcctacgattgaaaggctgagcatgactcgctatttctacctgttcccagggaactag

SEQ ID NO: 27789 - DNA, 444 bp, synthetic construct
  misc_feature 1..444: note = Description of Artificial Sequence: Synthetic coding sequence
  source 1..444: mol_type = other DNA
atggccgaaggaaaccatcgaaagaaacctttgaaagtgctcgaaagcctgggaaaggacttcctcaccggagttctggataacttagtggagcagaacgtgctgaactggaaggaagaagagaagaagaagtattatgatgcaaagactgaagacaaggttcgcgtcatggccgattcaatgcaggagaaacagcgtatggcaggacagatgcttctccagactttcttcaacatcgaccagatatcgcccaataaaaaggcccacccaaacatggaggccggaccacccgagtcaggcgagagtacggacgctcttaagctgtgcccacatgaggagtttcttaggctgtgcaaagagcgggctgaggagatataccccattaaggaaagaaataacaggacaaggctcgctctcatcatatgcaatacagaattcgactag

SEQ ID NO: 27790 - DNA, 1134 bp, synthetic construct
  misc_feature 1..1134: note = Description of Artificial Sequence: Synthetic coding sequence
  source 1..1134: mol_type = other DNA
atggcggagggaaaccacagaaaaaagccgcttaaggtacttgagtcgctcggcaaagacttcctgacaggcgtgctggataacttagtagaacagaacgtgctgaactggaaagaggaggagaagaagaagtattatgacgcaaagactgaggataaagttagggtgatggccgacagtatgcaggaaaagcaacggatggcgggacaaatgctgctgcagacctttttcaatatagatcagatttctccgaataaaaaggcccaccccaacatggaagcgggacccccagagtcaggggagagtaccgacgcattgaaactttgtccccacgaagaattcctgaggttgtgtaaagaaagggcagaagagatttatcccattaaggaaagaaacaataggacaagactcgcgttaataatttgtaatacagagttcgaccacctgccacctagaaatggcgctgattttgacattactggcatgaaagaactgctcgaggggctagattatagcgtcgacgttgaggagaatcttactgcccgagatatggaaagcgccttgcgcgcttttgctacccggccagaacataaaagcagtgactccactttcctggtcctgatgagtcacggaatattggaggggatctgtggaacagttcacgacgagaagaaacccgacgtgctgctgtatgataccatttttcagatctttaacaaccggaactgtttgagcctgaaagataagccaaaggttatcatcgtccaggcatgccgcggtgccaaccgtggcgagctgtgggtgcgcgacagtcccgcaagcctggaagtggcatcctctcagtccagcgagaatctggaggaagatgccgtttataagacacacgtggagaaggactttatcgccttctgttctagtacacctcacaatgtgtcttggagagattctactatgggctccatattcatcacacagttaattacctgttttcagaaatactcatggtgttgtcacctcgaggaggtgttccgtaaggtgcagcagtccttcgagacgccaagagcaaaagcccaaatgccaaccattgagcgactttctatgactcggtatttttatttgtttcccggtaattag

SEQ ID NO: 27791 - DNA, 1305 bp, synthetic construct
  misc_feature 1..1305: note = Description of Artificial Sequence: Synthetic coding sequence
  source 1..1305: mol_type = other DNA
atggctgaggattctggcaaaaagaagagaagaaagaatttcgaagccatgtttaaaggaattctgcagtctggcctggataattttgtgattaaccatatgctgaagaataatgtcgctggccaaactagcatccagacccttgtgccaaacacagatcagaaatcaacatccgtcaagaaggacaatcacaagaagaagaccgtcaaaatgctggagtacctgggcaaagatgtgctccatggtgtatttaattaccttgccaagcacgacgttctcaccctgaaggaggaagaaaagaagaagtactatgataccaagatagaggataaggcgcttattctcgttgactccctgaggaaaaatcgcgtggcccaccaaatgttcacgcagacactgctcaatatggatcagaagattacgtctgtgaagcctcttctgcagatcgaagccggtccaccggagagcgctgagtctacgaatatacttaagctgtgtcctcgcgaagaattcttgaggctctgtaagaagaaccacgacgagatatatcccatcaagaaacgagaggatagaaggcgactcgctctcatcatttgtaacacaaaattcgaccatctacccgcacgtaacggagctcattatgacattgtgggcatgaagcgcctgctgcaggggcttggttatactgtggtggacgaaaagaacctgacagccagagatatggagagcgtgctgagggcttttgctgcacgtcctgaacacaagtccagcgactccactttcctggtcctcatgtctcatggaattctagaaggcatctgcggcacggcccacaaaaagaagaaacccgacgtcctcctgtatgacaccattttccaaatatttaacaatcggaactgcctaagcctcaaggacaaaccaaaggtgatcatcgtgcaagcttgtagaggcgagaagcatggcgagttgtgggtgagggatagcccggcatccctggcacttatctcttcccagtcttcagaaaacctcgaagcagacagcgtgtgtaagatccatgaagagaaggactttatcgccttttgttcttctaccccacacaatgtgtcttggcgagaccgaacccgcggttctatttttataaccgagctgatcacctgtttccagaagtattcttgctgttgtcatctaatggagatcttccgaaaggtgcagaagtcgttcgaggtgccccaggcaaaagcgcagatgccgacaatcgagcgggctactctgactcgcgacttttacctttttcctggaaattag

SEQ ID NO: 27792 - DNA, 402 bp, synthetic construct
  misc_feature 1..402: note = Description of Artificial Sequence: Synthetic coding sequence
  source 1..402: mol_type = other DNA
atgctaaagaacaacgtagcgggacagacatccatccagaccctagtacccaatactgaccaaaaatccacctcagtcaagaaggacaaccataagaaaaagactgtgaaaatgcttgaatatttgggcaaggatgtgctgcatggtgtgttcaactacctggccaagcatgacgttcttacactgaaggaggaggagaagaaaaagtactatgacacaaaaatcgaggataaggctctgatccttgttgattctttgcgtaaaaatcgggtggcgcatcaaatgtttactcagacactgctgaatatggatcagaaaatcacatctgttaaacatttatcaaataaaaaggagcggggaccccagacccccggtagccaccatatgcagtacaaagtctag

SEQ ID NO: 27793 - DNA, 1344 bp, synthetic construct
  misc_feature 1..1344: note = Description of Artificial Sequence: Synthetic coding sequence
  source 1..1344: mol_type = other DNA
atggcagctgtgccgcgtgtggaaggtgtgttcatcttcctgatcgaggacagcggcaagaagaagcgcaggaaaaatttcgaagctatgttcaagggcattctccaatcaggattagacaacttcgtgatcaaccacatgttgaaaaataatgtggccggacagactagtattcagacgctagtccccaatactgaccagaaatctacctcggtgaaaaaagacaaccataagaagaagaccgttaagatgcttgagtatttgggcaaggatgtgctgcacggggtgttcaactacctggcgaaacatgacgttcttacgctaaaggaggaggaaaagaagaaatattacgacactaaaattgaagacaaagccctaattctcgtagactccctccgaaaaaaccgggttgcccatcagatgttcacacaaaccctcttaaatatggatcagaaaattacttcagtcaagcccctcctccagatcgaagcaggcccaccagagagtgctgaatcaaccaatattctaaaattatgcccacgggaggagtttcttcgactgtgtaagaaaaatcatgacgagatctatcctatcaagaaaagagaagatcgaaggcgtttagcgctgattatatgcaacaccaagttcgatcatctgcctgctcgtaatggtgcgcattatgatattgtggggatgaaacggcttctgcagggtcttggttataccgttgtggatgaaaaaaatcttaccgccagggatatggagagcgtgctgcgtgcgtttgcggcaaggcccgagcataagtcatctgatagcacttttttggttttaatgtcccacggcatacttgaagggatttgtggaaccgctcacaagaagaaaaagcccgatgtactgctgtatgatacaatattccagattttcaataaccgcaactgtcttagtctgaaagataaaccaaaggttatcatcgtgcaggcatgtcgcggtgagaaacacggcgaactgtgggttagggactcaccggctagtctggcattgatttccagccaatcgagtgagaatttggaagctgattccgtctgcaaaattcatgaagagaaggacttcatcgccttttgtagctctactccccacaacgtctcttggcgagatcgcaccagggggagcattttcatcaccgaactgatcacatgttttcagaagtactcatgctgttgccatctgatggaaattttccgtaaagtgcagaagtcctttgaggtgcctcaggcgaaggcccagatgcccactattgaacgggcaacactcacgcgtgacttctacctgtttccaggcaattag

SEQ ID NO: 27794 - DNA, 879 bp, synthetic construct
  misc_feature 1..879: note = Description of Artificial Sequence: Synthetic coding sequence
  source 1..879: mol_type = other DNA
atggcggctctcctgcaaattgaagctggacctccggagagtgcagagtctaccaatatcctaaaactttgccccagggaggagtttctcaggctgtgcaagaagaaccatgatgagatctatccaattaagaaaagggaagatagaaggcggctggcactcataatttgcaatacgaaatttgatcacctcccggcacgtaacggcgctcactacgacattgtgggaatgaagagactcctgcaagggcttggttatacagttgtagacgagaagaatctcaccgccagggatatggagagtgttctgcgggcatttgctgctcgtcccgaacataagtcctctgactctacattcctcgttctgatgagccatggcattcttgaggggatttgtgggaccgcacataaaaaaaaaaagccggatgtactcctctatgatacaatctttcaaatttttaacaaccgtaattgcctttcactgaaggacaagccaaaggtgatcatagttcaggcatgcagaggcgagaagcacggcgagctgtgggttcgagatagcccagccagtctggccctgataagctctcaatcttcagagaacctggaggctgactcagtttgtaaaattcacgaagagaaggacttcatcgcgttttgcagttctaccccgcataacgtgagttggagagaccggaccagaggatcaattttcatcactgagcttatcacatgtttccagaaatactcatgttgttgccatcttatggagattttcagaaaggtccagaagagtttcgaggtgccacaggccaaggcacaaatgcccacaatcgaacgcgcaacattaaccagagatttctatctgtttccaggcaactag

SEQ ID NO: 27795 - DNA, 1131 bp, synthetic construct
  misc_feature 1..1131: note = Description of Artificial Sequence: Synthetic coding sequence
  source 1..1131: mol_type = other DNA
atggcagaagacaaccataaaaagaagacagtgaagatgctagaatatctcggcaaagatgttctgcacggggtgtttaattaccttgcaaaacacgatgtgctgacccttaaagaggaggaaaaaaaaaagtattatgacaccaaaatcgaggataaagctctcatcctcgtggacagtttgcgtaaaaatcgggtggctcaccagatgtttacccagaccttactgaatatggatcagaaaattacctctgttaaacctctgctgcagatcgaagccggacccccagaatctgccgaaagtacaaacatactgaagctctgccccagggaggaattcctgagactctgcaagaaaaatcatgacgagatttaccccattaaaaagcgtgaggatagacggaggctcgcacttattatttgtaataccaagttcgatcacttacctgccaggaatggagctcactacgatatcgtgggcatgaagcggctgctgcaagggcttgggtacacagttgttgacgagaagaacctcactgctagggacatggaatcagttttgcgcgcattcgcagccaggcctgaacataaatctagcgactctacatttctggtcctaatgtcacatggcatattggaaggtatttgtgggacagctcacaagaagaaaaagcctgatgtacttttgtacgacactatctttcaaattttcaataaccggaattgtctgtctctcaaagataagcctaaagtcattatcgtgcaagcctgccgcggtgaaaagcatggcgaactgtgggtgagggactcgccggcatctttggccctaatctcgagccaaagttccgagaatctcgaggctgacagcgtttgcaaaattcatgaggagaaggatttcatcgctttctgctcttccacaccacacaacgtgtcctggcgggacagaacgagaggctctatctttatcactgagttaattacctgttttcaaaaatacagctgttgctgccatctgatggagatattccgtaaagtgcagaagagcttcgaagttccgcaggccaaggcacaaatgcctacaatcgaacgagcaactttgacccgggacttctaccttttcccaggcaattag

SEQ ID NO: 27796 - DNA, 1344 bp, synthetic construct
  misc_feature 1..1344: note = Description of Artificial Sequence: Synthetic coding sequence
  source 1..1344: mol_type = other DNA
atggccgctgtgccccgagtagagggcgtgtttatatttctgattgaagatagtggcaagaagaaaaggcgaaagaacttcgaggccatgtttaaaggaatactacagtccgggctcgacaacttcgttataaatcatatgcttaagaacaacgtcgccggacagacctctatccagaccttggtgccaaataccgatcaaaagtccacatctgtcaagaaggacaaccacaaaaagaagacggtcaagatgctggaatatctggggaaagatgtgcttcatggtgtgtttaactacctggccaaacacgatgttcttaccttgaaggaagaggaaaagaagaagtattatgatactaaaatcgaggacaaggcactgattttagtggatagcctgaggaaaaatcgcgtggcccaccagatgttcacccagacacttctcaatatggaccagaagatcaccagcgtgaaaccactcctccaaatcgaagcaggaccgcctgagtcagctgaaagtacaaacatactgaaactttgcccgagagaggaatttctgcgcctgtgtaaaaagaaccatgacgagatttatcctattaaaaagagagaggatagacgcagactcgccctaatcatctgtaacaccaaattcgatcacctgcccgctcgaaacggcgctcactatgatattgtgggaatgaagcgtctgctgcaggggctgggttacaccgtggtggacgaaaaaaatctaactgccagagatatggagtctgttctgcgggctttcgctgcgcgaccagagcataaaagttccgattctactttcctggtgctgatgagccatgggatcctggagggtatctgcgggaccgcacacaaaaaaaagaaacccgatgttcttttgtatgacaccatctttcagatctttaacaataggaactgcctatcccttaaggataagccgaaagtcatcatcgtgcaggcctgccggggtgagaaacacggagagctatgggtgagggacagccccgcttctttggctctgatctcatcccagtcatccgagaacttggaggcagactccgtgtgtaagattcatgaagaaaaggattttattgcgttctgttccagcacccctcacaacgttagttggagagaccgtacccgaggatccatttttattactgaactgattacctgtttccagaagtattcctgttgttgtcacctcatggaaatttttcgcaaggttcagaaatcctttgaggttccacaggccaaggctcagatgcccaccattgagagagctactttaaccagggatttttatctcttccctggtaattag

SEQ ID NO: 27797 - DNA, 879 bp, synthetic construct
  misc_feature 1..879: note = Description of Artificial Sequence: Synthetic coding sequence
  source 1..879: mol_type = other DNA
atggccgcattactgcagattgaagctggcccaccagagagcgccgaatccaccaatattttaaagctgtgtcctagagaagagtttttgaggttgtgcaagaaaaaccacgatgaaatttacccaattaaaaagcgagaggatagacggcgactggctttgatcatttgcaataccaagtttgatcacctgccagcaaggaacggtgctcattacgacatcgtcggaatgaaacgcttactccagggcctgggttataccgttgtagacgaaaaaaatcttacggcacgcgacatggagtctgtcctgagagctttcgctgccagacccgagcacaaatctagtgatagcacattcctcgtgcttatgtcccatgggattctggaggggatctgtggcactgctcacaaaaaaaagaaacctgatgtcctactgtatgacacgattttccaaatcttcaataatcgaaactgtctttcgctcaaggacaagcctaaggttatcattgtgcaggcttgtagaggcgagaaacacggagagctgtgggtgcgggacagccccgctagcctggcactgatttcaagtcaaagctcagagaatttagaggccgattctgtttgcaaaatacatgaggagaaggatttcatagcattttgttcttcaacacctcataacgtctcatggagagaccgaactagagggtcaatttttataaccgaactaataacctgtttccaaaagtacagttgctgctgccacctgatggagatctttaggaaagtccagaagagttttgaggtaccacaggccaaggctcaaatgccaactattgagcgagctaccttaactcgggacttctacttatttcccggtaattag

SEQ ID NO: 27798 - DNA, 882 bp, synthetic construct
  misc_feature 1..882: note = Description of Artificial Sequence: Synthetic coding sequence
  source 1..882: mol_type = other DNA
atgtcaagtgcatcggggcttcgaaggggacaccccgcagggggtgaggagaatatgacggagaccgacgccttttacaagcgagagatgttcgatccggctgaaaagtacaaaatggatcacaggcggaggggaatcgccctcatcttcaatcacgagcgatttttctggcatctcactctgcccgagaggcgagggacctgcgcagacagagataatttgaccaggagattctcagatctaggcttcgaagtgaagtgctttaacgacttaaaagccgaagaattgttgctaaaaatccatgaagtaagcactgtcagccacgccgacgccgattgctttgtgtgcgtctttctgtctcacggtgaggggaaccatatctacgcttatgatgcaaaaatcgagatccaaactctgactggcttgttcaaaggcgacaagtgccatagtctggtcggcaagcctaagattttcatcatacaggcgtgccgtggaaaccagcacgatgtgcccgtgataccactggacgtcgtagacaatcagactgaaaagctggatacaaacattaccgaggtcgacgcagcaagcgtctatactctgcccgctggtgctgacttcctcatgtgctattcggtcgccgaaggatattacagccaccgggaaacggttaacggtagctggtacattcaggacttatgtgaaatgctgggtaaatatggaagcagcttagagttcactgagctcctgacactggtgaaccggaaggtgtctcaacgtcgcgtcgacttctgtaaagaccccagcgcaattggtaagaaacaggtgccatgctttgcctctatgttgacgaagaagctccacttcttcccaaagagcaattag

SEQ ID NO: 27799 - DNA, 615 bp, synthetic construct
  misc_feature 1..615: note = Description of Artificial Sequence: Synthetic coding sequence
  source 1..615: mol_type = other DNA
atgagctcagctagtgggctgagaagggggcatcccgctgtttccacagtttcccacgctgacgccgactgtttcgtttgtgtttttctctctcacggtgagggtaatcacatttatgcgtacgacgccaaaatcgaaattcaaactctgacaggattgtttaagggggacaagtgtcattccctggtgggtaagccaaaaatcttcatcatccaggcctgccgtggcaaccagcacgatgtccctgtcatccctttagatgtggtcgataatcaaactgagaagcttgatacaaacattactgaggtggatgccgcatccgtgtacacattgccagcaggagcagatttccttatgtgttactctgttgccgagggctactactcacaccgggaaactgtgaacggaagctggtacatacaggacctgtgtgaaatgctgggaaaatatggctccagtctggaatttactgagctcctgactctcgttaatcggaaagtctcacagcgaagggttgacttttgcaaagatcctagcgctataggaaaaaaacaggtgccatgttttgcatccatgttgactaaaaaactccattttttccccaagagcaactag

SEQ ID NO: 27800 - DNA, 912 bp, synthetic construct
  misc_feature 1..912: note = Description of Artificial Sequence: Synthetic coding sequence
  source 1..912: mol_type = other DNA
atggcagatgatcagggttgcatcgaagagcagggggtggaagatagtgctaacgaagattcagtggatgccaagccagatagaagctcattcgtgccctcactctttagcaaaaagaagaagaatgttacaatgcgctccatcaagacgacccgagaccgggtaccaacctatcagtacaatatgaacttcgagaagttgggaaagtgcattattattaacaacaaaaattttgacaaagttactgggatgggggtgcgtaatggcaccgacaaagatgcggaggccctcttcaaatgcttccgctccctcgggttcgatgtcattgtgtataatgattgcagttgtgctaagatgcaagatctcctgaagaaagcatccgaggaggaccacactaatgccgcttgttttgcctgcattttgctttcacacggggaggagaatgtaatctatgggaaggacggcgtgacacccatcaaggatctcacagcccactttagaggagatcgttgcaaaaccctcctcgaaaagcccaagctgttcttcatacaggcctgtcggggtaccgaacttgacgacggtattcaggccgactctggccctatcaatgatacagacgcaaatcccagatataagattcccgtcgaggccgatttcctgttcgcctattccacggtgcctggctattattcatggagaagccctgggcgaggatcctggttcgttcaggccctgtgctccatactggaggaacacggcaaagatctcgagatcatgcaaatactcactcgggttaacgatagagtagccaggcatttcgagtcccagagcgatgacccacattttcatgagaagaagcagattccatgtgtggttagtatgttgaccaaggaactctatttctcccaatag

SEQ ID NO: 27801 - DNA, 912 bp, synthetic construct
  misc_feature 1..912: note = Description of Artificial Sequence: Synthetic coding sequence
  source 1..912: mol_type = other DNA
atggctgatgaccaggggtgcattgaagagcagggcgtggaagacagcgccaatgaggatagcgttgatgctaagccagataggagctctttcgttccatccttattcagtaaaaaaaaaaaaaacgtaacaatgagatccatcaagaccacccgggatagagtgcccacctatcaatataacatgaattttgaaaagttaggcaaatgtatcatcatcaacaataagaatttcgacaaggtcacaggaatgggagtccgcaacggcaccgataaagacgccgaggccctcttcaagtgctttagatcacttggctttgacgtcattgtgtataacgattgtagttgcgcaaagatgcaggatttgcttaaaaaggctagcgaagaggatcacactaatgccgcttgttttgcatgcatcctactctcacatggggaggagaacgtgatctacggcaaagatggcgtgaccccgatcaaagaccttaccgcacattttaggggtgatcggtgtaaaactctattagaaaaacctaaattgtttttcatccaggcatgtcggggaaccgaactagatgatggcattcaggcagacagcggacctatcaacgatactgacgctaatccaagatataagatcccagtggaagccgattttttgttcgcttactcaacagtccccggttactactcatggagaagcccagggcgaggtagctggtttgtccaggcactttgctcgatactggaggagcacggcaaggatcttgaaatcatgcaaattctcactagagtgaacgatagagtggctagacacttcgagtcccaatcggatgatccccatttccacgagaagaagcagatcccctgcgtagtgagtatgctgaccaaggaattgtatttttctcagtag

SEQ ID NO: 27802 - DNA, 663 bp, synthetic construct
  misc_feature 1..663: note = Description of Artificial Sequence: Synthetic coding sequence
  source 1..663: mol_type = other DNA
atggccgacgaccagggttgcatcgaagaacaaggtgtcgaagactcggccaacgaagactctgtggacgctaagcctgatcgctcaagctttgttcccagtctgtttagcaagaaaaagaaaaatgttaccatgaggagcatcaaaaccacacgcgatagggtacctacttaccagtacaatatgaacttcgagaagttaggaaaatgtataattattaacaacaaaaacttcgacaaagtaaccggaatgggtgtcaggaatggaaccgataaggatgcggaggcactgtttaaatgcttccgatccctagggttcgatgtcatcgtctataatgattgctctgttactcaggcaggtgtccagagacgggatcttgggagactccaacctccccctccacgctttaaacaatatagctgtctatccctgctgtcatcgtgggactacaggcacgcaccacccaggttagccaacttttgcatcttccgccgagagggatttcgacacgtaggtcaggccggactcaaactgctggcgtctagcgatcctcccacctccggctcccaatctgccggtataactggtgtatcactccatacacaaccacagattatgaaagtgtctctgcgccattgtaacacttttatctgttttgcttag

SEQ ID NO: 27803 - DNA, 912 bp, synthetic construct
  misc_feature 1..912: note = Description of Artificial Sequence: Synthetic coding sequence
  source 1..912: mol_type = other DNA
atggcagacgaccaggggtgtatcgaggaacaaggggtggaggactcagcgaatgaggatagtgtggacgccaagccagatcggagctcttttgttccaagcctatttagcaagaagaaaaaaaatgtcactatgcggagcattaaaactacaagagatcgggtcccaacttatcagtacaatatgaacttcgaaaaacttggaaagtgtattatcatcaacaataaaaattttgataaggtcacgggtatgggcgtgcggaatggaactgataaggatgccgaggctctgtttaagtgcttcagatcccttggattcgacgtgatagtctacaacgattgcagttgtgcaaagatgcaggaccttcttaagaaagcctctgaggaggaccatacaaacgcagcatgcttcgcttgcatcctactgagccacggcgaggaaaatgtgatctatgggaaagacggcgttacgccaatcaaagacctgactgcgcattttcgcggtgaccgttgcaagaccctcctggaaaaaccaaaactgttctttattcaggcgtgtagagggaccgagcttgacgacggaatccaggcggacagcggtcctatcaacgacacagacgcaaacccacggtataaaataccagtggaagccgatttcctgttcgcctatagcaccgttccgggttattattcttggcgatctccaggcagaggtagctggtttgtccaggccctgtgcagcattcttgaagaacatggaaaggatctggaaataatgcaaatcctgacccgggtaaatgacagagtggcacggcatttcgagagccagtcagacgatcctcattttcatgagaaaaagcaaattccatgtgtcgtttccatgctaactaaagaactctacttcagtcaatag

SEQ ID NO: 27804 - DNA, 663 bp, synthetic construct
  misc_feature 1..663: note = Description of Artificial Sequence: Synthetic coding sequence
  source 1..663: mol_type = other DNA
atggctgacgaccaagggtgtattgaagaacaaggagtggaagatagtgcaaacgaggactcggttgacgctaagcccgaccgtagttcgtttgtaccctcattgttttctaagaagaagaaaaacgttaccatgagatcaatcaagactactagggatcgcgtgccgacataccagtacaatatgaattttgagaagctcggcaaatgcatcattattaacaataaaaacttcgataaggtcactgggatgggggtacgaaacggcactgataaggatgctgaagcactgtttaagtgcttcaggtcactcgggttcgacgttatcgtgtacaacgactgctcatttactcaggctggagtacagaggcgcgacctcggacgcctgcaacctcccccacctaggtttaagcaatactcttgtttgtcactgctgtctagttgggattaccggcacgccccaccgaggctagctaatttttgtatcttccgtagagagggatttagacacgtgggtcaggccggactcaaactccttgcctcctctgaccccccaacttcaggctctcagtctgccggaataacgggtgtgagcctacatactcagcctcagatcatgaaagtttctctgagacactgcaatacctttatctgcttcgcatag

SEQ ID NO: 27805 - DNA, 1011 bp, synthetic construct
  misc_feature 1..1011: note = Description of Artificial Sequence: Synthetic coding sequence
  source 1..1011: mol_type = other DNA
atggattgtgtcggttggcctccaggcaggaaatggcatctggagaaaaataccagctgtggtgggtcctctgggatctgtgcctcttacgtcacgcagatggccgacgaccagggttgcatcgaggagcagggcgttgaagattccgctaacgaggatagtgtcgatgccaaaccagaccgatcatcgtttgtgccttcgcttttttcaaagaaaaagaagaatgtgacgatgcgctcaattaaaaccacccgggacagggtaccaacatatcagtataacatgaattttgagaagctaggaaagtgcatcatcatcaacaataagaatttcgataaagtgaccgggatgggcgtccgtaacggcacagacaaagatgccgaggctttgttcaaatgctttagaagcctgggctttgacgtgatcgtgtataatgattgttcttgtgccaagatgcaggacttactaaaaaaggcctccgaggaggatcacactaacgctgcctgttttgcctgcatcctactcagccatggagaagagaatgttatctatggcaaagacggggtgacccccatcaaggacctcacagcccacttccgcggtgacaggtgtaaaaccttactggagaagccgaagctcttctttatccaggcatgcagaggaacggaactcgatgatgggatccaggctgatagtggcccaattaatgacaccgacgctaaccccaggtacaagatcccagtcgaagccgattttctcttcgcttatagcacggtaccgggttactatagttggaggagcccgggacggggaagttggtttgtacaggcgttgtgttcgatcctcgaggagcacgggaaggatctcgagatcatgcagattctcaccagagtgaatgaccgtgtggcccgtcatttcgagtctcagtcagatgaccctcatttccacgagaaaaaacagatcccttgcgttgtcagcatgctgactaaggaactgtacttctctcagtag

SEQ ID NO: 27806 - DNA, 762 bp, synthetic construct
  misc_feature 1..762: note = Description of Artificial Sequence: Synthetic coding sequence
  source 1..762: mol_type = other DNA
atggccgacgatcaaggctgtattgaagagcagggcgttgaggatagcgccaacgaggactccgtcgacgcgaaacccgaccgctcatcgtttgtgccctccctcttcagtaagaagaagaaaaatgtgacaatgcggagcataaaaaccacccgcgatcgggtcccaacatatcaatataacatgaactttgagaaactgggtaagtgtattatcattaataacaaaaatttcgataaagtcaccggcatgggtgtccgcaacggtaccgataaggatgcagaggcccttttcaagtgctttcgcagtctcggatttgacgtgatcgtttataacgattgctcatgcgcgaagatgcaggacctccttaagaaagcttctgaggaggatcacacgaatgctgcctgcttcgcgtgcatcctgctgtcgcacggcgaggagaatatggagagctgcagtgtcactcaggctggcgttcagaggagagacctcgggaggctccaaccccctcctcctcgcctggctgagggcccttcacttatgatggcttcgcgccctacacgcggacccagcatgactcaaatgttgattctggataccaggagtcaatggaagctcacctccagcagcccaattccgcgttttcaagctataacgcggggtggggcacaggaggaggcaccgggtctctgcaaaccctctgcaccgagttggcggtccacggagaaaacatggaagtcctgtaggagcagtcccggttag

SEQ ID NO: 27807 - DNA, 669 bp, synthetic construct
  misc_feature 1..669: note = Description of Artificial Sequence: Synthetic coding sequence
  source 1..669: mol_type = other DNA
atggccgacgaccaaggctgtatcgaagaacagggagtggaggatagcgctaacgaggattccgttgatgccaagcccgaccggtcatctttcgtaccatctttgttctctaaaaagaagaagaacgtcaccatgagatccattaaaacaactcgcgaccgcgtgcccacctatcaatacaatatgaacttcgagaagctaggaaaatgtatcattattaataataagaattttgacaaggtgacaggaatgggcgtgaggaacggcactgacaaagatgcagaagcgctatttaaatgcttccggtccctcggctttgatgttatcgtgtataatgactgcagctgtgccaagatgcaggatttgctgaagaaagctagtgaggaagaccacaccaacgctgcctgcttcgcctgcatcctgctgtcacatggtgaggaaaacgttatctacggcaaagatggtgttacacctattaaggatcttaccgcacatttcagaggagatcgatgtaagacactccttgagaagccaaagctgttcttcattcaggcttgcaggggcacagaattagatgacggcatccaggctgattctggaccgattaacgacacagacgctaatcccagatataaaatcccagtggaggcggacttcctatttgcttag

SEQ ID NO: 27808 - DNA, 795 bp, synthetic construct
  misc_feature 1..795: note = Description of Artificial Sequence: Synthetic coding sequence
  source 1..795: mol_type = other DNA
atggccgacgatcaaggttgtatcgaggaacagggggtggaggacagcgcaaatgaggattcagtcgacgccaagccagatcggagcagcttcgtgccaagtctctttagcaagaagaaaaaaaacgtcacaatgcgatccatcaagacaactcgggaccgagtgcctacttaccaatacaatatgaactttgagaagctggggaaatgtataattatcaacaataagaacttcgataaggtgacaggcatgggtgtgcggaacggaacagacaaggacgccgaagccttgttcaagtgcttccgatctttggggtttgatgttatcgtctacaacgattgtagctgtgccaaaatgcaagacttgctgaaaaaagcaagtgaagaagaccacaccaacgccgcttgctttgcctgcatcttgttcttcatccaggcttgtcggggaaccgagctggacgacggtattcaggccgacagcggcccaatcaatgataccgatgccaacccccgatataagatccctgtggaggcagattttctgttcgcatattccacagtgccgggttattattcttggagaagtcccggtcgcggatcctggttcgtccaggccctgtgttctatcctggaagaacacggaaaggatctcgagattatgcaaattctgacccgcgtgaacgaccgtgtggccagacatttcgagtcccagtctgatgatcctcatttccatgagaagaaacagatcccatgcgtggtgagtatgcttactaaggagctctatttctcccagtag

SEQ ID NO: 27809 - DNA, 837 bp, synthetic construct
  misc_feature 1..837: note = Description of Artificial Sequence: Synthetic coding sequence
  source 1..837: mol_type = other DNA
atgcagagggggctgtttagcgacggtgatacgagcaagaaaaaaaagaacgtaactatgagatcaatcaagaccacacgcgatagggtgccgacgtatcagtataatatgaacttcgaaaagctggggaaatgcatcatcatcaacaacaagaatttcgacaaggtgactggaatgggagtccggaatggaaccgacaaagacgccgaggccctattcaaatgtttcaggagcctcggcttcgatgttatcgtgtataatgactgcagctgtgcgaaaatgcaggacctcctgaagaaggcctctgaggaggaccacactaatgcagcttgtttcgcttgcatcttgctaagtcacggagaggagaacgtgatttacggcaaggacggcgtcacgcctatcaaagatttgacagcccactttaggggcgacagatgtaagacgcttctcgagaagccgaaactcttttttattcaggcttgtcgcggtactgaactggatgacggtatccaggccgactctgggcctataaacgatacagatgccaaccctcgatataagatcccggtggaagcggattttttatttgcctacagcacggtgccgggttattactcctggagatcccccggtcgcggaagttggttcgtgcaggcgttgtgtagcatccttgaagagcacggaaaggatttagagatcatgcagatacttacacgggtgaatgaccgagtggcaaggcatttcgagagccagtcagacgaccctcactttcacgagaagaagcagatcccctgcgtcgtatcgatgctcacaaaagagctgtactttagccagtag

SEQ ID NO: 27810 - DNA, 1188 bp, synthetic construct
  misc_feature 1..1188: note = Description of Artificial Sequence: Synthetic coding sequence
  source 1..1188: mol_type = other DNA
atggatttctcccgaaacctgtacgacataggggagcagctggactcagaagatctggcaagcctgaaatttttgagtttagattacatcccgcaaaggaagcaggagcctataaaagatgctctaatgctgtttcagaggctgcaggagaaacggatgcttgaggagtccaacttaagctttttgaaggagctgctctttcggatcaacagattggatctgctgataacctatctgaacacgcgcaaggaggagatggaacgcgaactgcagaccccgggtagggctcagatctccgcatacagggtcatgctgtaccagatttcagaagaagtgagtcgctcagaactccgatcctttaagttccttctccaggaggaaatctctaaatgcaaactggatgacgacatgaatctgcttgacatatttattgagatggaaaaacgcgttattttaggcgaaggcaaattagatattttgaagcgggtgtgtgctcagataaataaatccctgctgaagattatcaacgactacgaagagtttagcaaaggtgcccttacgaccacattcgaagagctccatttcgagatcaagcctcacgatgactgcacggtggagcagatatatgaaatactgaagatataccagcttatggatcactctaatatggactgtttcatttgctgcatcctatctcacggcgacaagggtatcatctacgggaccgatggtcaagaagcacccatttacgaactgacgtctcagttcactggactgaagtgtccctccttggcagggaagcccaaggtctttttcattcaggcctgtcaaggtgacaactaccagaagggaattcccgtggagaccgactccgaagagcagccttacctggaaatggatttgagctccccgcaaactcgctacatccctgatgaagcggatttcctgcttggaatggctaccgtgaataactgcgtgagttataggaacccagccgaggggacctggtacatacagagcttgtgccaatctttgcgcgagagatgccctcgaggtgatgatatcctcacaattttaacagaagttaattatgaggtgtctaataaggacgacaaaaaaaacatgggcaagcaaatgccgcagcctaccttcactctgcggaagaagctggtcttccctagcgattag

SEQ ID NO: 27811 - DNA, 1491 bp, synthetic construct
  misc_feature 1..1491: note = Description of Artificial Sequence: Synthetic coding sequence
  source 1..1491: mol_type = other DNA
atggatttcagcaggaacctgtatgacatcggagaacagttggacagtgaggatctggcttctctaaaatttctatcccttgactacatcccccagcgaaaacaagagcccatcaaggatgccctcatgctatttcagcgcttacaggagaaacgcatgctggaggaaagcaatctcagctttctgaaagagctcctgttcaggatcaataggctggacttactgattacctatctcaatacacgaaaagaagagatggagagggaactccagacacctggccgtgcccagatctctgcctatcgctttcacttctgtaggatgagctgggcagaagcaaattcccaatgccagactcagtcggtacccttttggaggcgcgtagatcacttactgatccgcgtaatgctgtaccagatttccgaagaagtcagtaggtccgaactacgctctttcaaatttctgttgcaagaggaaattagtaagtgcaagttggacgatgatatgaacctgctggatatctttatcgagatggagaagagggtgatactgggggaaggcaaactggatatccttaaacgtgtgtgcgcacaaatcaacaaaagtctgctgaagattattaatgattatgaagaattttcaaagggcgaagagctgtgtggtgttatgaccatctctgactccccccgagaacaagatagcgaatcccagacgctcgacaaagtataccagatgaagagcaagccgcgtggatattgtctgatcatcaacaaccataactttgctaaggccagggagaaggtccctaagctgcatagcatcagggacagaaatggtacccaccttgatgccggagcattaaccactactttcgaggaactacattttgagatcaaacctcacgacgactgcaccgtggagcagatatacgaaatcctgaaaatctaccagctcatggatcacagcaatatggactgctttatctgttgcattttgtcccatggcgacaagggcatcatctatgggacggatggtcaggaagcccctatctacgagctgacaagtcagtttacaggtctgaaatgcccctctctggctgggaagcctaaggtgtttttcatccaggcatgtcaaggtgacaactaccagaaaggtatcccagtagaaacagatagcgaagaacaaccatacttagagatggatctgagctctccacagacgaggtacattccagacgaggctgactttctgctgggcatggctactgtgaacaattgcgtgagctatagaaacccggctgaaggaacttggtatattcaatcactgtgccagtccctgcgggagaggtgtcctcgtggcgatgatatcctcactatcctgacggaagtaaactacgaggtgagtaataaggacgacaaaaagaatatgggaaaacaaatgcctcaacctacttttactctccgcaagaaactggtcttcccctctgattag

SEQ ID NO: 27812 - DNA, 1395 bp, synthetic construct
  misc_feature 1..1395: note = Description of Artificial Sequence: Synthetic coding sequence
  source 1..1395: mol_type = other DNA
atggatttcagtagaaacctgtatgatataggggaacaactggattctgaggacctggcctccttaaagttcctcagccttgattacatccctcagcggaaacaggagccaattaaggacgccctcatgctgtttcagcgtctgcaagagaagcgaatgctggaagagagcaacttatctttcctgaaggagctactgtttcgaatcaatcgtctggatcttttaattacttacctaaacacccggaaggaagagatggaacgggagctgcagacccccggacgtgctcagattagcgcatatcgggtgatgctctatcagattagcgaggaagtgtctcggagcgaactccgtagctttaagtttcttcttcaggaggaaatctcaaagtgtaaattggatgacgacatgaatctgctggacatcttcatcgagatggagaagcgggtcatcctcggtgaaggtaaactcgatatcctcaagcgcgtctgcgctcaaataaataaatctctcttaaagataatcaatgactatgaggagttttccaagggggaagaactttgcggagtaatgacaattagcgatagcccaagggagcaggactcggaatcccagacacttgataaagtctatcagatgaaaagcaagcctcggggatattgccttataattaataatcataatttcgcaaaggctcgcgagaaagtgcctaagcttcatagtattcgggatcgcaacggaactcacctggatgccggtgctttgactaccaccttcgaagagcttcactttgagattaagccccacgacgattgtacagtagagcaaatttacgaaatactcaagatctaccagctgatggaccactccaatatggattgttttatttgttgcattctgtcacatggggacaagggaataatctatggcacagacggacaagaggcgccaatctacgagctgacctctcagtttactggtctgaagtgcccgtctctcgctggaaagccaaaggtgtttttcatccaggcctgccagggagacaactaccaaaaagggatcccagtggaaaccgactccgaagaacagccctacctggaaatggatctgtcaagcccacaaacccggtatattcctgacgaggccgatttcctccttggaatggctacagttaacaactgcgtgtcttaccggaatcccgctgaaggaacttggtatattcagagtctgtgccagtccttacgtgaaaggtgtccacggggagatgacatcctgacaattctaaccgaagtgaactacgaggtgtcgaacaaagacgataaaaaaaatatgggcaagcagatgcctcagcctactttcacactgcggaaaaagctggtctttccttctgactag

SEQ ID NO: 27813 - DNA, 1617 bp, synthetic construct
  misc_feature 1..1617: note = Description of Artificial Sequence: Synthetic coding sequence
  source 1..1617: mol_type = other DNA
atggagggtggcagacgagccagagtagtcatcgagtcgaagcgaaacttcttcctgggcgcttttcccactccatttcctgctgagcacgtcgagctggggaggttaggggattctgaaaccgccatggtgcccggtaaaggcggagctgattatatcctcctccccttcaaaaaaatggacttcagccggaatctttatgatatcggggaacaactagattcagaggatctcgcaagtctgaaatttctgagtttagactacatccctcagagaaagcaggagcccataaaggatgccctaatgctctttcagcggcttcaagagaagcggatgcttgaagaaagtaacctgtctttcctgaaggagctcctttttcgcatcaataggctggaccttctgatcacataccttaatacccgcaaggaggagatggagagagagctgcagacgcctggacgcgcacagatcagtgcctacagggtgatgttatatcagatttcagaggaggtcagtcggtccgaattgagatccttcaaatttctgctgcaggaagaaatatccaagtgcaaactggatgatgatatgaacctgctggatatctttatcgaaatggaaaaaagagtaattctgggtgagggcaaactcgatatcctgaagagggtgtgcgctcagatcaacaagtctcttcttaagattatcaacgactatgaagagttcagtaaggaaaggagcagctcgctcgaaggcagtcctgacgaattcagcaatggcgaggaactgtgcggggtaatgaccataagtgattcacctagagagcaggactcagagtcccagactctggataaagtgtaccaaatgaagagtaaaccgcgaggctactgtctgattatcaacaaccacaatttcgccaaagcccgtgaaaaggtaccgaagctacacagtattcgagatagaaatggtacccatttagatgccggtgctctgaccaccactttcgaagaactgcattttgagattaaaccccatgacgattgcactgtggagcagatttacgagattctgaagatctaccagctaatggaccactcaaacatggactgcttcatctgctgtattttgtcccatggggacaaaggcattatttacggtaccgatggacaggaggcaccaatctacgagctgacctcacagttcacagggcttaagtgtcccagtctggcgggaaagccaaaagttttctttattcaggcgtgccagggagataattatcagaagggcatcccagtcgagaccgacagtgaagaacaaccttacctcgagatggacctcagcagcccccagactaggtatattccagacgaggctgattttctactgggcatggccacagtgaacaactgtgtgtcttataggaaccctgcagaggggacttggtacattcaatcgctgtgccagtccctgagagagcgatgcccacgaggcgacgatatcctcaccatcctgactgaagtcaattacgaggtgagcaataaggatgataagaagaatatgggtaagcagatgcctcagcctacctttactcttcggaagaaactggtgttcccctcagattag

SEQ ID NO: 27814 - DNA, 708 bp, synthetic construct
  misc_feature 1..708: note = Description of Artificial Sequence: Synthetic coding sequence
  source 1..708: mol_type = other DNA
atggacttcagccgaaacctttacgatataggcgagcagcttgacagtgaagatctggctagtctgaagttccttagcctggactatattccccagaggaagcaagagccaataaaagatgctcttatgctctttcagcgcttgcaggaaaagaggatgcttgaggaatccaatctctcgtttcttaaagaactgctgtttcgcataaacagattagacctcctgattacctaccttaacaccagaaaggaagaaatggaaagagaactgcagacccccggaagagcccagatcagcgcttacagagtcatgctgtatcagattagcgaagaagtgagcaggagcgaattgagatccttcaaattcctcctgcaggaggagatttcaaagtgcaaattggacgacgacatgaaccttctggatattttcattgaaatggagaaacgtgtgatccttggcgagggcaagttggacatactaaagcgggtgtgcgcacaaattaacaagtctctcctgaaaattattaacgactatgaggagtttagtaaagagcggtcctccagcctggaaggatcacctgatgaattcagtaacgattttggtcagagcctgccgaatgagaagcagacctctggcatcctctcggatcaccaacagtcacaattttgtaagtccacgggcgagtcagcgcaaacgtcccagcattag

SEQ ID NO: 27815 - DNA, 708 bp, synthetic construct
  misc_feature 1..708: note = Description of Artificial Sequence: Synthetic coding sequence
  source 1..708: mol_type = other DNA
atggatttctctagaaacctttatgacatcggggaacagcttgactccgaagatctcgcatcgctcaagttcctcagtctggactatatcccacagcgcaaacaggagcccattaaagacgctcttatgttattccagcggctgcaggaaaagcgcatgctggaggagtctaacctcagtttcctaaaggaactgttgtttcggattaacagattggatctcctaataacatacctcaataccagaaaggaggaaatggagagagagctccaaacccccggtagggcacagatctctgcctaccgtgtgatgttgtatcagataagcgaagaagtttccagaagcgaattgcgttcttttaaattcctgctacaggaggagattagcaagtgtaagttggacgatgatatgaatcttcttgatattttcattgagatggagaagcgagttatcctcggcgagggtaaactggatatcttaaagcgagtatgcgctcagatcaataaatcccttctgaaaatcatcaatgattacgaggagtttagtaaggaacgatcttcatcccttgagggcagcccagatgaatttagcaacgattttgggcagagcctccctaatgaaaaacagacaagtgggattttgtctgatcatcaacagagccagttctgcaagtccaccggtgaatcggctcagactagccagcattag

SEQ ID NO: 27816 - DNA, 837 bp, synthetic construct
  misc_feature 1..837: note = Description of Artificial Sequence: Synthetic coding sequence
  source 1..837: mol_type = other DNA
atggatttttcccgaaacctctatgatattggtgaacagctagactccgaagatctggctagcctgaaattcctaagtctcgactacatccctcagagaaagcaagagcctattaaggacgccctaatgctctttcagagactgcaggaaaaaaggatgctcgaggagagcaacctcagcttcctgaaggagctcctttttcggatcaatcgcctggatctgttgatcacctacctgaacacaagaaaagaagaaatggagagggagctgcaaactcccggacgcgctcagatcagtgcctatagagtcatgctctaccagataagcgaggaggtctctagatccgagctgcggagcttcaagttccttttacaggaggagatatctaaatgcaagctggacgacgatatgaatctgttggatatctttatcgagatggagaaacgtgtgattttgggtgagggaaagctagacattctgaagcgcgtttgtgcccagatcaacaagagcttactgaaaatcattaacgattatgaggagtttagtaaaggcgaagagttgtgcggagttatgacaatctctgactcacccagggagcaggactcagagtcccagactctcgacaaagtgtaccagatgaaatcaaagcccagaggatattgtctgattatcaacaaccacaactttgccaaggccagagagaaagtgcctaaactgcactccatacgggacaggaacgggactcacctcgatgccggaagccactccgtggcccaggcgggtgtacagtggtgtgacctgagcagtcttcagcctccaccaccttggtttaagtag

SEQ ID NO: 27817 - DNA, 1395 bp, synthetic construct
  misc_feature 1..1395: note = Description of Artificial Sequence: Synthetic coding sequence
  source 1..1395: mol_type = other DNA
atggacttcagtagaaatctctacgatattggagagcagcttgacagcgaggatctcgcctctttaaagttcctctctctggactatatcccccagagaaaacaggagcccataaaagacgccctaatgctattccagcggcttcaggagaagaggatgcttgaggaatctaatctgtcgttcctgaaagaacttctctttcgcatcaaccgactggacttgctgattacttatttgaatactcggaaggaagagatggaacgagaactgcagacacctggccgtgcccaaatatcagcatatagggtgatgctttaccagatatccgaggaggtttctcgcagtgagctaagatcctttaaatttttgttgcaggaggagattagcaaatgcaagttggacgacgatatgaacctgttagatatttttatcgagatggaaaagcgagtcatcctgggagagggcaagctcgacatcctgaaacgggtctgcgcacagatcaacaaatctctcctgaagatcatcaacgactatgaagagttttcaaaaggtgaggaattgtgcggtgttatgacaatctccgacagccctagggaacaagattccgagagccaaacattggacaaagtgtatcagatgaaaagcaagcctagaggttattgcctgattatcaacaatcataacttcgcaaaggcacgcgagaaggtgccaaagctacacagcattcgcgaccgcaacgggactcatctggacgcgggagctttgacgaccacttttgaggaattgcacttcgaaatcaagccacacgatgactgtaccgtggaacagatttatgaaattttaaaaatttaccagctgatggaccattccaatatggattgttttatctgttgcattttgtcacatggggataagggtattatctatggaacagatgggcaggaggcacctatatatgaactcacatctcagtttactggtctcaagtgtccatcgcttgccggaaagccaaaggtcttcttcatccaggcttgtcagggggacaactatcagaagggtattcctgtggaaacggactcagaggagcaaccgtacctcgagatggatctctcctctccccagaccagatacatccctgacgaggcggattttctgctgggcatggccacggtgaacaactgcgtatcttataggaacccagccgagggaacctggtatatccagtctctgtgtcaatccctcagagaaaggtgtccgagaggggatgatattctgaccattctcactgaggtaaactatgaagtgtccaacaaggacgataagaagaatatgggcaagcagatgccacagccaactttcactctgcgcaaaaaactggtgttccctagcgactag

SEQ ID NO: 27818 - DNA, 663 bp, synthetic construct
  misc_feature 1..663: note = Description of Artificial Sequence: Synthetic coding sequence
  source 1..663: mol_type = other DNA
atggacttctcccggaatctctatgacattggagagcagcttgacagcgaggatctggctagtttgaaatttctgagcctggactacatcccgcaacgcaagcaggaaccaatcaaagacgcccttatgctgttccagcgcttgcaggagaagaggatgctggaggagtccaacctgagtttcctgaaagaactgcttttcaggatcaatcggctggacctgctgatcacctacctgaacacacgcaaggaggagatggaacgagagctccagacccccggacgcgcacagatatcggcatatagggtgatgctatatcagatttccgaggaggtgagccgctccgagctccgcagttttaaattcctactacaggaagagatcagtaagtgtaagttggatgatgatatgaacctgctggacatctttattgagatggaaaagcgcgtgatactgggagaggggaagctggatattctcaagcgcgtctgtgcacagatcaacaagtctctgctgaaaatcattaatgattatgaggaattctctaaggacttcggccaaagtctacctaatgaaaaacagacctctggcatactgtcagatcatcagcagtctcagttttgcaagtccaccggcgaaagtgcacagacctcacagcactag

SEQ ID NO: 27819 - DNA, 597 bp, synthetic construct
  misc_feature 1..597: note = Description of Artificial Sequence: Synthetic coding sequence
  source 1..597: mol_type = other DNA
atggacttcagcagaaacctgtatgacatcggcgaacaactggacagcgaggacctggcctctctgaaatttctgtctctggactatattccccaaagaaagcaagagcccatcaaagacgccctgatgctctttcagaggctgcaggaaaaacgaatgttggaggaatccaacctgagcttcctaaaggagttgctgtttcggatcaaccgcttagatctcttgattacgtacttgaacactaggaaagaagaaatggaaagagagctgcaaacccctggtagggcacagatatcggcttatagggtgatgctttaccagataagcgaagaagtctccagatcagagctccgctcctttaagttcctgctccaagaggaaatatcaaaatgtaaactggacgacgatatgaacctcctagacattttcattgaaatggaaaaacgcgtgatcttgggggagggaaaactagatattttaaaaagagtctgtgcccaaattaacaaatctctcctcaagatcatcaacgattatgaagagtttagcaaagaaagaagctcttctttggagggcagcccggacgagttctctaactag

SEQ ID NO: 27820 - DNA, 351 bp, synthetic construct
  misc_feature 1..351: note = Description of Artificial Sequence: Synthetic coding sequence
  source 1..351: mol_type = other DNA
atggacttttcacgcaatctttacgatatcggggagcagttagacagcgaggacctcgccagtctcaaattcctaagcctggattacattccacagaggaagcaggaacccatcaaggatgcactcatgctgttccagaggctgcaggagaagaggatgcttgaagagtcaaatttgtcctttcttaaagagctgctattcagaatcaatagactggacctgctgatcacctatctcaataccagaaaagaggaaatggagagagagctgcagactcccggtcgggcacagatttccgcctatcgagttatgctatatcagattagtgaagaagtgagccgatctgagtag

SEQ ID NO: 27821 - DNA, 1440 bp, synthetic construct
  misc_feature 1..1440: note = Description of Artificial Sequence: Synthetic coding sequence
  source 1..1440: mol_type = other DNA
atggatttctccaggaatctgtacgacattggtgaacagctcgacagcgaagacctcgcttctcttaaatttctgtcattggattatatccctcaacggaaacaggaacccataaaggatgccctcatgctgtttcagcgtttacaggaaaaacggatgcttgaggagagtaatctgtcttttctcaaagaactgctgtttagaattaatagacttgaccttttgatcacttacttgaacacacggaaggaagagatggagagggagctgcagacacctggacgcgcacaaatctctgcctaccgcgtgatgctttaccagatttctgaggaggtttctcgatccgagctgcggagtttcaagttcctcttgcaggaagaaatatccaagtgcaagctggatgacgacatgaacctgctcgacattttcattgaaatggaaaaacgggtgattttaggggagggtaaactcgatatcctgaagcgggtgtgtgcgcagatcaacaagagcctccttaagattattaacgactacgaagaattcagcaaggagagatccagctcattagaggggagcccggacgagttttctaatggtgaggagctgtgtggggttatgactatcagcgacagtccaagggagcaagattctgagtctcagaccctggataaggtttaccagatgaagtctaagcctaggggctattgtctcataatcaataaccacaactttgcaaaagccagagaaaaagtgcccaaactccactcaatcagggaccgcaacgggacgcatctggacgctggcgctttaaccactacctttgaggaactccattttgaaatcaagccccacgacgactgtaccgtggaacaaatctatgaaatccttaagatttatcagcttatggaccacagcaacatggattgcttcatatgctgcattctcagtcacggtgataaggggattatctatgggacagacggacaagaggcccctatttatgaacttactagccaattcaccgggcttaagtgcccgagcctagctggcaagccgaaggtgttctttattcaagcttgccaaggggacaactaccagaagggtatccctgtggaaaccgacagcgaggaacagccgtatttggagatggacttatcctcaccccaaacgaggtacattcctgacgaagctgattttctgctcgggatggccacagtcaataattgcgtctcttacaggaatcctgccgaaggaacttggtacattcagagcttgtgtcagtccctgcgcgagagatgcccaagaggagacgatatactgactatcctgaccgaggtgaattacgaggttagcaataaagacgacaagaaaaatatgggcaagcagatgcctcaaccgacctttactctgcgaaaaaaactggtttttccctctgattag

SEQ ID NO: 27822 - DNA, 375 bp, synthetic construct
  misc_feature 1..375: note = Description of Artificial Sequence: Synthetic coding sequence
  source 1..375: mol_type = other DNA
atggacttcagtagaaatttgtatgacataggagagcagttagattctgaggatctggccagcctgaagttcctatccctcgattatattccccagcgtaaacaggaacccatcaaggatgccctgatgttgtttcaaagactccaagagaagcggatgctagaggagagtaaccttagctttttaaaggagctgctgttccgaatcaaccgcttggacctgctcatcacctacctgaatacaagaaaggaggaaatggagagagaattacagacacctggcagagcacagattagcgcctatagagtcatgctgtatcagatcagcgaagaagtcagtcggtccgagctgagatcatttaaattcctactgtag

SEQ ID NO: 27823 - DNA, 630 bp, synthetic construct
  misc_feature 1..630: note = Description of Artificial Sequence: Synthetic coding sequence
  source 1..630: mol_type = other DNA
atggactttagtcggaacctctacgacatcggagaacagctcgattcggaagacctcgcatccctaaaattcctgtccctggactatatacctcaaagaaagcaggaacctataaaggacgcactcatgctatttcaaaggcttcaagaaaagcgcatgttagaggaatcaaatctgtcttttcttaaggaactgctgttccggattaacagactggatttgcttatcacatacctaaatactcgaaaagaggaaatggagcgggaactccagaccccgggacgagcccagatctctgcctaccgagtgatgctgtaccagatctcggaagaagtgagtcgttccgagctccgttctttcaaattcctgctgcaggaagagatctccaaatgtaagctcgacgatgatatgaatctcctggatatctttatcgaaatggagaagagagtcattctgggcgagggcaagctagatatcctgaagcgggtttgtgctcagattaacaagagcctgctgaagatcatcaatgattacgaggaattttccaaggacttcgggcagtcacttccaaatgaaaagcagacgtcaggcattctgagcgaccaccagcaatctcagttctgcaagtag

SEQ ID NO: 27824 - DNA, 1251 bp, synthetic construct
  misc_feature 1..1251: note = Description of Artificial Sequence: Synthetic coding sequence
  source 1..1251: mol_type = other DNA
atggatgaggctgataggagacttcttcgcagatgcagactgaggctcgtggaggagctccaggtcgatcaactctgggatgccctcctgtcccgggaacttttccggcctcatatgattgaggatatccaaagagcagggtccggttctaggcgcgaccaagcgaggcaactcatcatagatcttgaaaccagagggtctcaagcgctgcccttgtttatctcatgcctggaagatactggacaggacatgttggcgtctttcctgcgaacaaaccgtcaggcagccaagctgtcaaagccgacccttgaaaacctcaccccggtggtactgcgacctgagatcagaaaaccagaggtgctgagacccgagacccccagacccgtcgatatcggttctggaggcttcggggatgtgggcgcactcgagtcactgagagggaacgccgatcttgcttatatcctcagtatggagccgtgtggtcactgcttaattatcaataatgttaatttctgtagagaaagcggactccgtaccagaactggctccaatattgattgtgagaagctgcgtcgtcgtttttcgagccttcacttcatggtggaggtcaaaggtgacctaaccgcaaagaaaatggtgctagccctcttagagttggcccaacaagatcacggagcccttgattgctgcgtcgtcgtgatcttgtcccatgggtgccaggcgagccacctgcagttccccggagccgtatatggcacagacggatgccccgtttccgtggagaaaattgtgaacatcttcaatggcaccagctgtccctcccttggtggaaaacctaagctgttctttattcaggcgtgcggaggggaacagaaagaccacggatttgaggtcgcttctacaagtccagaagatgagtctcccggatctaacccagagcccgacgccacgccctttcaggaaggcttgcgcacctttgaccagctggatgctatatcttccctccctacacctagcgatatcttcgtctcctattctacattcccgggatttgtgagctggagagatccaaagtcagggtcatggtatgtggaaaccctggacgacattttcgaacaatgggcacacagtgaagacctgcagtcgctgctgctccgggtagccaatgccgtcagcgtgaaaggtatctacaagcaaatgcctgggtgttttaattttctccggaagaaactattttttaaaacatcttag

SEQ ID NO: 27825 - DNA, 801 bp, synthetic construct
  misc_feature 1..801: note = Description of Artificial Sequence: Synthetic coding sequence
  source 1..801: mol_type = other DNA
atggatgaagctgatcgaagactcttgcgcaggtgtcggctccgactcgtggaagagctgcaagtggaccaattgtgggacgcactgctgtcccgggagctttttcggccacacatgatcgaagacatccaacgcgctggttcaggatcccgacgcgaccaggccagacagttaataatcgatctcgagactcgtggctctcaagccctaccactgttcatctcttgtcttgaggatactggccaggacatgctggcatccttcctgagaacaaaccgccaagctgccaaacttagcaagccaactcttgaaaacctcacccccgtggtgctgaggccggagatccgaaagccagaggtgctaaggcctgaaacaccccgacccgtggacatcgggtctggagggtttggggacgttgaacagaaagatcatgggtttgaggtagcatcaacttcaccggaggatgaatccccaggctccaatcccgaacctgacgcaacgcctttccaggagggactgcggactttcgaccaattagatgcaatatcgagtcttcccacaccctccgatatatttgtttcctattccacattccctggattcgtgtcttggcgcgacccaaagagcggctcttggtatgttgaaaccctcgacgatatctttgaacagtgggcgcattccgaagaccttcaatccctgctcctaagagtggctaatgccgtctcagttaaggggatctataaacaaatgccagggtgcttcaactttctgagaaagaagctatttttcaagactagctag

SEQ ID NO: 27826 - DNA, 603 bp, synthetic construct
  misc_feature 1..603: note = Description of Artificial Sequence: Synthetic coding sequence
  source 1..603: mol_type = other DNA
atggagccttgcggccattgtctgatcatcaacaacgtgaatttctgtcgggaaagcggactccgcaccaggactggctccaacatcgattgtgagaagctgaggaggaggttcagttcactgcattttatggtcgaagtaaagggcgaccttaccgccaaaaaaatggtccttgctcttttggaactggctcagcaggatcacggcgctctggattgttgcgtggtggtcatcctgtcgcacgggtgtcaggcaagccaccttcagtttccaggggctgtgtacggaaccgacggttgtcctgtctcagttgagaagattgtgaacatcttcaatggtacttcatgcccctcactgggtggcaaaccaaaactgttcttcatccaggcctgtgggggtgggtttgtgagctggcgagacccaaagtccggctcttggtacgtggagactcttgatgatattttcgagcagtgggctcattcggaggacctccagagcctgctgttgcgggtagctaatgctgtaagcgtcaaaggcatttataagcagatgccagggtgctttaatttccttaggaaaaagcttttcttcaagacttcttag

SEQ ID NO: 27827 - DNA, 1002 bp, synthetic construct
  misc_feature 1..1002: note = Description of Artificial Sequence: Synthetic coding sequence
  source 1..1002: mol_type = other DNA
atgcttgcctcattcctacgcactaaccggcaggctgccaagctcagtaaacctaccctcgaaaacttaacacccgtcgtcctccgcccagaaatcagaaagcctgaagttctgagacccgagactcctcggcctgtggacatcgggtccggaggattcggagacgttggcgctctagagtccttgagggggaacgcggacctagcatacatactgagcatggaaccttgcgggcactgtctgatcattaataacgtcaacttttgccgggagtctgggttgagaacaagaacagggagcaacattgactgtgaaaagctgagaagacggttctcaagccttcacttcatggtcgaggtgaagggcgacctcacagctaaaaagatggttctggctctactggaattggctcagcaagatcacggagcactggactgctgtgtagtcgtgatcctgagccatggttgccaagccagtcacttgcagtttccgggtgccgtgtacgggactgacggctgccccgtttcagtggagaagatcgtcaatatttttaatgggaccagctgtcctagccttggagggaaaccaaagctgttcttcatccaggcatgtggcggagaacagaaagatcatggattcgaggtagcctcaacctcccctgaagatgaaagtccagggtcaaaccctgagccggatgccaccccttttcaggagggtctgcggacgtttgaccagctcgatgccatttcttcactaccgacaccctccgacatattcgtctcttactcaacgtttccaggctttgtgtcttggcgcgaccctaagtcagggagctggtatgtggagactttagacgatatttttgaacagtgggctcattcggaggacctccagtccctattactacgtgtagcaaacgccgtgagcgttaaggggatttataaacagatgcctggatgcttcaatttcttaaggaagaagcttttctttaaaacgtcctag

SEQ ID NO: 27828 - DNA, 765 bp, synthetic construct
  misc_feature 1..765: note = Description of Artificial Sequence: Synthetic coding sequence
  source 1..765: mol_type = other DNA
atggacgaagcagatcgcaggttactgagaagatgtcggttgaggctggttgaggaactgcaggtcgaccaactgtgggatgcactcctctcccgggagctgtttcgtccgcatatgattgaagacattcagcgcgctgggagcggtagcaggcgggaccaggcaaggcagctgatcatagacctggaaactcggggttctcaggctcttcccctttttatcagttgcctggaagacaccggccaggatatgctggcttcctttcttcgcaccaatcgacaggccgctaaacttagtaagccaaccttggaaaatttgactccggtggtactaagacccgagattaggaaacccgaagtgctgaggcccgagactcctcggccagtggacatcgggagcggcggttttggagacgtgggggctctcgagagcctgcgtggcaacgctgaccttgcatatatactctcaatggagccatgtgggcactgtctgatcatcaacaatgtgaatttttgcagagaatcaggactcagaacaaggacaggaagcaatatcgattgtgagaagcttaggcgcagattttcatcgctgcatttcatggtggaggtgaagggcgacctgaccgcaaaggccagccatctgcagtttcccggtgcggtatatggcacggacgggtgtccagtgtccgtagagaaaatcgtgaatatctttaatggcactagttgtccttccctgggcggaaaaccaaaattattcttcatttag

SEQ ID NO: 27829 - DNA, 801 bp, synthetic construct
  misc_feature 1..801: note = Description of Artificial Sequence: Synthetic coding sequence
  source 1..801: mol_type = other DNA
atgctcgctagcttcctgcggacaaacagacaggccgctaaactttctaaaccaacactggagaacctgacacccgtggttctgaggcccgaaattcgcaaaccagaggtattgcggccagagactccaaggcccgtggacataggaagcggtggatttggcgatgttggagctttggagtctcttcgtggcaatgcagacctcgcttatatcctcagtatggagccttgcggtcactgcctaatcatcaacaacgttaatttctgccgggagtctggattacgcactcgcactggtagtaatatcgattgcgagaaactcaggaggaggttctcatcactgcactttatggtagaggtgaaaggcgacctgacggctaagaaaatggtcttggccttgcttgaactggcgcagcaggatcacggggcactcgactgttgcgtggtcgtcattctgagtcacggctgccaggcgagtcatctgcaattcccgggagccgtttatggcactgatggttgcccagtcagtgtggaaaaaatagtgaacattttcaatggaacttcctgtccaagcctgggcggaaagcccaagttgttcttcattcaggcatgtggaggggagcagaaagatcatggattcgaggttgcctcaacatccccagaagatgagtctcccggatcgaaccccgaacccgacgcaactccatttcaggagggtcttagaacgttcgatcaacttgatgctattagcagcctgcccacccctagtgatattttcgtgagctattcaacctttccttag

SEQ ID NO: 27830 - DNA, 1266 bp, synthetic construct
  misc_feature 1..1266: note = Description of Artificial Sequence: Synthetic coding sequence
  source 1..1266: mol_type = other DNA
atggatgaagcagaccgaagactgcttcgcagatgtcgtttacgtctagtggaggaactgcaggtggaccagctgtgggacgctctactatctcgcgagctgtttaggccacacatgatagaggatatccagagagctgggtctggcagtaggcgagaccaggcgaggcagctcatcatcgacctcgagactcgtggatcacaggccctgccactgttcatctcttgtctggaggatactggacaggacatgctggcctcatttttaaggaccaaccggcaggccgcaaagctcagcaaaccgactctcgaaaatctgacccccgtcgtgctgcgacctgagatccgaaaaccggaggtactaaggcccgagactccccgtcccgttgatatcggatccgggggattcggcgacgttggggctctggaatctctcagaggaaacgccgatctcgcctatatacttagcatggaaccgtgcggccattgtctgattattaataacgttaatttttgccgtgaaagcgggctgcgcacccggaccgggtcgaacatcgattgcgagaaacttaggagaagattctcgtctctgcatttcatggttgaggtgaagggggatctgactgctaaaaagatggtgctggccctgctagagctggcccagcaagaccacggcgcactggattgctgtgtggtggtaatcctgtcacacggatgtcaggcctcccatctgcagtttccaggtgccgtctatggcactgatggttgtccagttagcgttgagaaaatcgtaaacatttttaacggaaccagctgtcccagcctcggcggtaaaccaaagttatttttcatacaggcatgcgggggtgaacagaaggaccatggcttcgaagttgcctctaccagcccggaagacgagagtccgggatctaaccctgaacctgatgctactccatttcaagaaggtctgaggaccttcgaccaacttgatgccatctctagtctcccaacaccttccgacatatttgtttcttatagcacattcccgggttttgtgagctggcgggatcccaagagtggatcctggtatgtggaaaccctggacgatatctttgagcagtgggcgcattctgaggatctccagtcactgttgctgagagtgtctgccgcatttctgtgtaagggtgaaggacggcttcttagaggaagcgtgagctcatggggatggggcttcggtgtgtcccgcgctggacccaaccaggggtag

SEQ ID NO: 27831 - DNA, 2721 bp, synthetic construct
  misc_feature 1..2721: note = Description of Artificial Sequence: Synthetic coding sequence
  source 1..2721: mol_type = other DNA
atgaccgccgtacatgctggaaatattaactttaagtgggaccctaaatcgcttgaaatcaggaccctggctgtggagagattactggagccactggttactcaggttaccacgctggtcaacacgaactcgaaggggccaagcaataagaaacgaggtcgaagcaaaaaagcccatgtcctggctgcctctgtcgaacaggccaccgaaaatttcttagagaaaggtgacaaaatcgccaaggagtcccagttcctgaaggaagaacttgtggccgcagtggaggatgtgcgcaagcaaggagacctgatgaaggccgctgccggagagttcgctgacgacccttgttcatcggtgaagcggggtaacatggtgagagcagccagggccttactttcagctgttactcgcctgctgattctggctgacatggctgacgtttacaaactcctggtgcagctgaaggtggttgaagatggcatcctgaagttaagaaatgctggaaatgagcaagatctaggcatccagtacaaggctttgaaaccagaggtagacaaattgaacatcatggctgccaaacgccagcaggagctcaaggatgtgggccaccgtgaccaaatggccgctgcacgcggtatccttcagaaaaatgtccctattttgtatactgcctcccaggcttgcttgcagcaccccgatgtggccgcttataaagcaaaccgggacttgatctataagcagctgcagcaggcggtaactgggatctctaacgcagctcaggcaaccgcatccgatgatgctagtcagcatcaaggcggagggggaggagagttggcatacgccctgaataactttgacaaacagatcatcgttgatcccctgagtttttccgaggagcgattccgaccttccttggaagaaaggttggaatccatcatctccggggcagctttgatggcagactcgtcctgcactcgggatgatcgacgggagagaattgtcgcggaatgcaacgccgtgcgtcaagccttgcaggatctgctctctgagtacatggggaacgcgggtcgtaaggaacgatctgatgccttaaattccgcaatcgacaaaatgacgaagaagacgcgggatctcagacgccagctgcggaaagccgttatggatcatgttagcgactcgttccttgagactaacgtccctctgttagttttgatcgaggccgctaagaacgggaacgagaaggaggtgaaagagtacgcacaggtgtttcgcgagcatgcgaataaactgatcgaagtcgcaaatctcgcatgttctatttctaataacgaggaaggcgttaaattggttagaatgtcagcgtctcaactggaggcgttatgtccccaagtgattaacgcggcattagcactggcggcaaaaccacagagcaaattagctcaggagaatatggacctgttcaaagaacagtgggagaagcaagtgcgcgtgctgacagacgcagtggatgatattacatccattgatgatttcctagctgttagcgaaaaccacatcctagaggatgtgaataaatgcgtgattgctctgcaggagaaggacgtcgatggattggatagaacggccggagctataagaggacgggctgctagagtgattcacgtggtcaccagtgagatggacaactatgaacccggagtctatacagagaaagtacttgaggcaactaaattgctgtcaaatactgtcatgccacgtttcaccgaacaggtggaagctgcagtagaggctttgtctagcgacccggcacagcccatggacgagaacgagtttattgatgcatcccgcttggtgtatgacgggatccgggatatcagaaaggctgtgcttatgatacgtactccagaagagcttgacgattctgatttcgagactgaggattttgacgtgcgctcacggacgagcgtgcagaccgaagacgatcagctgatcgccggtcagagcgcccgtgccattatggctcaattgcctcaggagcagaaggcaaagatcgccgaacaggtcgcttctttccaggaggagaaatctaaactggacgcggaagtctcaaagtgggacgatagtggcaatgatattattgttctggccaaacaaatgtgtatgatcatgatggagatgaccgactttactcgtggaaaagggcctctcaagaacacttctgacgtgatatcagccgctaagaaaatcgctgaggctggaagccggatggataaactggggcgaaccatcgccgatcattgtcccgacagcgcgtgtaaacaggacttgctcgcatatctgcagaggatagctctgtactgccaccagctgaatatctgtagcaaggttaaggcggaggtacagaacctcggcggtgaactggtggtttccggagtggactccgccatgagccttatacaggcagctaaaaatctgatgaacgcggtcgtgcagaccgtgaaagctagctatgtggccagcaccaagtatcagaagtcgcagggcatggcctcacttaacctgcccgcagttagctggaagatgaaggctcccgagaagaaaccactggtgaaaagggaaaagcaggacgaaacccagacgaagatcaagagggcctctcagaagaagcacgtgaatcctgtgcaggctctgtcggagtttaaggcaatggactctatatag

SEQ ID NO: 27832 - DNA, 2412 bp, synthetic construct
  misc_feature 1..2412: note = Description of Artificial Sequence: Synthetic coding sequence
  source 1..2412: mol_type = other DNA
atgaaggctgcagctggagagtttgctgacgatccctgtagcagtgtgaagcggggaaacatggttagagctgctcgagccctcctctccgcagttactcggctcctgatcttggctgacatggccgatgtgtacaagctgctggtgcagctgaaggtcgtggaagacggaatacttaagcttcgtaatgctgggaacgagcaggatctggggatccaatacaaggcgctgaaacctgaggtggacaaactgaatatcatggccgcaaagcggcagcaggaactgaaggacgtcggacatcgagaccaaatggccgcagccaggggaattctccagaagaatgttcctatcctgtataccgcttcacaggcctgtctgcaacacccagacgttgccgcttacaaggctaaccgtgatttgatatacaaacagttacagcaggcagtgaccggtatatcaaacgcagcccaggccacggcgtcagatgatgctagtcaacatcaggggggtggcggaggcgagctggcctacgctctgaataacttcgacaagcaaatcattgttgatcccctttctttctccgaggaacgcttccgcccatcccttgaagagcggttagagtctatcattagtggggcagccttaatggccgacagcagctgcactcgggatgacaggcgcgaacgaatcgtcgcagaatgcaatgcagtcaggcaggccctacaggatttactgagcgaatacatgggcaacgccggacggaaggagcggagtgatgctctgaattctgcaatcgataagatgaccaagaaaactagagacctgcgtcggcagcttcgcaaggccgtcatggatcatgttagtgactcatttcttgagactaatgtacctttattagttcttattgaagccgctaaaaacggcaacgagaaggaagtgaaggaatacgcacaggtttttagggagcacgctaataaactcatcgaggtggcgaatctggcctgctctatatccaataatgaagaaggtgtgaagcttgtgaggatgtcagcaagtcagctggaggccttatgtcctcaggtgattaacgcggcactggcactggcagctaagccccagtctaaattggcccaggaaaacatggacctctttaaagagcagtgggagaaacaagtgcgtgtgttgacagacgccgtggacgacattacatccatcgacgacttcctggcagtttcagagaaccacatccttgaagacgtaaacaagtgcgttatcgccctccaggaaaaggacgtggatggtctggacaggaccgccggtgcaatcaggggcagagcagccagagtcatccacgtcgtgacctcggagatggataactacgagccaggcgtatacaccgagaaagttcttgaagctactaagctgttatctaatacggtgatgcctcgatttacggagcaggtcgaggccgctgtggaggctctctccagtgaccctgcccagcctatggatgagaacgaatttattgatgcttcacgtctggtttatgatggaatcagagacatccggaaggccgtattgatgatcagaactccagaagagttagatgacagcgatttcgagacagaagatttcgacgtgcgttccaggacgagcgtccagactgaagacgatcaactcattgccggacagtccgcacgggcaatcatggcccagctcccacaagagcaaaaggccaagattgctgagcaggtggcgtcatttcaggaagagaaaagtaagcttgatgcagaagtctccaagtgggacgattctggcaatgacatcattgtgctggccaagcagatgtgtatgattatgatggaaatgaccgactttaccaggggcaaaggcccactgaagaacacaagtgatgtaatatctgccgcaaagaaaatcgcagaggctggctctcgaatggacaagttaggtcgtaccatagcggatcactgtccagatagcgcatgcaagcaggaccttctagcctacctgcagagaattgcactgtattgccatcagctgaatatctgttccaaggtgaaagcagaggtccagaatctgggtggtgagctggtggtctctggagtcgacagcgccatgtcgctcatccaggccgctaaaaacctgatgaacgcggtcgtgcagaccgtgaaagcgagctatgttgcatccaccaaatatcaaaagagccagggaatggccagcctaaacttaccggcagtttcatggaaaatgaaggcaccagagaagaagcctctggtcaaaagagaaaagcaagatgaaacacagactaagatcaagcgggcatcacagaagaaacacgttaacccagttcaagccctcagcgagtttaaagcaatggacagtatctag

SEQ ID NO: 27833 - DNA, 357 bp, synthetic construct
  misc_feature 1..357: note = Description of Artificial Sequence: Synthetic coding sequence
  source 1..357: mol_type = other DNA
atgaccgctgtccacgctggaaacatcaacttcaagtgggaccctaagagtcttgagatacggactttagccgttgagcggctgctagagccactggtaacccaggttacaactctagtgaataccaattccaagggtccatccaataagaaacgtgggaggagcaaaaaggcacacgtcctagccgctagcgtggaacaggccactgagaactttctagagaaaggggataagatcgccaaggagagccagttcttgaaagaagagttagtggcagccgtagaggacgtgaggaagcagggcgacctgatgaaggccgctgccggtgagttcgcagacgacccttgcagctcttag

SEQ ID NO: 27834 - DNA, 420 bp, synthetic construct
  misc_feature 1..420: note = Description of Artificial Sequence: Synthetic coding sequence
  source 1..420: mol_type = other DNA
atgaccgccgttcacgccggtaacattaacttcaagtgggacccaaaatccctcgaaatccgtacccttgccgtggaacggctgcttgaaccactggtcacccaggtgactacactcgtgaacacaaactctaagggcccatcgaacaaaaagagggggagatccaagaaggcacacgtgcttgccgcatccgtggaacaggccacagaaaactttctggaaaaaggagacaaaatcgctaaggagtctcagttcctgaaggaggaattggtagctgccgtggaggacgttagaaagcaaggcgatctaatgaaagccgcagcaggcgagtttgcagatgacccatgctcaagtgtaaagcgtgggaatatggtgcgggctgccagagcgttacttagcgcagtcactcgcctgctttag

SEQ ID NO: 27835 - DNA, 648 bp, synthetic construct
  misc_feature 1..648: note = Description of Artificial Sequence: Synthetic coding sequence
  source 1..648: mol_type = other DNA
atgacagccgttcatgctggcaacatcaattttaagtgggatcccaagtccctcgagatcagaacactcgctgttgagcgattgctggagcccctggtcacacaggtgactaccctcgtaaatacgaatagcaaaggtccgtcgaataaaaagcgcggtcgtagcaaaaaagcccacgtccttgctgcgtcagttgagcaggcgacagagaactttctggagaaaggagacaaaatcgctaaagagtctcagttccttaaggaagagcttgtggccgctgtggaagatgtgagaaagcagggtgatctgatgaaagccgctgccggagaattcgcagacgacccatgctcatcagttaagagggggaatatggtgcgagccgcaagggccctgttgtctgccgttacccgattgcttatcctggctgacatggccgatgtttataagctgctggtgcaacttaaggtcgtggaggacggcatcctgaagcttcggaacgctgggaatgaacaggatttgggcattcaatataaggctttgaaaccagaagtcgacaagctcaatatcatggctgccaagcggcaacaagaactgaaagacgttggccatcgggaccagatggccgctgctagggggatactgcagtag

SEQ ID NO: 27836 - DNA, 306 bp, synthetic construct
  misc_feature 1..306: note = Description of Artificial Sequence: Synthetic coding sequence
  source 1..306: mol_type = other DNA
atgacggctgtccatgccggaaacatcaactttaaatgggacccgaaatctctggagattagaaccctcgctgttgagcgcttgctggaaccgttggtcacccaggtcaccacattagtgaataccaatagtaaggggccttccaataagaaacgcggtcgctccaaaaaagcacacgtcctggcagccagcgtcgagcaggccacggaaaatttccttgaaaaaggcgataaaatcgcgaaagaaagtcaatttctgaaggaagaactggtggcagcagttgaggatgtaaggaagcaggggtag

SEQ ID NO: 27837 - DNA, 372 bp, synthetic construct
  misc_feature 1..372: note = Description of Artificial Sequence: Synthetic coding sequence
  source 1..372: mol_type = other DNA
atgactgccgtacatgctggcaacatcaactttaagtgggatcctaagagcttggaaatccgtacccttgctgtagagcgattgcttgaaccgctggtgacccaggttacaacacttgtgaataccaattctaaaggcccaagcaacaagaagcgcggtcggtctaaaaaggcccacgtgctcgcggctagcgtcgagcaggctaccgagaactttctcgagaaaggtgacaagatcgccaaagagtcccagttcctcaaagaagaattagtggcagccgtggaagatgtgaggaagcagggggatcttatgaaagccgctgctggggaattcgcagatgatccatgttcaagcgtaaagcgcggaaattag

SEQ ID NO: 27838 - DNA, 471 bp, synthetic construct
  misc_feature 1..471: note = Description of Artificial Sequence: Synthetic coding sequence
  source 1..471: mol_type = other DNA
atgacagccgtgcatgccggaaatataaactttaagtgggatcccaagagcctggagatcagaaccctcgcagtcgaacgcctgctcgagccattagtgacccaggtgacgacactcgtgaacaccaattcgaagggcccatctaacaaaaagcgcggtcggtcaaagaaagctcacgttctcgcggctagcgtggagcaggccacagagaactttctggagaaaggagacaaaatcgcaaaggaatcacagttcttaaaagaagagctggtggcggcagttgaggacgttcgcaaacagggcgatcttatgaaggcggcagcaggagagtttgctgacgacccctgctcatctgtgaaaagaggaaacatggtccgggcagctcgagctcttctctccgcagtgaccagactcctgattctagccgatatggctgacgtgtacaagctgctcgttcagctgaaggtgtag

SEQ ID NO: 27839 - DNA, 285 bp, synthetic construct
  misc_feature 1..285: note = Description of Artificial Sequence: Synthetic coding sequence
  source 1..285: mol_type = other DNA
atgaccgcagtccatgcaggaaatataaactttaaatgggaccctaaatcgttggaaatcagaacgttggccgtcgagcgcttgctggaacccctggttacacaggttacaaccctggttaatacaaatagtaagggtccaagtaacaagaaaagaggcagaagcaaaaaggcgcacgtattggcagcctctgtggagcaggcaaccgagaacttcttagagaaaggggacaaaatcgcaaaggagtcccaattccttaaggaagaactcgtggcagctgtctag

SEQ ID NO: 27840 - DNA, 2790 bp, synthetic construct
  misc_feature 1..2790: note = Description of Artificial Sequence: Synthetic coding sequence
  source 1..2790: mol_type = other DNA
atgacagccgtacacgctggtaatatcaatttcaaatgggatccaaagagtctggaaatacgtactttggccgttgaacgactcttggaacctttagttactcaggttacaaccctggttaacacaaatagcaagggtcctagcaacaaaaagagaggtcgaagcaagaaagcccacgtcctggctgcatcggtcgaacaggcaactgagaacttcctcgagaagggagataagattgctaaagaaagtcagttcctgaaggaagaactggtggccgcagtggaggatgtcaggaaacagggggatctgatgaaagccgcagctggcgagttcgccgatgatccctgctccagcgtgaaaagagggaatatggtgcgcgcagcccgagccctactgtcggctgtgactagattactgattcttgccgacatggctgacgtctataagctcctggtgcagttaaaagtagtcgaggacgggatcctgaaactgcggaacgccggtaacgaacaggaccttgggattcaatacaaggcccttaagccggaggtcgacaaattaaacataatggccgcaaagcggcagcaggagttgaaggacgtggggcaccgggaccagatggcagctgcccgtgggatactccagaagaatgtgcccatcctgtacaccgccagccaagcctgtttgcagcatccagatgttgccgcttacaaggccaatcgcgaccttatctataaacagttacaacaggcagtgactggaatctcaaacgctgcccaggctacagcctctgacgacgcttcgcagcaccaggggggtggcggaggggaattagcctatgcactgaataactttgacaaacagatcattgtagaccccctgagttttagcgaggagcggttcaggccctccctggaagagaggctggaatccatcatctcgggggcagccctcatggctgacagctcctgtacccgtgatgatcgccgtgagcggatcgtagcagagtgcaatgcagttaggcaggccttgcaggacttgcttagtgagtacatggggaacgcaggccgaaaagagcggtccgacgcccttaactccgccatcgacaaaatgaccaagaaaacgagggatttacgtcgacaactccgaaaagctgtgatggatcacgtgagcgattcttttctggaaaccaacgttccccttcttgtcttgatagaggcagcgaaaaatggcaacgaaaaggaggtgaaagaatatgcgcaggtctttcgagagcacgcaaataaattaatcgaggtggccaacctagcttgttccatctctaacaacgaagagggagtcaaactggtccgcatgtccgcctctcagctagaggccctttgcccccaggtaatcaatgcggcattagctctggccgcaaagccccaatcaaaactggcacaggaaaatatggatctattcaaggagcagtgggaaaagcaggtgcgtgttctgacagacgctgtagatgatatcacctccatcgatgactttcttgccgtatctgagaatcacatactcgaagatgtcaacaaatgcgtgattgccttgcaggagaaggacgtcgatggcctggaccgaaccgctggagccattagaggcagggccgctagagtgattcacgtggtgaccagcgaaatggacaattacgaacctggggtctacacggagaaggtgttggaagcaaccaagcttctctcaaatactgttatgccacgattcacagagcaggtagaggccgctgtagaggccctgtcctccgatcccgcacagcctatggacgagaatgagttcattgatgcctcccgcctagtgtatgacggaattcgggatatacgtaaggcggtgcttatgatacgtacacctgaggaactggatgacagcgactttgaaacggaggatttcgatgtacgaagcagaacttcggtgcagactgaggatgaccagctgattgctggacagagcgcccgagccattatggcccagctcccgcaagagcagaaagctaaaatcgccgagcaggttgcctcctttcaggaagagaaatcaaagctagatgctgaggtatccaaatgggatgattctggaaatgatattattgtcttggccaaacagatgtgcatgatcatgatggaaatgacagatttcaccaggggcaagggccctctgaagaacacatccgatgtgattagcgcggcaaagaagatagcagaggcgggatctaggatggacaagttgggcagaactatagcggatcactgtccagattccgcttgtaagcaggatctccttgcttatctgcagaggattgccctgtattgccaccaattgaacatctgctcaaaggtaaaggccgaggtccagaacctgggcggtgagttagtggttagcgggaattgcgacacctgtggagccttacagggattgaaagggtggccccctcctctgtgtgccacccattgggtcgatagtgcaatgtcgctgatccaggcggctaaaaacctaatgaatgcagttgtgcagaccgtgaaggcatcctatgtcgcatctactaaatatcaaaaaagtcagggcatggccagtctgaatctgcccgctgtgagctggaagatgaaggcgccagagaaaaaaccactggtgaagcgagaaaaacaagatgagacacagaccaagataaagcgagcgagccagaagaaacacgtcaaccctgtgcaagcactgtctgaatttaaagcaatggattccatttag

SEQ ID NO: 27841 - DNA, 1611 bp, synthetic construct
  misc_feature 1..1611: note = Description of Artificial Sequence: Synthetic coding sequence
  source 1..1611: mol_type = other DNA
atgaccaagaagactcgagacttgaggcgtcagctgaggaaggcagtgatggatcatgttagcgattcttttcttgagactaacgtgcccttgctggtactcatcgaagctgcaaaaaatggaaacgagaaggaggtcaaggagtatgctcaggtgttccgagagcatgccaacaaactgattgaggtggccaatctggcttgttccattagcaacaatgaggagggtgtcaaacttgtaaggatgagcgctagtcaactcgaagcgctctgtcctcaggtcatcaatgccgctctggccctggccgcaaagccacagagcaagctggcgcaggagaatatggaccttttcaaggagcagtgggaaaagcaggtccgagtgttaaccgatgctgtggatgatattactagcatcgacgattttctagccgtcagcgaaaaccacattctcgaggatgtcaataaatgcgtcattgcactgcaggaaaaggacgtggatgggctggacagaacagccggagctatccgaggacgcgcagccagggtgatccacgtagtcacatccgaaatggataattacgaacctggagtatatacggaaaaggttctcgaggcaactaagctcttaagcaataccgtgatgcctcggttcaccgaacaggtggaagctgctgtcgaggccctgtcctcagaccccgcacagcccatggatgagaacgaattcattgatgcctccaggctggtgtacgatggcatcagagatattaggaaagcagtcctgatgatccgaacacccgaggagttagatgactccgattttgaaacagaggattttgacgtgaggtccagaacctccgtgcagaccgaggacgatcagctgatcgctgggcagtccgccagagctatcatggcccagcttccccaggagcagaaagctaagatcgccgaacaggttgccagttttcaagaagaaaaatctaaattagatgccgaagtcagcaagtgggacgactcgggtaatgatattatcgttctcgcaaaacagatgtgtatgatcatgatggagatgaccgatttcactagaggaaaaggaccgctcaagaacaccagtgacgtgatctcagccgcaaaaaagattgcagaggctggctctcggatggacaaactgggaaggacaattgcagaccactgcccagactccgcctgcaagcaggacttgcttgcctatcttcagcgaattgccctttactgccatcagcttaatatctgctctaaagtaaaggccgaggtgcagaatttgggcggagagctggtcgtaagtggagttgacagtgcgatgagcctgatacaggccgcaaaaaatctgatgaacgcagtcgtgcagacagttaaggccagctacgtcgcatctaccaaatatcagaagagccagggcatggctagcctcaatcttccggcagtctcttggaagatgaaggcgccagagaaaaagcccctagtcaaacgcgaaaagcaggacgagacccagacaaaaattaaacgggcttcccagaagaagcacgtcaatcctgtgcaggctctttcagaatttaaagcaatggactccatctag

SEQ ID NO: 27842 - DNA, 2676 bp, synthetic construct
  misc_feature 1..2676: note = Description of Artificial Sequence: Synthetic coding sequence
  source 1..2676: mol_type = other DNA
atgaccgccgtgcatgcgggtaacatcaatttcaaatgggatccaaagagtctggagattaggaccctagcagtggaacggctgctggagcctctagtgacacaggtcacaacccttgtgaataccaattccaaaggcccttcaaataaaaaaagaggaaggtccaaaaaggctcacgtgctggcagccagcgtggagcaggccaccgagaattttctcgagaaaggcgacaagatagcaaaagaatctcagttcttaaaggaggagctagtggccgctgtcgaggatgtgaggaaacaaggggatcttatgaaagccgctgcgggagagttcgcggacgatccctgttcgtctgtgaaacgaggaaacatggtccgagccgcaagggcgcttcttagcgcagttactagactcctcaaagtggtggaggacggcatcctcaagctccggaacgcagggaatgagcaggatttaggcattcagtacaaggcccttaaaccagaagttgacaagctcaacatcatggccgcaaaacgacagcaggagcttaaggacgttgggcacagggatcagatggccgctgctcggggtatccttcagaagaacgtcccaatcctgtacaccgcgtctcaggcctgcctgcagcaccccgatgtggccgcttacaaagccaaccgagatctcatctacaaacagctgcagcaggctgtcacgggtatctcaaacgctgcccaggccaccgcgagtgacgacgctagccagcaccaggggggaggcggtggagagttagcctacgccctgaataactttgataagcagatcattgttgatccactgagttttagcgaagaacgatttaggccctcactggaagaacggttggagtctattatttccggtgccgctcttatggccgattcctcttgcacacgggacgaccggagagaaaggatcgtggcagaatgcaacgctgtgaggcaagccctccaagacctgctctccgagtatatgggaaatgccggacgaaaggagcgctcagatgccctaaacagtgcgatcgacaagatgacaaagaaaacgcgggatctgcgtcgccaactcagaaaagccgtaatggaccacgtctctgattcatttcttgagactaacgttcctctcctggtccttatcgaagcagccaagaacggtaacgagaaagaagtgaaggaatatgctcaggtatttcgagagcacgcgaacaaactgatagaagttgctaatctggcttgctccatttccaataacgaagagggagttaaactcgtccggatgtctgcgagtcaactggaagctctctgtccacaagtcattaatgccgcattggcacttgcggctaagccacagagcaagctggctcaggagaacatggatctgttcaaagagcagtgggagaaacaggtacgcgtgctgacggacgctgtggatgacataacctcaatcgacgactttcttgccgtgagcgagaaccatattctggaggacgtaaacaaatgtgtgattgcactgcaagaaaaggatgttgacggcctggaccggacagccggagccattcggggtcgggctgcgcgagtcatccacgtcgtaaccagcgagatggataactacgagcccggagtgtatactgagaaggtgctcgaggcaaccaagctgttaagcaatacggtgatgcctagatttacggaacaggtagaagccgctgtggaagccttatctagtgaccccgcacagcccatggacgagaacgaatttatcgatgcttcccggttggtttacgacgggatccgggacatccggaaggccgtcctcatgattcggacccctgaagagctcgacgacagcgacttcgaaaccgaagatttcgacgtccgttcccgtacctctgtccagaccgaggatgaccagctgattgctggccaatcagccagagcgattatggcacagctccctcaggagcagaaagccaagatcgctgaacaagtagcctcttttcaggaggaaaaatctaagctcgacgccgaggtgtctaaatgggatgatagtggtaacgacataattgtcctagctaaacagatgtgtatgatcatgatggaaatgactgacttcacaagaggcaagggcccactgaagaataccagcgatgtgataagcgcagcgaagaagattgcagaggctgggagccgcatggataagttgggaaggaccattgctgaccattgccctgactcggcatgcaagcaagacctgctagcttacttgcaacggattgctctgtactgtcaccaactgaacatatgcagtaaggttaaagctgaggtgcagaatcttgggggagagctagtggtgtctggggttgactcagccatgtctctcatccaagcagcgaagaatctcatgaacgcggtggtccagaccgtaaaggccagctacgtggcttccaccaagtaccagaagtctcagggaatggcatccctgaacctgcctgcagtgtcatggaaaatgaaggccccagaaaagaaaccactagtaaagcgcgagaagcaggatgagacacagaccaagatcaagagggccagtcaaaagaaacatgtgaacccagttcaggcattgtcagaattcaaggctatggactcaatttag

SEQ ID NO: 27843 - DNA, 2346 bp, synthetic construct
  misc_feature 1..2346: note = Description of Artificial Sequence: Synthetic coding sequence
  source 1..2346: mol_type = other DNA
atggccacacaggctgatctgatggagctggacatggccatggaaccagacaggaaagcagccgtgagtcattggcagcaacagtcgtacttggactccggaatacacagcggagccactaccactgcaccctctttaagcggaaaaggcaatcccgaagaagaggatgtggatactagccaggtcctgtacgaatgggaacagggcttctctcaatctttcactcaagaacaggtggcagacatagatgggcagtacgccatgactagggctcagcgagtccgcgcagccatgttccccgaaaccctggatgaaggtatgcagattcccagtacccagttcgatgcagcacatcccactaatgtgcagcgtcttgctgaaccttctcagatgctgaaacatgccgtagtcaatctaatcaattatcaggacgacgcagagctggctacccgcgctattccagagcttactaagcttctgaacgatgaggatcaagtggtggtgaataaagcggcagtcatggtacaccaattatcgaaaaaggaagcctccagacacgctatcatgcggagtccccagatggtgagcgcgatcgtgcgcacaatgcagaataccaatgacgtcgagacagcacgctgcactgcaggaacactgcacaatctgagtcaccatagggaagggctgctggccatctttaagtccgggggtattccggctctggtcaagatgctgggatcacctgtggattcggtactgttctacgctataactactcttcataatttactgctgcatcaggagggagcaaaaatggcagttcgtctcgccggaggtctgcagaaaatggtagcgctgctgaacaagacaaacgttaagttcctagccatcacgaccgactgcctccagatcctcgcatatggtaatcaagagtcaaaactgataattctcgcgtccggtggccctcaggccctggtcaatattatgagaacgtatacctacgaaaagctactgtggacgacgtcccgcgtactgaaggtcctttctgtgtgcagttcaaacaaacctgcaatcgtcgaagcagggggaatgcaagcacttggcttgcacttgaccgacccctctcagagacttgtccagaattgtctttggacactgcgcaacctgagtgatgctgctacaaaacaggagggaatggagggattactgggtacacttgtgcaactactaggcagcgatgacatcaatgtggttacttgcgccgcaggcatcctttcaaatctcacttgcaacaattacaagaacaagatgatggtgtgtcaagttgggggtatagaagctctcgtcaggactgtgctgcgggctggagatcgcgaagatataacggagccggctatatgcgcactccgacatctaacatcacgccatcaggaagccgaaatggcgcaaaacgctgttaggcttcactatggtttaccagtggtggtaaagctacttcacccgcctagtcattggccactcattaaggctaccgttggcctcattcgcaacctcgccctctgtccggctaatcacgcaccactgcgcgaacagggcgcaatccccaggctcgtccaactgttagtacgtgcccaccaggacacacaacgaagaactagcatgggaggcacacagcaacaattcgttgagggcgtcaggatggaagagattgtggagggctgtaccggggcattacatattttggctagggatgtgcacaataggatcgtgattaggggcctgaacaccattcctctgtttgttcaacttttgtactcccccattgaaaacatccagcgggttgctgctggtgttctttgtgagctcgcccaggacaaagaggctgctgaggccatagaagctgagggtgccacggctccgctgacagagttgctgcactctcgtaacgagggcgtggccacctacgccgctgccgtgttgttccggatgagtgaagataagccacaggactataagaagaggctatctgtggaactcacgagttctctgttccggacagaacctatggcctggaatgaaactgccgatctggggttagacataggcgcacagggggagccactcggctataggcaggacgatccctcttatagatcctttcatagcggcggatatggccaggacgcccttggcatggaccctatgatggaacatgagatgggcggtcatcatccaggcgctgactatccagtcgacggcttgcctgacctgggtcacgctcaagacctaatggacggtttgcctcccggtgattccaaccagttggcatggtttgataccgatttgtag

SEQ ID NO: 27844 - DNA, 2346 bp, synthetic construct
  misc_feature 1..2346: note = Description of Artificial Sequence: Synthetic coding sequence
  source 1..2346: mol_type = other DNA
atggccacccaggcagacttgatggaattagacatggccatggagccggacagaaaagcagcagtgagtcactggcaacagcaaagctatctggattcaggaatacattccggagcaacaacaactgcaccatctttgagcggcaagggcaacccggaagaggaggatgtggatactagtcaagtgttgtacgaatgggaacagggcttctcccaatcattcacccaggagcaggtcgccgacatcgacggccagtatgcgatgacccgcgcacagagggtccgggcagcaatgtttccggagaccctggatgaagggatgcagattccatctactcagtttgatgccgctcatcctactaacgttcagcgtctggccgaaccttcccagatgctcaagcacgccgtggtcaacttaattaactaccaggacgatgccgagttggctacgcgggcaattcccgagttgactaagctcttgaacgacgaggatcaggtggtagtgaataaagccgctgtgatggtgcaccagttaagcaagaaagaagctagccggcatgctatcatgagatctccacagatggtttctgccattgttcgaactatgcagaatacgaacgatgtggaaacggcacgttgcacggctgggacactgcacaatctaagtcaccaccgcgagggcctgctagctatcttcaagtcaggtggcattcccgctctggtcaagatgctcggctcacccgtggacagcgtactcttctacgctatcactactctacataatctgctcctccatcaggagggagcaaaaatggccgtgcggctggccggaggcttgcagaagatggtcgctctcttaaataagacgaacgtgaagttcttagcaattacgactgactgcctacagatcctagcatacggaaaccaagagtccaagctcattattttggcctctggcggtccccaggccctggtcaatattatgcgcacctacacctacgagaagctcctctggaccaccagccgggtgttgaaggtattatccgtgtgtagttccaataaacccgctattgtcgaagccggtgggatgcaggctctcggtttgcacctgaccgacccgagccagaggctcgttcagaattgcttgtggaccttgagaaacttgtcggacgcggctaccaaacaggagggaatggagggtctgctaggcactctggtacagctactgggctctgatgacatcaacgtggtcacttgcgcagctggaatactgagcaatttgacttgcaacaactacaagaacaagatgatggtatgtcaagtgggtggcatagaggcactggtacgcactgtgttgcgggctggagaccgggaggatatcacggaaccggctatatgcgccctgagacatttgacaagcagacaccaagaggcagaaatggcccaaaacgctgtacgccttcactacggattgcccgttgtggttaagctcttacatcctcctagtcattggccgctgattaaggcgaccgtcggactcatccggaatctcgccctctgtcccgcaaaccacgcgcctctgagagagcagggagccattccgcgtctggttcaactgttggtaagggcccaccaagacactcagcgcagaaccagtatgggcggtacacagcagcagtttgttgagggcgtgcgtatggaagagattgttgagggttgcacgggtgccctccacatcctcgcccgagatgtgcataaccggattgtcatccgtgggttaaataccatcccactctttgtgcaactgctgtactcccccattgaaaacatccagcgggttgctgccggtgttctctgcgaactcgcccaggacaaagaggccgctgaggccattgaggcggaaggagccacggcccctctgaccgagctactgcatagtcgtaacgagggggttgcaacgtatgccgctgctgtactgtttaggatgtcagaggacaagccccaagattacaagaagagattgagcgtggagctaacttcatcccttttccgtacagagcctatggcgtggaacgagacagcggatctaggtctggatatcggtgcgcagggtgagcccctcggttacaggcaagatgacccttcctatcgctcctttcacagtgggggatacggccaagatgccctaggtatggaccccatgatggagcacgaaatgggaggtcatcatcctggtgctgattacccagtggatgggctacctgatctcggccatgcccaagaccttatggacgggcttccgcctggggatagtaatcagctggcgtggttcgacacggacttgtag

SEQ ID NO: 27845 - DNA, 2346 bp, synthetic construct
  misc_feature 1..2346: note = Description of Artificial Sequence: Synthetic coding sequence
  source 1..2346: mol_type = other DNA
atggcgacacaggcggacttgatggagcttgacatggccatggagccagaccgcaaagctgcagtctcacattggcagcagcagtcttacctggatagcggcattcactctggcgctaccactaccgctcctagtttgagtggaaaaggcaaccccgaggaagaagatgtagataccagtcaagtgctgtacgaatgggaacagggcttttctcagtctttcacccaggaacaggtggcagacattgatggtcagtacgccatgactcgagcccaaagagttagagctgccatgttccccgaaaccctggacgaaggaatgcagatccccagcacacagtttgacgcagcacaccctaccaacgtccagagactcgcagagccatcccagatgctgaagcatgccgtagtaaacctcattaattatcaggacgatgctgagctcgctacaagggcaatccctgagcttaccaagctgcttaatgatgaagatcaggtggtagtcaacaaggccgctgttatggttcaccaactcagtaaaaaggaggctagtcgacacgccattatgcgatctccccagatggtgtcagccattgtccgcacaatgcagaacaccaatgacgtggagaccgcgagatgtactgccggaacgttacacaacctgtcccaccatcgcgagggcctgctggctatattcaagtccggcggaattcccgctttagtgaaaatgctgggatctccggttgactccgtgctcttctacgcaattactacgctgcacaacctcttgctgcatcaagagggagccaaaatggctgttcgcctggctggcggtctgcagaaaatggtggcattgttgaacaaaactaatgtgaagttcctggccatcaccaccgactgtctacagatactggcctatgggaaccaggagagcaaactgatcatcctcgcatctgggggaccacaggctctggtcaacataatgcgcacttatacgtatgagaaattgctgtggaccactagtagagtactaaaggtcctgtctgtatgctcaagtaataaacctgccatcgtggaagccggagggatgcaggcactagggctacacctaacagacccaagtcagcgacttgtgcagaactgtttgtggactctgagaaacctctccgatgcagccacgaagcaggagggtatggagggattgctgggcacgctggttcagctgctcgggtctgatgatattaacgtcgtcacatgcgcagcaggtatcctgtcaaatttaacgtgcaacaattataaaaacaagatgatggtttgccaagtgggaggaatcgaagcgctcgttcgcactgtgctacgcgcaggggatcgggaggatataactgaaccggcaatctgtgccttaaggcacttgacatcccgccaccaagaggcagagatggcccaaaatgccgtcagattgcattatgggctgccggtggtcgtgaaactcctgcaccccccatcacattggcctctgattaaggcaaccgttggacttatcaggaacctggcgctgtgccccgctaaccacgccccattgcgggagcaaggcgctatcccacggctcgtacagctgctagtgagagcacatcaggacacccagaggagaacatctatgggaggaacgcagcagcaattcgtggagggcgtgagaatggaggagatagtggaagggtgtaccggagccttgcatatcttggctagggatgttcacaatagaatcgtgatcaggggtttgaacaccattcccttattcgttcagctcttatactcccccatagagaatatccagcgagtggctgcaggcgtcctgtgtgagctcgcccaagacaaagaggctgccgaagccattgaagcagaaggcgcaactgcgcctctcaccgaactgttacatagtcgcaacgaaggggtagccacgtacgcagctgccgtgctttttcgaatgagcgaagataagccacaagactacaaaaaaagattatcggtggaactgacatccagtctatttcgaacagaacctatggcctggaacgaaaccgctgacctgggcttggacatcggagcccaaggtgagccactgggatacagacaagacgacccttcctacaggagttttcacagcggagggtacggccaagatgccttaggcatggatcccatgatggagcacgagatgggcggacatcaccccggtgctgattaccccgttgatggcctccccgatctggggcatgcgcaagacttgatggatggcctcccgccaggcgactccaaccagcttgcatggtttgatacagatctctag

SEQ ID NO: 27846 - DNA, 2346 bp, synthetic construct
  misc_feature 1..2346: note = Description of Artificial Sequence: Synthetic coding sequence
  source 1..2346: mol_type = other DNA
atggccacgcaggctgatttaatggaactcgacatggccatggagccagaccgcaaagcagctgttagtcattggcaacagcaatcctatctcgatagcgggattcattctggggctactacaactgccccatccctgtccggtaagggtaatccggaagaggaggacgtggatacgtctcaggttctgtatgagtgggagcaggggttctctcagtcatttacccaggagcaggtcgctgacatcgacggccaatacgctatgacccgagcccaaagggttcgcgctgcgatgtttcctgaaacactggacgaaggcatgcagattccctctactcagtttgacgccgcacaccccactaacgtgcagcgacttgctgaaccctcacaaatgttgaagcatgccgttgtaaacctcatcaactatcaggatgacgccgagctggccacccgcgcaataccggaactgacaaaactccttaacgacgaggaccaggttgtcgtgaacaaggcagctgtcatggtacaccagctgagcaaaaaggaagcatctcgacacgcgatcatgaggtcaccccagatggtgtccgcaattgtgaggaccatgcagaataccaatgacgttgaaaccgcaaggtgtaccgcaggaacactgcacaatctcagtcaccacagagaagggctgctcgctattttcaagagtgggggaatcccagctcttgttaagatgctgggctctcccgtggacagtgtactattttacgccatcacgaccttacacaacctcttacttcatcaggaaggggcaaagatggccgtgcgcctggcaggcggtttgcaaaaaatggtggccctgctgaataaaacaaacgtaaagttcctagcgatcactaccgactgcttgcagatcttagcttatggcaaccaagagtcaaagctgattatcctagcgtccggaggccctcaggcgctcgttaacatcatgcgcacatatacttacgaaaagctcctttggacaacaagccgagtgctgaaggtgctttctgtgtgctcatctaataagccagctatcgttgaagcgggaggtatgcaagccctaggactgcacctgaccgacccatcccagcgccttgtgcagaactgtctgtggactctcagaaatctctcagacgccgcaacaaaacaggaagggatggaggggttgctcggcaccttggtgcagctcctggggtctgacgatatcaacgtagttacatgcgcggcagggattctgtcgaatttgacatgcaataactacaagaataagatgatggtgtgccaagtgggaggaattgaggcccttgtccgcaccgttttacgagcgggagaccgagaggatattaccgagcctgccatttgcgcccttcggcatcttacatctaggcaccaggaggcagagatggctcaaaacgcagtgcgtctacattatggattacccgttgttgtgaaactgctgcatccgcctagtcattggccactgattaaagccacagtagggctaattcgcaacctggcactttgccccgctaaccatgccccactccgggagcagggtgcaatacctagactcgtgcagctgctggtcagagcccatcaggatacgcagaggaggacctctatgggtggcacacaacaacagtttgtcgaaggcgtaagaatggaggaaatcgtcgaagggtgcaccggggctctgcacattttagccagagatgtgcacaatcggatagttatccgaggactgaatacaattccactctttgttcagctattgtacagtcctatagaaaatattcagagggtcgcggctggcgttctgtgcgaactcgcccaggataaggaggctgcagaagcaatcgaagccgaaggtgctaccgctcccctcaccgagctgttacattccagaaatgaaggcgttgccacatatgcagcagccgttttgtttcggatgtcagaggacaaacctcaggactataaaaaaaggctatctgttgaactcacttcctccttgttcaggactgaacctatggcatggaacgaaacagccgacttgggcctcgacattggagcgcagggagaaccgcttgggtatcgccaggacgacccttcttacagatcattccactccggtgggtacggccaggacgcccttggcatggatcctatgatggagcacgagatgggaggccaccaccctggtgcagattaccctgttgacggattgcctgatctcggccatgctcaggatttaatggatggccttccgcctggagacagtaaccagctcgcgtggtttgacactgacttatag

SEQ ID NO: 27847 - DNA, 453 bp, synthetic construct
  misc_feature 1..453: note = Description of Artificial Sequence: Synthetic coding sequence
  source 1..453: mol_type = other DNA
atggccacccaagccgacttgatggaactggatatggccatggagcccgatcgaaaagccgctgtgtcccactggcaacagcagagctacttagattccggtatacacagtggagcgaccactacagcgcctagtctatcagggaaaggaaaccctgaggaagaagacgttgacaccagtcaagttctttacgaatgggagcagggcttcagccagagcttcacccaagagcaagtggcagacattgatggacagtacgccatgactagggcccaacgggtgcgcgctgctatgttcccggagaccctggatgaaggcatgcagataccttcaacacagttcgacgctgcacaccctacaaacgtccagcgcttagctgagccgtcacaaatgctcaagcatgctgtggtgaatctgatcaactaccaggacgatgcagagcttgccacttag

SEQ ID NO: 27848 - DNA, 42 bp, synthetic construct
  misc_feature 1..42: note = Description of Artificial Sequence: Synthetic coding sequence
  source 1..42: mol_type = other DNA
atggcaacccaggcagatttaatggaactggatatggcttag

SEQ ID NO: 27849 - DNA, 303 bp, synthetic construct
  misc_feature 1..303: note = Description of Artificial Sequence: Synthetic coding sequence
  source 1..303: mol_type = other DNA
atggccacacaggccgatctcatggaactggatatggctatggaacctgaccgcaaggctgcggtttctcattggcagcagcaatcctacctggactccggcattcattccggagcaaccactaccgccccatccctaagcgggaaaggcaaccccgaagaggaggacgtggacacctctcaagtgctgtacgaatgggaacaaggcttttcccagtcctttacacaggaacaggttgctgatattgacgggcagtacgcaatgacccgggcacagcgggttagggcggcaatgtttccgtag

SEQ ID NO: 27850 - DNA, 327 bp, synthetic construct
  misc_feature 1..327: note = Description of Artificial Sequence: Synthetic coding sequence
  source 1..327: mol_type = other DNA
atggctactcaagctgatttgatggaactggatatggccatggagccggatagaaaagctgccgtgtctcactggcagcagcagtcctacctcgatagcggtatccattccggggcaaccacaactgctcctagcctctccggcaagggcaatccagaagaggaggacgtggatacgagccaggtgctctacgagtgggagcaggggttcagtcagagctttactcaggaacaggtggccgatattgatgggcagtatgcgatgacccgagctcagagggtgagagctgctatgttccccgagactctcgacgaagggatgcaatag

SEQ ID NO: 27851 - DNA, 2325 bp, synthetic construct
  misc_feature 1..2325: note = Description of Artificial Sequence: Synthetic coding sequence
  source 1..2325: mol_type = other DNA
atggagctggacatggctatggagcccgacagaaaagcagcggtgtctcactggcagcagcagtcctatctcgattccggaatccacagcggcgcaaccacgactgcacccagtttgagcggcaagggtaatcccgaagaagaagatgtcgatacctcccaggtgctctacgaatgggagcagggattctctcagagctttacacaggaacaggtggccgacatcgatgggcagtatgcaatgactcgcgctcagcgcgtgagagcggcaatgttccctgaaaccctggatgagggaatgcagatcccctcaacgcagttcgacgcagcacatccgacgaacgttcagcggcttgccgagccttcccagatgcttaaacatgctgtggttaatctgatcaactaccaggacgacgccgaactcgcaacccgcgctattcctgaactcacgaagctattgaacgacgaagaccaggtggtggttaataaggctgcagtcatggttcatcaactgtcgaaaaaagaagcgtccagacacgcaatcatgcgatctccccagatggtttccgcaattgtgcggaccatgcagaatacaaacgacgtggaaacagccagatgcaccgctgggacactgcacaacctcagccatcaccgcgaaggacttttggcaatattcaagtccggaggtatacccgcattagttaaaatgctcggtagcccagtggactcggtcttgttctacgctattacaacactgcacaatttactgttacaccaagagggggctaaaatggccgtaagactggcgggagggctgcaaaagatggtggccctgctgaacaaaactaatgtcaagttcctggccatcactacagactgtttacaaatcctcgcctatggaaatcaagaatccaagcttattatcttggcctcaggtggacctcaagctcttgtcaatatcatgaggacatatacgtacgagaagctcttatggacgacaagtagagttttaaaagtgctcagcgtttgcagctctaataaaccagccatcgtcgaagccggagggatgcaggctcttggacttcatctcactgatccgtcccaacggctggtgcagaactgtttgtggacactgcgcaacttgtctgatgcggctaccaagcaggagggtatggagggtctcttgggaactctggtccaattgctgggaagcgacgacattaatgtggtgacttgcgcagcagggatcctctcaaacctaacctgcaacaattacaagaacaaaatgatggtctgtcaggtgggaggaatagaggcactcgtgcgcacagtcctgagagccggagatagggaggacatcaccgaaccagccatttgtgcgctgagacacctaacaagccgccatcaggaggccgagatggcacagaatgccgtcagattacactatggcctccctgtggtggtgaaacttctccaccctccttcccattggccgcttatcaaggctacagttggtctgatccgaaacttagccctgtgtcccgcaaatcatgcccctctgcgcgagcagggggctattcccaggctagtgcagctgctggtgcgtgcacaccaggatactcagcgacgaacatcaatgggcggtactcagcaacaatttgtggagggggtaagaatggaagagattgttgaaggctgcactggcgctctccatatcttagcgcgagacgtgcataataggatcgtgatccgaggcctgaatactatccctctattcgtccaactgctgtacagtccaatcgaaaatattcagagagtggctgccggagtgctctgcgaattggctcaggacaaagaagccgctgaggccattgaagccgaaggcgcaactgcccctctgaccgaactgctgcactcaagaaatgaaggagtggcgacttacgccgctgcggtgctcttccggatgagcgaagacaaaccgcaagattacaagaaacgcctttccgtggagctaactagctcactgtttcggaccgagcccatggcatggaatgagactgcggaccttggcttggacatcggggctcagggtgagccactgggttatcgacaagatgatccctcataccggtcattccactccggcggatacggccaggatgctctaggtatggatcctatgatggaacacgaaatgggtggacaccaccccggagccgattatcctgtggatggtctccccgacctggggcatgcacaggacctgatggatgggttgccccctggcgactcaaatcaacttgcatggttcgatacagacctctag

SEQ ID NO: 27852 - DNA, 1020 bp, synthetic construct
  misc_feature 1..1020: note = Description of Artificial Sequence: Synthetic coding sequence
  source 1..1020: mol_type = other DNA
atgtggcaattgtgggcctccctctgttgtctgctggtgttggccaacgccagaagtagacccagctttcaccccctgagtgatgaactcgtgaattacgtgaacaagaggaatacgacatggcaagcaggacacaatttctataatgtggatatgtcctatctgaagcgactctgtggcacctttctcgggggtccaaagccaccacaacgggttatgttcacagaggatctcaaactcccagcgagcttcgacgcccgagagcagtggcctcagtgccccaccatcaaggaaattagagaccagggatcttgtgggtcttgctgggctttcggggctgtggaagcaatctcggacaggatctgcatccataccaatgctcacgtcagcgttgaggttagtgctgaggatctgcttacttgctgcggatccatgtgcggggatggctgcaacggcggataccctgcagaggcatggaacttttggacacgaaagggcctggtcagcggtggcttatacgagagtcacgtcggctgtagaccatattctattccaccttgcgaacatcacgtaaacgggtctagacctccttgcacgggagagggagacacgccaaagtgttcaaagatttgtgaacctgggtattccccaacatataagcaggacaagcactatggctacaattcctattccgtgtcgaacagtgagaaggacattatggcagagatatacaagaatgggccagtggagggagcattcagcgtctactctgactttctgttgtacaagagtggtgtctaccagcacgtgacaggagagatgatggggggacacgcaatccggatcctgggatggggagtggaaaatggcacaccctactggttagtagcaaacagttggaacaccgattggggtgacaatgggttcttcaaaattctgcgcggacaagatcactgtggtattgagagtgaagtggtggctggcatcccacgtaccgatcagtattgggagaagatctag

SEQ ID NO: 27853 - DNA, 1020 bp, synthetic construct
  misc_feature 1..1020: note = Description of Artificial Sequence: Synthetic coding sequence
  source 1..1020: mol_type = other DNA
atgtggcaactgtgggcatctctgtgttgtctcctcgtactggccaatgccagaagcagaccttctttccaccccctgtcggatgagctggttaactacgtgaataagcggaatactacatggcaggctggtcacaatttttataacgttgatatgagctacttaaagagactatgtggcacctttctgggtgggcctaagcctccccagcgggtgatgttcactgaggacctcaagctgcctgcgagctttgacgccagggaacagtggcctcagtgccccactatcaaggaaattcgcgaccaggggtcatgcgggagctgttgggccttcggcgctgtcgaagcgattagcgatcgtatatgtatccataccaacgcccatgtatcggtggaagtctccgctgaggatctgctgacatgctgtggcagcatgtgtggggacggctgcaatgggggttacccagccgaagcctggaacttctggaccagaaaggggctcgtgagcggcggtctgtacgagtcccatgtggggtgtcgcccttacagtatcccaccatgtgagcaccatgtgaacggaagtcgtccaccctgcacgggcgaaggtgatacacccaagtgcagcaaaatttgtgaacccggatatagcccaacctataagcaggataagcactacggatataactcttattctgtgtccaactctgagaaagatatcatggcagaaatttataagaacgggcctgtcgaaggagcatttagtgtctactcggacttcctgctttacaagtccggtgtctaccagcacgttacaggagagatgatgggcggacacgccatcaggatcctgggatggggtgttgagaacgggaccccgtattggttggtagccaacagttggaatacagactggggcgataatggctttttcaagatccttaggggccaggatcattgtggcattgagtctgaggtcgtggctggtataccacggacagaccaatactgggaaaagatatag

SEQ ID NO: 27854 - DNA, 333 bp, synthetic construct
  misc_feature 1..333: note = Description of Artificial Sequence: Synthetic coding sequence
  source 1..333: mol_type = other DNA
atgtggcagctatgggcttcattgtgctgtctgctcgtccttgccaacgctaggagtagaccttcattccaccctctgagcgacgaactagtaaactatgttaataaacgaaacactacctggcaggctggccataatttctacaacgtggacatgtcttatttgaagcggctctgtggcacttttctcgggggtccaaagcctccccaaagggtaatgtttaccgaggatctcaaactaccggctagcttcgatgcccgagaacaatggccccagtgtccaacgataaaggaaattagagatcagggctcatgcgggagctgctggctgtag

SEQ ID NO: 27855 - DNA, 1020 bp, synthetic construct
  misc_feature 1..1020: note = Description of Artificial Sequence: Synthetic coding sequence
  source 1..1020: mol_type = other DNA
atgtggcagctgtgggcctctttatgttgtctgctggttcttgcaaatgcgcgttctaggccctcctttcaccccctttctgacgaactagttaattatgtcaacaagcgcaacacgacttggcaagccggacacaacttttataacgttgacatgagctaccttaagcggctttgcgggacatttctgggcggtcctaaaccaccccagcgagtcatgtttacagaggatctgaaactgccagcctccttcgatgccagagaacagtggccacagtgccccacaattaaggagatcagagaccaaggttcttgtggctcttgctgggctttcggagccgttgaagctatctccgaccgaatctgtatccacaccaacgctcacgtgagtgttgaagtgtccgccgaggaccttctcacatgttgcgggtcaatgtgtggggacggctgtaatggcggatacccggctgaagcatggaacttctggacgcgcaagggtttggtcagcggcggattatatgaatctcatgttgggtgccgtccctactccatccccccatgtgagcaccacgtgaacggctctagaccaccttgcacaggcgaaggtgacacccccaaatgttccaagatctgtgaacccggatatagcccgacttacaagcaggataaacactacgggtacaatagctatagcgtcagcaattccgagaaggacatcatggctgaaatctataagaacgggccagtggaaggagccttttcagtctattcagatttcctgctctataaatccggggtctaccaacatgtaactggagagatgatggggggacacgccatcaggatccttggctggggagtggaaaatgggacaccatattggctggtggcgaattcctggaacacagactggggggacaacgggttttttaagatattacgtgggcaggatcactgtgggattgagtcagaggtcgtcgccggaatccccaggacagaccagtactgggaaaaaatttag

SEQ ID NO: 27856 - DNA, 1020 bp, synthetic construct
  misc_feature 1..1020: note = Description of Artificial Sequence: Synthetic coding sequence
  source 1..1020: mol_type = other DNA
atgtggcaactttgggctagcctgtgttgtcttctcgtattggccaacgccaggagtcggcctagtttccaccctctgtctgatgagctggtcaactatgtcaacaagcggaacacgacctggcaggcaggacataacttttacaacgtggacatgagttacctgaaaaggctgtgcggcacatttctaggaggtcctaagcccccacagagggttatgtttactgaagatctgaaattacctgcctcctttgatgccagggagcagtggccccagtgtccaactatcaaggaaattagagaccaaggatcatgtggctcttgttgggccttcggggcagtggaggcgatcagcgacaggatctgcatccatacaaatgctcatgtgagcgttgaggtgtccgcagaggatctactgacctgctgcggcagcatgtgcggcgatgggtgtaacggcggataccccgctgaggcctggaacttttggaccagaaagggattagtgtcaggcggtctctacgaaagccatgtggggtgtcgtccctattctattcctccctgtgaacaccatgtcaatgggagcaggcccccttgcaccggcgagggagacacgccgaaatgttctaagatttgcgaacccggatattcaccaacttataaacaggacaaacactatgggtataatagctactccgtgtcaaattccgaaaaggatattatggccgaaatctataagaatggccctgtcgaaggcgcattttcggtctactccgacttcctgctttacaagtctggcgtctatcaacatgtgaccggagaaatgatgggtggacacgccattcgaattctgggatggggtgtagaaaatggtacgccttactggctggtcgctaacagttggaacactgactggggcgacaatggatttttcaaaattcttaggggacaggaccattgtggcattgagtctgaggtagtcgctggcatacctcgcacagaccagtactgggagaaaatttag

SEQ ID NO: 27857 - DNA, 1020 bp, synthetic construct
  misc_feature 1..1020: note = Description of Artificial Sequence: Synthetic coding sequence
  source 1..1020: mol_type = other DNA
atgtggcagctgtgggcctccctctgctgcctcctggtacttgccaatgccaggtctcgaccatcgtttcatccactcagcgatgagctggtgaactatgtgaacaagagaaatacgacatggcaagccggtcataacttttacaatgtagatatgtcgtatctaaaaaggctctgcggcacttttctcgggggtcccaagccaccacagcgcgtgatgtttacagaggacctaaagttgcccgcaagctttgacgcaagggagcaatggcctcagtgtcctactataaaggaaatccgcgatcaggggtcctgtggatcttgctgggccttcggcgcagttgaggcaataagcgatcgcatctgtatccatactaatgcgcacgtgtctgtagaagtttctgctgaggacctgctgacctgttgcggctcaatgtgcggagacggatgtaacgggggatatcccgctgaagcctggaacttctggacaaggaagggactggtgtctggcggtctctacgaaagtcacgtcgggtgtcggccttactcaataccgccttgcgaacaccacgtgaacgggagtcgccctccctgcaccggcgaaggagatacacccaagtgctcaaagatctgcgagccgggatattccccgacctataagcaggacaagcactatggttacaactcctatagcgtgtcgaatagtgagaaggatatcatggcggaaatctataaaaacgggccagtagagggagccttcagcgtctacagcgactttttgctgtacaaaagtggcgtgtaccaacacgttacgggtgagatgatggggggtcatgccattagaatcctaggctggggggtcgaaaacggcacaccttactggctggtggctaattcatggaacacagactggggcgacaacgggttttttaagattctaagagggcaggaccattgtggaatcgagtccgaggtcgttgctggaatcccacgcacagaccaatattgggaaaagatctag

SEQ ID NO: 27858 - DNA, 1020 bp, synthetic construct
  misc_feature 1..1020: note = Description of Artificial Sequence: Synthetic coding sequence
  source 1..1020: mol_type = other DNA
atgtggcagctttgggccagcctttgctgtctgctggttctggccaacgcccgttcccggccttcttttcaccctctgtctgacgaactcgtgaattacgtgaataagcgaaatactacatggcaggccggacacaatttctacaacgtcgatatgtcttatttgaaaaggctgtgcggcacctttctgggtggaccgaagcctcctcagagagtcatgttcaccgaggatcttaaacttcctgccagttttgacgcaagagaacagtggccacaatgccctacaatcaaggagattagagatcagggatcctgtggcagctgttgggccttcggcgctgtggaagccatctctgaccgaatttgtattcacactaacgcacacgtatctgtcgaggtgtccgcagaggacctcctgacctgctgcggtagcatgtgtggcgatgggtgtaacggtgggtatcccgctgaggcctggaacttctggactaggaaggggctggtcagcggaggattgtatgaatcccacgtcggatgtcgaccttacagcataccaccctgcgagcatcacgttaatgggagtagacctccctgtacaggcgagggggacacaccaaaatgttccaagatctgtgaaccaggctatagtcccacctataagcaggacaaacactatggatataattcttactccgtctctaactccgaaaaggatattatggccgaaatttataaaaatggtcctgtcgagggagccttcagtgtgtactctgacttcttactctacaaaagcggagtctatcagcacgttaccggagaaatgatgggaggacatgctatcaggatactaggttggggtgttgagaatggtactccttactggttagtggcaaacagctggaacactgactggggtgacaatgggttcttcaagattctgagaggacaggaccactgcgggattgaaagtgaggtggtcgcgggaatacctcggactgatcagtactgggagaagatttag

SEQ ID NO: 27859 - DNA, 1020 bp, synthetic construct
  misc_feature 1..1020: note = Description of Artificial Sequence: Synthetic coding sequence
  source 1..1020: mol_type = other DNA
atgtggcaactctgggccagtttatgttgcttgcttgtgctcgctaatgccaggtccagaccttccttccatccactctccgacgaactggtgaattatgtaaacaagcggaacacaacgtggcaagccggtcataatttctacaatgtcgatatgagctatctaaaacgactttgtggcaccttcctaggtggccctaaacctcctcagagagtgatgtttacagaagacttgaaattgccggcatctttcgacgcacgtgagcagtggccacagtgccccaccattaaagaaatcagagaccaaggctcctgcgggtcttgttgggcttttggagctgttgaggcaattagtgacaggatttgtatccatacaaacgcccacgtaagtgtcgaggtatctgccgaggatttgttaacgtgctgtggaagcatgtgcggcgatggatgtaatgggggatacccagcagaagcttggaatttttggactcggaaaggattagtgagcggagggctatacgaatcccacgtgggctgccgaccatattcaatccctccctgtgagcaccacgtgaatggcagcaggcccccttgcaccggagagggagatactcctaaatgtagcaaaatctgtgaaccaggctattccccaacttataagcaggacaaacactacgggtacaactcctactctgtgtctaacagcgaaaaggatatcatggctgagatttataagaatgggcctgtggaaggtgcttttagtgtctacagcgacttcctcctgtataaatccggggtgtatcagcatgtgaccggcgagatgatgggaggacacgccatccgcattctaggttggggtgtggagaatggcacgccctattggttagtagctaactcttggaatacggattggggtgacaatggattctttaagattcttcgcggacaggatcactgtgggatcgagagcgaggtggtagccggaatcccaaggaccgatcagtattgggagaaaatatag

SEQ ID NO: 27860 - DNA, 1020 bp, synthetic construct
  misc_feature 1..1020: note = Description of Artificial Sequence: Synthetic coding sequence
  source 1..1020: mol_type = other DNA
atgtggcagttgtgggcctccctctgttgcctgctagtgctcgctaatgcacggagcaggccctctttccatccacttagcgatgaactggtcaattatgtcaacaaacggaatacaacctggcaggcagggcacaacttttataatgtggacatgtcctatctcaagagactgtgtggtaccttcctggggggtcccaagcctcctcagcgggttatgtttaccgaggacctgaaactcccggcatcattcgacgccagggaacagtggccacagtgccccaccataaaagaaatacgggatcagggctcttgcgggagttgttgggcatttggcgcagtggaagctatttccgataggatctgtatccatacaaacgcacacgtgtctgtggaagtctccgccgaagacctgttaacctgttgcgggtcaatgtgcggcgacgggtgtaacggaggttatcctgccgaagcatggaacttttggacacgcaagggcctggtgagcggtggcctgtatgagtcccatgtgggctgcaggccttattccatcccaccctgtgagcaccacgtgaatggttcacggccaccttgtacaggagagggagacactcccaagtgcagcaaaatatgcgagcccggttacagccctacttacaagcaggataagcattacggctacaattcatattccgtcagcaattccgaaaaggacattatggccgaaatctataagaatggcccagtggagggcgcattctctgtgtattcagactttttattatataaaagcggggtgtaccagcacgtgaccggggaaatgatgggaggtcatgcaattcgcattctgggatggggcgtggaaaatgggacgccctactggcttgtggctaactcctggaacacggactggggggacaatggcttcttcaaaatcctgagagggcaggatcactgcggtattgagtcagaagtcgtggcagggattccccgtacagatcagtattgggaaaagatctag

SEQ ID NO: 27861 - DNA, 831 bp, synthetic construct
  misc_feature 1..831: note = Description of Artificial Sequence: Synthetic coding sequence
  source 1..831: mol_type = other DNA
atggatatgaatagaagggcaagctgccttctgcccgatctgtgcgggcagggatggggctggcggctctttccagcatcctgtgcctacctgggaagcgtgccctggcgagtttggggtttaggaggcttattagctcccctcgcggcagctggcggtggaagtacttctgggctgggtcatctcggctccacgcagtggtctggcgagttagtggtgctgctttcagaggtatttatcagggggtgcctgttttcgtgtaacggcggatatccggctgaggcttggaatttttggacccgtaaaggcctggtgtctggtggcttgtacgagtcccacgtgggctgccggccatacagtatccctccatgtgagcaccatgttaacgggagcaggccaccctgtaccggcgagggtgatactcccaagtgttctaagatctgtgagcccggatactctccaacttacaagcaagataagcactacgggtataatagttactccgtgagcaatagtgagaaagatataatggccgagatttacaaaaatggcccagtcgagggggcattcagcgtatactcagactttttactttacaaaagtggggtttaccaacatgttaccggagaaatgatgggaggacacgccattagaatcctggggtggggcgtggagaacggcacaccttactggctggtcgctaatagttggaacacagactggggtgataatggtttcttcaagattttacggggtcaggatcattgcggtattgagagtgaggtagtggcagggattccaagaactgaccaatactgggagaagatttag

SEQ ID NO: 27862 - DNA, 738 bp, synthetic construct
  misc_feature 1..738: note = Description of Artificial Sequence: Synthetic coding sequence
  source 1..738: mol_type = other DNA
atgcccggagcagggccactcagcatcccttgcaggatgtcctgggctttcggcgcagttgaggctataagcgaccgaatctgcatccacaccaacgctcacgtgtctgtggaggtatcagccgaggatctactgacctgctgcgggtctatgtgtggagacgggtgtaacgggggataccctgccgaagcctggaacttttggacacgcaaaggacttgtgtccggcggtctgtacgagtcccacgtcgggtgccgcccatactccatccctccctgtgagcatcatgtgaacggtagccggcctccctgcaccggagagggcgatacacctaaatgttctaaaatttgtgagcctgggtatagccccacatacaagcaggacaagcattacggctacaactcatatagtgtcagtaacagcgagaaggatatcatggccgaaatttacaagaacgggccagtggagggggcattttctgtttactcggactttctgctgtacaaaagcggagtgtaccaacacgtcaccggcgagatgatgggtggccacgccatcaggatattgggttggggggtcgagaatgggaccccatactggctggttgcaaattcctggaatactgattggggggacaatgggttctttaagatccttaggggccaggaccactgcggtattgaaagcgaggtagtggctggaatccctagaacagaccaatactgggagaaaatttag

SEQ ID NO: 27863 - DNA, 1239 bp, synthetic construct
  misc_feature 1..1239: note = Description of Artificial Sequence: Synthetic coding sequence
  source 1..1239: mol_type = other DNA
atgcagccaagttcgctgctgccactcgcgctttgcctcttagctgcacctgcctctgcattagtgcgcattccattacataagttcactagcatacgtcgaactatgtctgaggtgggcggatcagtggaggacttgattgcaaagggacccgtgtccaaatactcgcaggctgtccccgcagttaccgagggcccaattcccgaggtgctgaagaactacatggacgcccagtactatggcgagatcggcattggcacacctccacagtgcttcaccgtggtgttcgacacaggtagttccaatctgtgggtgccttccatacactgcaaactcctcgacattgcctgttggattcaccacaagtataactctgacaagtcttccacgtatgttaagaacggaacttctttcgatattcactatggttcgggttccttgtccgggtacttgagtcaagataccgtgtcggtcccttgccagtctgctagttcggcttcagcgctgggaggcgtcaaggttgagcgccaggtcttcggggaggccacaaaacaaccagggataaccttcatagcggctaagtttgatggcatccttggcatggcttatcccagaatatccgtaaataatgttcttcctgtgttcgacaacctcatgcagcagaaactggtggatcagaatatttttagcttctatctttcacgggatcccgatgcccagccagggggagaactgatgctaggaggcacagattctaagtactataagggctccctgtcatatctgaacgtgacgagaaaagcgtactggcaggtgcatctcgatcaggtcgaagtggctagtggattgaccctatgcaaagaagggtgcgaggccatcgttgatacaggaactagtctgatggtgggtccggtggatgaagtgcgggagctgcagaaggcaattggtgctgtgcctcttatccagggtgagtatatgattccttgcgagaaagtttctacactcccagccatcacgttaaagctagggggaaagggctacaagctgtcccctgaggactacaccctgaaggtaagccaggccggaaaaaccctctgtctctccgggtttatgggaatggacatccctccaccatcagggcctctgtggatcctgggtgacgtttttatcgggagatactacactgtgtttgacagggacaacaatagagtgggcttcgccgaggctgcccgtctttag

SEQ ID NO: 27864 - DNA, 1002 bp, synthetic construct
  misc_feature 1..1002: note = Description of Artificial Sequence: Synthetic coding sequence
  source 1..1002: mol_type = other DNA
atgaatcctacgctgattctcgccgctttttgccttggcatcgcctccgcaaccctgacgttcgatcactcgctggaggcgcagtggaccaaatggaaagccatgcataatcgactctacggaatgaatgaggaaggatggaggagggctgtgtgggagaagaatatgaagatgattgaacttcacaatcaggaatacagagagggaaagcatagtttcacaatggcaatgaatgcctttggcgacatgacatcagaggagtttagacaggtaatgaacggtttccaaaatagaaagccgagaaaaggaaaagtgtttcaggaaccactcttttatgaagcgccacgctctgtcgactggagagaaaagggttacgtgactcctgtgaaaaatcagggccagtgtggctcttgctgggccttcagtgctaccggggctctcgaagggcagatgttccgaaagacaggcagactgatctctctttccgaacaaaacctggtcgattgttcaggtccacagggaaacgagggttgtaatggcggacttatggattatgcttttcagtatgtgcaagataatggcggattggactcagaagaatcttatccttacgaggctacagaggaaagttgtaaatataaccctaagtattctgtagccaacgatactggatttgtcgacatcccgaagcaagagaaggcactcatgaaggctgtggccactgttggacccattagtgtcgctattgatgccggacacgaaagctttttgttctacaaagagggaatctatttcgagccagactgcagttccgaggatatggatcacggcgtgctcgtggtcgggtacggattcgagagtactgagtcagacaataacaagtactggctggtaaaaaacagctggggcgaagaatggggaatgggcggatatgtcaagatggctaaggacagacgcaatcactgtggcattgcgtctgcagctagctatcccacagtatag

SEQ ID NO: 27865 - DNA, 678 bp, synthetic construct
  misc_feature 1..678: note = Description of Artificial Sequence: Synthetic coding sequence
  source 1..678: mol_type = other DNA
atgaaccccacattaatactggccgctttctgccttgggattgcttccgctactcttacctttgaccacagccttgaggcacagtggaccaagtggaaagccatgcataacagactctatggaatgaacgaggaagggtggcgcagggccgtctgggaaaagaatatgaagatgatagagttacacaatcaggagtacagggagggtaagcactcttttactatggcgatgaacgcctttggggatatgacctcggaagagttccgtcaagttatgaatgggtttcagaacagaaagccaaggaaggggaaagtattccaggaacccctgttctatgaggcgccaagaagcgttgactggcgagaaaaagggtatgtaactccagtgaaaaatcaaggccagtgtggttcctgctgggcatttagcgctacaggtgccctggagggccagatgtttaggaaaaccggacgcctgatcagtctgagcgagcagaatttagtcgattgcagtgggccacagggcaacgagggttgcaacggagggctcatggactatgcatttcaatacgtgcaggataatggtggtctcgattccgaagagagttacccatacgaagcaactgtcagcggcgctccttgccaccactcttccagcgcatttggcaggtggaccttgtag

SEQ ID NO: 27866 - DNA, 1002 bp, synthetic construct
  misc_feature 1..1002: note = Description of Artificial Sequence: Synthetic coding sequence
  source 1..1002: mol_type = other DNA
atgaatccaacattaatccttgctgcattttgcctgggtatcgcctctgccacactgaccttcgaccactcacttgaagcccagtggaccaagtggaaggcaatgcacaacagactgtatggtatgaacgaggagggctggaggagagcagtgtgggaaaagaacatgaaaatgattgagcttcataaccaggaataccgggagggcaagcactcctttaccatggctatgaacgcctttggcgatatgacatctgaggagtttcgacaggtgatgaatggcttccagaatcggaagccaagaaagggaaaggtgttccaggagccactgttctacgaggccccaagatccgtagactggcgtgaaaaggggtatgtcacgcccgtcaaaaaccaggggcagtgcggctcttgctgggctttctcagcaacaggggctcttgaagggcagatgtttcgcaagaccgggaggctaatcagcctcagtgagcaaaatttggttgactgcagcgggcctcagggaaatgagggctgcaatgggggactaatggactatgcctttcagtatgttcaggataatgggggtctggattcggaggagtcttatccatacgaggcaactgaggagtcatgcaaatacaacccaaagtacagcgtggctaatgacacaggatttgtggatattcctaagcaagagaaggcattgatgaaggctgtcgccacagtgggccctatctccgtggctattgatgctggccacgagtctttcctgttttacaaagaagggatatacttcgagccagactgttcttcagaggatatggaccatggcgtgttggtggtgggctatgggtttgaatccacagaaagtgacaataacaagtactggcttgtgaaaaattcctggggagaggaatggggaatggggggttacgtcaagatggccaaggaccgcaggaatcattgcgggatcgctagcgctgccagctaccctactgtatag

SEQ ID NO: 27867 - DNA, 120 bp, synthetic construct
  misc_feature 1..120: note = Description of Artificial Sequence: Synthetic coding sequence
  source 1..120: mol_type = other DNA
atgaacccaacactgatcctagccgcattttgtctcggaattgcaagtgccactttgacattcgaccactcattggaggctcaatggaccaaatggaaggcaatgcataacaggctgtag

SEQ ID NO: 27868 - DNA, 444 bp, synthetic construct
  misc_feature 1..444: note = Description of Artificial Sequence: Synthetic coding sequence
  source 1..444: mol_type = other DNA
atggccgacgaactttctgagaaacaggtctacgacgcccacacaaaggagatcgatctcgtcaaccgggatccaaaacatctgaatgacgatgtggtgaagatagattttgaagacgtaatcgccgagccagagggaacccacagtttcgacgggatatggaaggcctctttcacgactttcacggtgaccaagtactggttctatcgccttctgtctgctctgttcggcatccctatggctctgatctggggtatttactttgccatccttagtttcctgcacatctgggccgtggtaccttgtatcaagtctttcctgattgaaatccagtgcatctcgcgggtgtatagcatctatgtgcacaccgtgtgcgaccctctgtttgaggcggttggaaagatcttctcaaatgtgaggatcaacctgcagaaagaaatatag

SEQ ID NO: 27869 - DNA, 444 bp, synthetic construct
  misc_feature 1..444: note = Description of Artificial Sequence: Synthetic coding sequence
  source 1..444: mol_type = other DNA
atggcagatgagctgagcgaaaaacaggtttacgacgcacatactaaggagattgatctggttaacagggatcctaagcacctcaatgacgacgttgtcaaaattgatttcgaggacgtgatcgcggagccggagggaacacactctttcgacggcatttggaaagcgagttttaccactttcacagtcactaaatactggttttacagactcctgtcggcactgtttgggataccaatggcgcttatttggggaatttatttcgcaattctgtcatttcttcacatctgggccgttgtgccatgcattaaatcatttttgatcgagatccagtgtattagcagagtgtactccatttatgtccataccgtgtgtgaccctcttttcgaggccgtgggaaagatcttctccaacgtgcgcatcaacttacagaaggagatttag

SEQ ID NO: 27870 - DNA, 537 bp, synthetic construct
  misc_feature 1..537: note = Description of Artificial Sequence: Synthetic coding sequence
  source 1..537: mol_type = other DNA
atgagcggcggaaaatacgtagactctgaaggccacctgtacacggttcctatcagggagcaggggaacatctacaagcctaataacaaagcaatggctgatgaactgtcagagaaacaggtgtatgatgcccacaccaaagaaatcgaccttgttaatagggacccaaaacacctgaatgacgatgtggtgaagattgactttgaggacgtcattgctgagcccgagggcacacactcttttgacggaatatggaaggcgtcatttacaacctttactgtgactaaatattggttttaccggctcctgtctgctttatttggtatccctatggcgctgatatggggcatttactttgcaatattgtcatttctccatatctgggccgtggtgccatgcattaagtcatttttgattgagatccagtgcatctccagggtgtatagcatatacgtgcataccgtttgcgacccactatttgaagcagtggggaagatcttcagcaatgtcagaatcaatctgcagaaggagatctag

SEQ ID NO: 27871 - DNA, 345 bp, synthetic construct
  misc_feature 1..345: note = Description of Artificial Sequence: Synthetic coding sequence
  source 1..345: mol_type = other DNA
atggccggaggaaaagcagggaaggatagtggaaaagccaaggctaaggcagtaagcagatctcagagagccggactgcagttccctgtgggacgcatacaccgccatctgaaaaccaggaccacgagtcacggcagagttggcgctacagccgctgtgtatagcgccgctatactcgagtatcttacggcggaagtgctggagctggccggaaacgcttccaaggatctgaaggtgaaaaggattacaccaaggcatctccagttggctatacggggtgacgaggaacttgatagcctgattaaagcaaccatagccggaggggaaaagagacggtgttcatag

SEQ ID NO: 27872 - DNA, 339 bp, synthetic construct
  misc_feature 1..339: note = Description of Artificial Sequence: Synthetic coding sequence
  source 1..339: mol_type = other DNA
atgggacttgagacggagaaggcggacgtacaacttttcatggatgacgacagctattctcatcatagtggtctcgaatatgccgaccctgaaaagtttgccgattcagatcaggatagggacccacaccggctaaatagccacctgaaggatttcaatgctttctgcaaagacctccctaatggctcagccttttcggctgacaacatggaagaatgtgaccggtgctaccattgttcaatcgtctatgaaaggaggaccatgctgctcttctgtcagcctgctactgagccgggactgaacacctggacccccggactggagatcggcattctctag

SEQ ID NO: 27873 - DNA, 342 bp, synthetic construct
  misc_feature 1..342: note = Description of Artificial Sequence: Synthetic coding sequence
  source 1..342: mol_type = other DNA
atggggctggaaacggagaaagctgacgttcaactgtttatggacgatgattcctattcccatcattccggactggagtacgctgaccctgagaaattcgcggactccgaccaggatagggatccccaccgcctgaatagtcacttgaaactggggttcgaagatgtcattgctgagcccgttacgacacattcgttcgacaaagtgtggatttgtagccacgcgctgttcgaaatttcaaagtacgttatgtacaaatttcttaccgtgttcttagccattccgctggccttcatagccggtattctcttcgcgactctttcctgtctgcacatctggtag

SEQ ID NO: 27874 - DNA, 1038 bp, synthetic construct
  misc_feature 1..1038: note = Description of Artificial Sequence: Synthetic coding sequence
  source 1..1038: mol_type = other DNA
atgcagcggctggttgcatgggatcctgcttgccttccactgccaccacctccaccagcctttaagagtatggaggtagccaacttctattatgaagccgactgtctagctgctgcctatggaggtaaggccgcaccagccgctcccccagctgccagacctgggccacgacccccagccggagagttagggtctatcggtgaccacgaaagagctatcgacttttccccatacttagaacctcttggtgcgcctcaggcccctgctcccgctaccgccacggacaccttcgaggccgcaccgccagcacctgcacccgcacccgcttcttcagggcagcaccatgacttcctgtccgatctcttcagcgatgactacgggggaaaaaactgcaaaaagcctgctgagtacgggtatgtttcacttggacggctgggggcagcaaagggcgctctgcacccgggatgttttgcccctctgcatcctccccctcccccaccccctcccccagccgaacttaaggcagagcccggattcgagcctgccgattgcaagcggaaagaggaggcaggggcaccaggtggcggagccggaatggcggctggcttcccttatgctctgcgtgcctacctgggctatcaggccgtacctagcggtagctcgggttccctgtccacgagcagctcttcctctccccctggcaccccatcccctgccgatgcaaaagcgccacccaccgcctgttatgctggggctgccccagctccgtcacaggtgaaatccaaagctaaaaaaacggtggataaacactccgatgagtacaagatccgcagggaaaggaacaatatcgctgttaggaagtcacgtgacaaagcgaagatgcggaacttggaaacacagcacaaggtcttggaactgacagcagagaatgaaagactccaaaagaaggtggagcagctgagtagggagttgtctactctgaggaatttgttcaaacagcttcctgagccccttctcgcatctagtggccactgttag

SEQ ID NO: 27875 - DNA, 2184 bp, synthetic construct
  misc_feature 1..2184: note = Description of Artificial Sequence: Synthetic coding sequence
  source 1..2184: mol_type = other DNA
atggagggagatgcggtcgaggcaatcgtcgaagagtccgaaaccttcattaaaggaaaagagcgaaaaacttaccagcggaggagagaagggggtcaagaggaagatgcgtgccacctgcctcaaaaccagacagacggaggtgaggtggtgcaggatgttaatagttctgtgcagatggtgatgatggagcaactggaccccacactcctgcaaatgaagactgaagtcatggagggcacggtggcgccagaggctgaggccgcagtagatgatacgcaaattatcacactccaggtcgtgaacatggaggaacaacccatcaatataggcgaactgcagctcgtccaggttcctgtgccagtaacagtaccagtcgcgaccactagcgtcgaagaactgcaaggcgcttacgagaacgaggtaagcaaggagggactggccgagtcagaaccaatgatctgtcatacactgccgcttccagagggctttcaggtcgtcaaagtgggcgctaatggcgaagtcgagactctcgaacaaggtgaactccctccacaggaggacccctcatggcagaaggacccagattatcagcctcctgccaaaaaaactaaaaagacaaaaaagagcaagcttcggtacaccgaggagggcaaagatgtcgatgtgagcgtgtacgactttgaggaggaacagcaagaaggattactctctgaagtcaatgcagagaaggttgtggggaatatgaagccaccaaagccgaccaagatcaaaaagaaaggcgtgaaaaagacttttcagtgcgagctttgctcatatacctgtcctcggcgatcgaatctggacaggcacatgaaatcccataccgatgagcgccctcacaaatgtcatttgtgcggcagagccttcaggacggttaccctgctcagaaaccatcttaatacacacactgggactcggccacacaagtgtccagattgcgacatggcatttgtgacaagcggcgagctggtgcggcatcgacgttataaacacacccacgagaagccgtttaagtgcagcatgtgcgactatgcctccgtggaagttagcaaacttaagcggcatatccgttctcacacgggcgaacgtccatttcaatgttccctgtgttcttacgcctcccgagacacctacaaattaaaacggcacatgaggactcatagcggagaaaagccgtatgagtgctatatatgccacgctcggttcactcagagcgggacaatgaagatgcacattctccagaagcacaccgagaacgtcgccaagttccattgcccgcactgcgacaccgttatcgccagaaagtctgacctgggtgtccacctccgcaagcagcactcgtacattgagcaggggaagaagtgtagatattgtgacgccgtgtttcacgagcgttatgctttgattcagcatcagaagtcccacaaaaatgagaagagatttaagtgcgaccaatgcgattatgcatgcaggcaggaacggcacatgatcatgcacaagagaacccacactggcgagaagccatatgcatgtagtcactgtgataagacctttcggcagaaacagttgctggacatgcacttcaagaggtaccatgatcctaactttgtgcccgctgcattcgtgtgtagcaagtgcgggaagacatttactcgcagaaataccatggcgcgacacgccgacaactgtgctggacccgacggcgtggagggcgaaaatggcggtgaaacaaaaaagagcaagaggggtcgaaagcgtaaaatgcgttctaagaaggaagattcctcagattccgagaacgcggagcccgatttggacgataatgaagatgaagaagaacccgctgtcgaaatcgagcctgagcccgagccgcaacccgtgacgcctgcaccgccacctgctaaaaaaagacgcggaaggccacctgggcgaacgaaccagccaaagcagaatcagccaacagcaattattcaggtcgaagatcaaaatactggcgctatcgagaacatcatcgtggaggtgaaaaaagagccagacgccgaacccgctgaaggagaggaggaagaagcccagcctgcagccaccgatgcacctaacggagatctcacacctgagatgattctcagcatgatggatcgatag

SEQ ID NO: 27876 - DNA, 1200 bp, synthetic construct
  misc_feature 1..1200: note = Description of Artificial Sequence: Synthetic coding sequence
  source 1..1200: mol_type = other DNA
atggctttcgtgaccagcggggaactggtccgacacagaagatataagcacactcatgagaagccctttaagtgttcaatgtgcgattatgcctccgtggaggttagtaagctgaagcgccatattcggagccatacgggtgagagaccctttcagtgtagcttatgttcctatgcctcacgggatacgtataaactgaaacggcatatgaggacccactccggcgaaaagccctatgaatgctacatttgccatgctaggttcactcagtcagggactatgaaaatgcacatccttcaaaagcatacagagaacgttgcaaagtttcactgtccccactgtgatacagttatcgccagaaaatccgacctgggagtgcacctcaggaagcaacattcgtacattgagcaagggaagaagtgcagatattgtgacgccgtgttccacgaaagatacgcccttatccagcaccagaagtcccacaaaaatgagaagcgcttcaagtgtgaccagtgtgattatgcctgcagacaggagcgccacatgatcatgcacaagcggacacataccggcgaaaaaccttacgcttgtagtcattgtgataaaacgttcagacagaagcagttacttgatatgcacttcaagcgttatcatgacccaaacttcgtacccgctgcattcgtgtgtagtaagtgtggaaaaaccttcactcggagaaacactatggcaagacatgctgataattgcgctgggccagacggtgtggaaggagagaacggaggagaaaccaagaaatctaagcgtggaagaaaaaggaaaatgcggtctaagaaggaggattcatccgactctgagaacgccgagccggatctggacgacaacgaagacgaagaggagcccgctgtggagatcgagcccgagcccgagccacagccggtgactccggcacccccaccagctaagaagagacgcggtaggcccccaggcagaacaaaccagcctaaacaaaaccagccgacagcaattatccaagttgaggatcaaaacacaggagcgatcgaaaacattatcgtggaggtgaaaaaagaaccagatgccgagccagccgagggcgaggaggaggaggcacagccagccgcaacagacgctccgaatggggatctcacacctgagatgattctgtccatgatggatcggtag

SEQ ID NO: 27877 - DNA, 1128 bp, synthetic construct
  misc_feature 1..1128: note = Description of Artificial Sequence: Synthetic coding sequence
  source 1..1128: mol_type = other DNA
atggaaagggcctcctgtctcctccttctcctgctccctctggtgcacgtgagtgcaaccacacccgaaccatgtgaactagatgacgaagactttagatgcgtctgtaatttttccgagcctcagcccgactggtccgaggccttccagtgtgtatctgctgttgaggtcgagattcacgcgggaggactcaatctggaaccatttctaaagcgggttgatgcggatgcggatccacgccagtacgccgacaccgtgaaggccctcagggtccggagactgaccgtgggagcagcgcaggtgccagcccagcttctcgtgggcgcactgagagtgctggcatattcgcgcctgaaggagctgacacttgaggacttgaaaatcacagggacaatgccgcctctccccctggaagccacaggtctggccctgagttccttaagattgcgtaacgtttcgtgggctactggacgtagctggctcgctgagctccagcaatggctgaagcctggactaaaggttctgtcaattgcacaagcccactctccagctttttcctgtgaacaagtaagagcttttcctgctcttacatcgctagacttatccgacaatcccggactcggagagcggggtctgatggcagcgctgtgcccccacaagtttccagctattcagaacctggcgctgcgaaatacaggaatggaaacacccactggcgtgtgtgccgcactggccgcagccggagtccagccgcactctctggatctctctcacaacagcttacgggctacagtgaatccctccgctccacggtgcatgtggtctagcgcactgaacagcctgaaccttagctttgccggactggagcaggtgccaaaaggactgcccgctaagctgcgggtgctggatctctcgtgtaatcgacttaacagggctccacagcccgatgagctccccgaggtggataatctcaccctagacggcaaccccttcctggtcccgggaaccgccctaccccacgaaggatccatgaatagcggagtcgtgccagcctgtgctaggagcaccttatccgtaggtgtctcgggcactctggtcctgttacagggtgctcgaggcttcgcctag

SEQ ID NO: 27878 - DNA, 1128 bp, synthetic construct
  misc_feature 1..1128: note = Description of Artificial Sequence: Synthetic coding sequence
  source 1..1128: mol_type = other DNA
atggagcgggcatcttgtctgctgctgctgctactgccactggttcacgtgtcggccaccacccctgaaccgtgcgagctggacgacgaagacttcagatgtgtttgtaatttcagcgagccccagccagattggtcagaagccttccaatgcgtgtcagcggtggaggtggaaatccacgccggtgggctaaacctggagccttttttaaagagagtcgatgccgatgcagatcctaggcagtacgccgatactgtgaaggcccttcgcgtgaggcggcttacggtgggagctgcccaggtgcccgctcaactccttgtgggagctctgcgagtattagcatatagtcgactgaaggagctcacgctggaagatctcaaaattactggcacgatgcctcctctgcccctggaggctacaggcctggctcttagcagcctcagactgcggaacgtgtcttgggctacaggcaggtcatggttagcagagctacagcagtggcttaagcctgggcttaaggtattgtcaatcgcccaagcccacagcccagctttctcttgtgagcaagttcgcgcatttcccgcattgacgtctttagatctttccgataatcctggcctcggggaaagaggcttaatggcggcactgtgcccacacaagttccctgcaatacagaacctcgcccttcggaatactgggatggaaactcccacgggagtgtgcgctgccttagcagctgccggtgtacagcctcactcgttagatctgagtcacaactcattaagagccacagttaaccctagcgctccacggtgcatgtggtcttctgctctgaacagcctcaatctttcatttgctgggttggaacaggtacctaagggattgcctgctaaattaagagtactggatctcagctgcaacaggctgaaccgcgcaccgcagccagacgaacttcccgaggtcgataatcttaccttagacggaaacccttttttggtgcccggaactgccctgccccatgaaggaagcatgaactcaggggttgtccccgcatgtgctaggtcaacattatcagtgggtgtgtccggaactttagtcctgctgcagggcgctcgcggttttgcatag

SEQ ID NO: 27879 - DNA, 402 bp, synthetic construct
  misc_feature 1..402: note = Description of Artificial Sequence: Synthetic coding sequence
  source 1..402: mol_type = other DNA
atgagcttcccctgtaagtttgtggcgtctttcttgctgatatttaatgttagctccaagggtgctgtgagtaaagagatcacaaacgccctagagacatggggcgcattgggtcaggacatcaatttggacattccttcattccaaatgtctgacgatattgatgacatcaagtgggaaaagacctcagataagaaaaagatagcccaattcagaaaggaaaaagaaacattcaaagaaaaagatacttataaactgttcaaaaacggaacactcaagattaaacacctcaaaactgatgaccaggacatttacaaggtttccatttacgatacaaagggcaaaaacgttctggaaaagatctttgacctaaagatccagggcaaatgttcctttccctag

SEQ ID NO: 27880 - DNA, 1056 bp, synthetic construct
  misc_feature 1..1056: note = Description of Artificial Sequence: Synthetic coding sequence
  source 1..1056: mol_type = other DNA
atgagttttccgtgtaagttcgttgcatcattcctgttgatcttcaacgtgtcgtcaaagggcgctgtgtcaaaggagatcacaaacgcacttgaaacctggggtgccctggggcaagatatcaacctggatattccttctttccagatgtccgatgatatcgatgacattaagtgggaaaaaacatcggacaagaaaaagatcgcccaattccgcaaggagaaagaaacatttaaggaaaaggatacctacaagctgttcaaaaacggaactctgaagatcaaacacctgaaaacagatgaccaggacatttacaaagtatctatctatgacaccaaaggaaaaaatgtcttagagaagatcttcgacctaaagatccaagaacgcgtttctaaacccaagatctcatggacctgtatcaacactaccctgacctgtgaagtcatgaacgggacagaccccgagctgaacctctatcaggacggcaaacacttgaagctatcccaacgggtgattacacacaagtggaccacatctctgagcgccaagttcaagtgtacagctgggaataaggtctctaaggaatcgagcgtcgaacctgtatcctgccccgagaagggcctggacatatacctcataatcggcatatgtggcggagggtcactcttgatggtttttgtggcgttgctggtgttttacataaccaagaggaagaaacagaggtctcgccgaaacgacgaagagttggagacaagggcacatagagtggccacagaggaaaggggaaggaagcctcatcaaatcccagcgtccactccacaaaaccccgcaacctctcagcaccctccaccacctccaggccatcgctctcaggcgccaagccatcggccaccgccacccggacatcgggtgcagcatcagccacagaagagaccgccagccccaagtggaacacaggtacaccagcagaaaggcccaccgctgcccaggcctcgcgtgcaaccaaagccaccacatggagccgctgaaaatagtctctctcccagctcaaactag

SEQ ID NO: 27881 - DNA, 2544 bp, synthetic construct
  misc_feature 1..2544: note = Description of Artificial Sequence: Synthetic coding sequence
  source 1..2544: mol_type = other DNA
atgcatctgctgggtccatggctactgctgctcgttctggaatatctcgcattctcagattctagtaaatgggtgtttgagcaccctgagactctgtacgcttgggagggtgcttgcgtctggattccatgcacttatcgcgcactggacggggatctcgagtcttttattctttttcataacccagagtacaacaaaaatacgagcaagtttgacggaacacggctgtatgagtcgacaaaagatggcaaggtgccctctgagcagaagagggtgcagttcctgggggataagaataagaactgtaccctgtctatccacccggtgcatctgaacgacagcggccaactgggactccgaatggaaagcaaaacagagaagtggatggagcgaatccatttaaacgtgtccgagcgccctttcccgcctcacatccagctaccgccagagatccaagagagccaagaagtgactctgacatgccttcttaatttctcctgctacggatacccgattcagttgcaatggctgttggagggagtgccgatgcgccaggccgcagtgactagcacctcactgactatcaagagcgtcttcactcggagtgagctgaaatttagcccacagtggtcccaccacggcaagatcgtaacatgccagcttcaggatgcggatggaaagttccttagcaatgacaccgtgcagcttaacgtgaagcacacccccaagctcgagattaaggtcaccccatccgacgccatagttagagagggagactcagtaacaatgacctgcgaggtatcatcaagcaaccccgagtacaccaccgtgagctggcttaaggatggcaccagcctaaaaaagcagaacacctttacactgaacttgcgagaggtaacaaaggatcaaagtggcaagtactgctgtcaagtgtctaacgatgtggggccaggcaggtctgaagaagtgttccttcaggtccagtatgcgccagagccctccacagttcagatactccactcgcccgctgttgagggaagccaggtagaatttctatgcatgtctctcgcaaacccactccccactaattatacatggtatcataacggaaaggagatgcagggtcgaaccgaggagaaggtccatattcccaaaattctgccgtggcacgcgggaacctattcgtgtgtggcagaaaacatccttggcaccggacagcgaggtcccggagccgagctggacgtccagtatccacctaaaaaagtaactacagtcattcagaatccgatgcctatccgagaaggtgatacagtgacactgtcttgtaactacaattctagtaatccaagcgtgacacggtatgaatggaaaccccatggggcttgggaggaaccatcactgggcgtgttgaagatacagaatgtaggatgggataatactaccatcgcctgcgcggcatgcaatagctggtgttcctgggcatctcccgtggcactgaatgtgcaatatgccccaagggatgtgagagtaagaaaaattaagccattatcagagatacactccgggaactcagtgagcctccagtgcgacttctcctcatctcatccaaaggaggtccagttcttctgggagaagaacggcagactcctaggaaaagaaagccagctgaacttcgatagtattagccccgaggatgcagggtcctactcttgctgggtgaacaatagcatcgggcaaaccgccagtaaagcgtggaccttggaggtcctctatgcgcctagaagactaagggtgagcatgagccctggcgatcaggtcatggagggcaagtcagccaccctgacttgcgaatcagacgctaacccccctgtcagccattacacctggttcgactggaataatcagtccctgccgtaccatagccagaaattgagacttgaaccagtgaaggtgcaacacagcggagcttattggtgccaggggaccaacagcgtaggcaaggggcgttccccattgagcacacttaccgtgtattactcacccgagacgatcggtcggagagtggccgtcggtctgggaagctgcctagccatcttgatcctcgccatctgtggtctcaaactgcaacgaaggtggaaaagaactcagtcccagcagggcctacaagaaaacagtagtggccagtctttcttcgtgcggaacaagaaggttcgacgtgctccgctctcagaggggccacatagtcttggttgttataaccccatgatggaagatgggatatcctataccactttgcgatttcctgaaatgaatattcctcgaacgggcgatgccgagtcctcggagatgcagcggcctcctcctgactgcgatgatacagttacctattcagcactccacaagcggcaggtgggagattatgaaaacgtgatcccagatttccccgaagatgaggggatccattactccgagctgattcaattcggtgttggcgaacgaccacaggcgcaggaaaacgtcgattatgtgattctcaagcactag

SEQ ID NO: 27882 - DNA, 1989 bp, synthetic construct
  misc_feature 1..1989: note = Description of Artificial Sequence: Synthetic coding sequence
  source 1..1989: mol_type = other DNA
atggagagcaagaccgagaaatggatggagcgcattcatctaaacgtgtctgagcgcccattcccacctcacattcagctgcctcccgagatccaggaaagtcaggaggtgacacttacctgcttgctgaatttttcttgctatggctatccaatccagttgcaatggttgcttgaaggggtgccaatgaggcaggcggcagttactagtacaagcctgacaattaagtcagtcttcacaaggagcgagctcaagtttagtccccagtggagccatcacggtaaaatcgtgacgtgccaactgcaggacgcagacggaaagtttctcagtaatgacactgtgcagttgaacgttaaacatacccccaaattagaaatcaaagtgacacctagcgatgctatcgtgcgggaaggagactcagtcactatgacctgcgaggtcagctcttccaatccagaatacacaacagtgtcatggttgaaggatggaacctccctgaagaagcagaacaccttcaccctgaacctccgagaggtgacaaaagaccagtctggcaagtattgctgccaagtgtcgaacgacgtcggacctggtcgctcagaagaagtgttcctgcaggtacagtacgcccctgagccttcgacagttcagatcctccatagtcctgctgtggagggtagtcaggtcgagttcttgtgcatgtccttggctaaccctttgcccactaactacacatggtaccataatggcaaggagatgcagggcaggacagaggagaaagttcacataccaaagatcctgccatggcatgccggtacttattcttgtgtggcagaaaatatcttggggacaggccagcgtggtccgggagctgagcttgatgtgcagtatcccccaaagaaggtcaccaccgtcatacagaatcccatgcctatccgggaaggtgatacggtgacactgagctgcaactataattcatctaatccctccgtcacgcggtacgaatggaaacctcatggagcatgggaggagccatcgctaggcgtgctgaaaatacagaatgtgggctgggacaacacaactattgcctgcgcagcatgcaacagttggtgttcatgggcatcacctgtagccctgaatgtccagtatgcccctagggatgtgcgagtgcggaagattaaaccgctcagcgagatccattccgggaatagcgtgtcgctccagtgcgactttagctcaagccatcccaaagaggtccaatttttctgggagaaaaacggacggttgctcggaaaggagagtcagctaaattttgatagcatttcacctgaggacgccggatcctacagttgctgggtgaataattccattggacagacggcatccaaggcttggacactggaggttctgtatgctcctaggagactgagggtgtctatgtccccgggtgaccaggtgatggaaggcaagagtgcgactctaacttgtgaaagtgatgcgaatcctccggtgtcgcactatacctggtttgattggaacaatcaaagcttaccgtatcactctcagaagttgcgcctggaaccagtcaaagtacagcactctggggcttactggtgccagggcaccaacagcgtggggaagggcaggtctcccctcagcacactcacggtgtactactcccctgagaccatcggtagaagggttgccgtgggcttgggatcctgcctggccatcctgattctggcaatttgtgggcttaagttgcagcggagggacgcggaaagctccgaaatgcagcgtcctcctccagactgcgacgatacggtgacatactctgccctccacaaacgccaggtgggagactatgaaaatgtcatccccgattttcccgaggacgaaggtatacattattcggaacttattcaatttggagtaggagaaagaccacaggcacaggaaaatgtcgactacgtaatcttgaagcactag

SEQ ID NO: 27883 - DNA, 2013 bp, synthetic construct
  misc_feature 1..2013: note = Description of Artificial Sequence: Synthetic coding sequence
  source 1..2013: mol_type = other DNA
atgcacctcctcggtccatggctcctacttctggtcttagagtaccttgccttctctgacagttccaaatgggtatttgagcatcctgagaccctttacgcttgggagggcgcttgtgtttggataccgtgtacctacagagcgttggacggggaccttgagtcattcattctgtttcataacccggagtataataagaataccagtaagttcgacggtactcggctgtacgaaagcaccaaggatgggaaggtgccatccgagcaaaagcgggtgcaattcttaggcgataaaaataaaaattgtacattgtcaattcaccctgtccacctgaacgattctggacagttgggcctcaggatggagtccaaaacagaaaaatggatggaaagaatccacctgaatgtatccgagaggccttttcctcctcacatccaactgcctcctgagatccaagagagtcaggaggttaccctgacctgcctccttaacttttcatgctacggctaccccatacagttgcagtggctcctggagggagtcccaatgcggcaggcagctgtaacttcaacttcattaaccattaagtcagtttttacaagaagcgagttgaagtttagtccccagtggtcccatcatgggaagatcgtgacctgtcaactgcaggatgcagacgggaagtttttaagcaatgataccgtacagctgaatgtgaaacaccccccaaagaaggttactaccgtcattcagaaccctatgcccatcagagagggggataccgttacattgagctgtaattacaacagtagtaatccaagcgtaacccggtacgagtggaaaccccacggcgcttgggaagagccttccctaggggtgctgaaaatccagaatgtggggtgggataatacaactattgcatgcgcagcttgcaatagttggtgcagttgggcaagccccgtggcacttaatgtccagtatgccccacgggatgtccgtgttcggaaaattaagcccctatccgagatccacagcggaaatagcgtatccctccagtgcgacttctccagttctcaccctaaagaagtgcagttcttttgggaaaagaatggccgactccttggtaaggaaagtcagctgaactttgactcgatcagccccgaggacgctggctcctattcctgttgggtgaataattctattggacagacagcaagcaaggcttggacactcgaggtgttgtatgcacctagacggctcagggtctctatgtcgcctggtgatcaagtcatggagggcaaatccgccacacttacttgcgaatccgatgctaatccgcctgtctcacattacacctggtttgactggaacaaccagtcccttccatatcattcccagaagctccggctcgagcctgttaaggtgcagcattccggagcctattggtgccagggtaccaatagcgtgggaaagggacgaagccccctctccactctcacagtctactacagccccgaaactataggaagaagggtggctgttggccttggtagttgtctggctatactgatactggctatctgtggcttgaagctccagcggcgatggaagaggactcagtcccaacaggggctccaggaaaactcctccggtcaatctttttttgtgcggaacaaaaaggtgcggcgtgcgccattgtcggaggggccacactctctcggttgctataatccgatgatggaggacggaattagctatactacgctccggtttccagaaatgaatataccaagaaccggggatgctgagtcaagcgagatgcagcggccaccccctgattgcgacgacacggttacctacagcgcactgcacaaacggcaagtgggcgactacgagaatgtcatcccagactttcccgaggatgaaggaatccattacagcgaactcattcagtttggagtcggtgagaggccccaggcccaggaaaatgtagactacgtcatattaaagcactag

SEQ ID NO: 27884 - DNA, 2028 bp, synthetic construct
  misc_feature 1..2028: note = Description of Artificial Sequence: Synthetic coding sequence
  source 1..2028: mol_type = other DNA
atgtccctttggctgttggagggtgttccaatgagacaggctgccgtcaccagtacttccttgaccatcaaatcagtattcacccgaagcgagctcaaattttctccccagtggagccaccatgggaaaatcgtcacgtgccagttgcaggacgccgatgggaagtttttgagtaacgacaccgtgcagctgaatgtcaagcacactcctaaactggagatcaaggtgaccccctccgacgcaatcgtccgggaaggcgattcagtaacaatgacctgtgaggttagctcaagtaatcccgaatacaccactgtcagttggctaaaggatggcacctctctgaagaagcaaaataccttcactctcaatctgagagaggttactaaagatcaatcaggaaaatactgttgtcaagttagcaacgacgtcggaccgggtagatccgaggaagtgtttctgcaagttcagtacgctcctgagccctctacggtccagatcctccacagcccagccgtcgaaggttcacaggtagaatttctctgcatgagtctcgcaaacccgctgcctaccaattacacgtggtatcacaatggcaaggagatgcagggcaggacagaggagaaagtgcatatccctaaaattctgccttggcatgccggaacttactcttgtgttgccgaaaatattctcggaactggccagcgcggtcccggagctgagcttgatgtacaatatccacctaaaaaggtcaccacagtcattcaaaaccccatgcctatcagagaaggggataccgtaactctcagctgcaattacaactcctctaatccttctgttacgaggtacgagtggaaaccccacggcgcatgggaagaaccgagccttggcgtattgaagatccagaatgtaggctgggacaatacaaccatcgcatgcgccgcatgcaattcttggtgctcttgggcttctcccgtggctctgaacgttcaatacgcccctcgcgatgtacgcgtgcggaagattaaacccctgagtgaaattcattctggaaatagcgtgagtttacagtgtgacttctctagctcccacccgaaagaggttcagttcttctgggagaagaatggaaggctgctgggaaaggaatcccagctgaatttcgatagtatttcccccgaggatgctggtagttactcctgttgggtcaacaacagcatcggccagaccgccagcaaagcgtggaccctggaggtgctttatgcccctagacggcttcgggttagtatgagccccggtgaccaagtgatggaaggcaagtcagctaccttaacttgtgagtcagacgctaatccaccagtgtcgcattacacctggttcgattggaacaatcaaagtttgccgtatcactctcaaaaactgcgtttggaacctgtcaaggtccagcacagcggagcttattggtgccagggcaccaatagcgtgggtaaaggccgatcaccactctccacacttacagtgtactacagcccagaaactattggccgtagggtggccgtgggtctgggatcttgtctggcaattctgattctagccatctgcggactgaaattgcagcgccgttggaaacggacccagagccagcagggactgcaggaaaacagttcgggccaatctttcttcgtgcgaaataaaaaagtgagacgagctccactcagtgaggggcctcactccctgggctgctataaccctatgatggaagacggcatatcatacacaaccttaaggttcccggaaatgaatataccacggactggggacgcagagagctccgagatgcagagaccgccaccagattgtgacgatactgtcacctattcagccctgcacaaacgacaggttggtgattacgaaaatgtgattcccgactttccagaagatgagggcatacactactccgagctcattcagttcggagtgggagagcgtccccaggctcaggaaaatgttgactacgtcattttaaagcattag

SEQ ID NO: 27885 - DNA, 2280 bp, synthetic construct
  misc_feature 1..2280: note = Description of Artificial Sequence: Synthetic coding sequence
  source 1..2280: mol_type = other DNA
atgcacctcctggggccatggcttttgctactggtattagaatacttggctttctccgacagctccaaatgggttttcgagcatcccgaaacattgtacgcctgggaaggtgcatgtgtgtggattccatgcacttaccgcgctctggacggggatctggaatcatttatcctgtttcacaaccctgaatacaataagaatacaagcaagtttgatggtactcgtctctatgagagtacaaaagacggcaaggtaccaagcgagcaaaagagggtccaatttctaggggataagaataaaaactgcacattgagtatacatccagtgcatttaaacgactccggtcagctgggtctccgcatggaaagtaaaaccgagaagtggatggaacgtatacacctgaacgtttccgagcggccattcccgcctcatattcagctcccacctgagatccaggaatcacaggaggtgactctgacctgccttctgaacttcagttgctacggatatccgattcagttacaatggcttttagaaggcgtccctatgcggcaggctgccgttacctccacgtcattgactattaaaagcgtcttcactcgatccgagttaaaatttagccctcagtggagccatcatggaaagattgtcacctgccagctacaggacgccgacggtaagttcctgagtaacgatacagttcagctcaatgtgaagcacaccccaaagctggaaattaaggtcacaccatccgatgcaatcgtacgagagggagactctgtgactatgacctgcgaggtctcaagcagtaacccggagtataccaccgtatcttggctgaaggatgggacgtctcttaaaaaacagaataccttcaccttaaacctcagggaggtgactaaagatcaaagcggtaaatattgctgtcaggtgtcaaacgacgtcggacctgggcgttccgaggaagtttttctgcaggtgcaatacccaccaaagaaagttacaaccgttatccagaatccaatgcccatccgtgaaggggatactgtgaccttatcatgcaactataatagcagtaatccaagcgtgacacgctacgagtggaagccacatggggcttgggaagaaccgtcactcggggtgttgaagattcagaacgtgggatgggacaacaccacaatcgcttgtgctgcttgcaactcttggtgctcctgggcatcccctgtcgcacttaatgtacagtatgcccctcgggacgtcagggttagaaagataaagcccctgtcagaaattcactctggaaacagcgtttccctccaatgcgacttctcctctagtcatcccaaagaggtgcagttcttctgggaaaaaaatggacgtttgctagggaaggaatcacaattgaatttcgatagtatcagcccagaggatgccggttcttatagttgctgggtcaataactccatcggtcagaccgctagcaaagcctggacattagaggtactctatgctcccagacgcctccgcgttagcatgagccccggtgatcaggtcatggaaggcaagtcagccaccctcacttgcgagtctgacgccaacccaccggtcagtcactacacgtggttcgactggaacaaccagagcctgccctatcacagtcagaagctgcgtctggagcctgtaaaagtgcaacacagcggggcttactggtgtcaaggcacaaattccgtgggtaagggacgcagcccgctgagcaccctgacagtatattattcccctgagactattgggagacgcgtcgcagtagggttgggcagctgcctggccatcttaatactagccatatgtggcctgaaattgcaaagaaggtggaagcgcacccagtctcagcagggtttgcaggagaacagtagtgggcagtctttcttcgtgaggaataaaaaggttaggcgagcccctctctccgagggaccccactcactcggatgttacaatccgatgatggaggacggaatctcctataccaccctcagatttccagaaatgaacatacctcgcacgggcgatgctgagtctagcgagatgcagagacccccaccagattgtgatgataccgtcacgtattctgcgctgcacaagcggcaagtcggcgactacgaaaacgttattcccgacttccctgaagacgagggcattcattactctgagctgattcaattcggagtcggagaacgaccgcaggctcaggaaaacgttgactatgtgatacttaagcactag

SEQ ID NO: 27886 - DNA, 2256 bp, synthetic construct
  misc_feature 1..2256: note = Description of Artificial Sequence: Synthetic coding sequence
  source 1..2256: mol_type = other DNA
atgcacctcctgggcccttggctgctgctactggttttggaatacctcgcattcagtgattcttctaaatgggtgtttgaacatccagagacgctgtacgcctgggagggggcatgcgtctggattccttgtacttacagagccttagatggcgacctggagtccttcatcctgttccacaatcctgagtacaacaaaaacacatccaaattcgatggtacaaggctatatgaatccacaaaggatgggaaggtgcctagtgaacagaaaagggtgcagtttctcggtgataaaaacaagaactgcactctgagcattcatcccgtgcatctgaatgatagcggccaactgggtcttcgaatggagtccaagactgaaaaatggatggagcgcatccacctcaatgtgtctgaaaggccattcccccctcacattcagctgccccctgagatccaagaatcccaggaagtgactctcacatgccttctcaattttagttgctacggatatcctatccagctgcagtggcttctggaaggcgtccctatgagacaggcggctgtgacaagcacttccctaacaattaaatctgtatttactcggtccgaactaaagttctccccacagtggtcccaccatggaaagatagtaacgtgtcagctgcaggacgcagatggcaaatttctgtctaatgacacagtccagctgaacgtcaagcacaccccaaagctggagatcaaagtgactccgagcgacgctatcgtgcgggagggtgactcagtgaccatgacatgcgaagtgtcttcatctaacccagaatatactaccgtgtcgtggctaaaagacggaacgtccctgaagaagcagaatacctttacgctgaatcttcgtgaagttacaaaggaccagtccgggaagtattgttgccaggtgagtaacgacgtagggccaggtcgatcggaggaggtcttcctgcaggttcagtatgcacccgagccaagcaccgtgcagatactccattcaccagccgtggaaggcagccaggtcgagtttctgtgcatgtcactggcaaatcctctacctactaattacacatggtaccacaacggtaaggagatgcaaggcagaaccgaggaaaaggtccacattcccaaaatcctcccctggcacgccggtacatactcatgtgtggctgaaaacatacttgggactggccagagaggccctggtgcagaactggacgtgcagtaccctccaaaaaaagtgacgacagtgatccagaatccgatgcccataagagagggagatacagtgacgctgtcatgcaactataattcctcaaatcccagtgtgacacgctacgaatggaagcctcatggtgcctgggaagagccttccctcggcgtgctgaaaatacaaaatgtgggttgggataacactacaatcgcctgcgcggcatgtaactcttggtgctcttgggcaagcccggtggcactcaatgttcagtacgcgcctagagacgttcgggtgcgcaaaatcaagcctcttagtgaaatccactcaggaaattccgtgtcccttcaatgcgatttcagcagctctcatcctaaagaagtgcagtttttttgggagaagaatgggagactgcttggaaaagagagccagctcaactttgattcaatctcaccagaggatgctgggtcctactcttgctgggtcaacaattccatcggacagacagcatccaaagcttggacactggaggtcctgtacgctcctcggagactgcgggttagcatgtcacctggggaccaggtgatggaggggaaatcagctaccctgacctgcgagtccgatgcaaatcccccagtgagtcactatacctggttcgattggaacaatcagtccctaccttatcatagccagaagctgagactcgagccagtaaaggtgcagcactcaggcgcatactggtgccaaggcacgaatagtgtgggaaaaggcaggtcaccactttctacattaacagtctattattcacccgagaccattggtcggagagtggcagtgggcctgggaagttgcctggctatccttattttagctatctgcggcctcaaactgcagagacgatggaaacgaactcagagccaacagggactgcaggagaactcctcagggcaaagcttctttgttaggaataaaaagcgctgtcgcgtgctgcgtgacgccgaaacatctcccggattgaggtag

SEQ ID NO: 27887 - DNA, 783 bp, synthetic construct
  misc_feature 1..783: note = Description of Artificial Sequence: Synthetic coding sequence
  source 1..783: mol_type = other DNA
atggcacgccctcacccctggtggctctgtgtgctgggtaccctcgttgggctttccgcaaccccggctccaaagtcgtgccccgagcgacactactgggcccaaggcaagctctgctgtcaaatgtgtgagccaggaacttttcttgtcaaagattgtgatcagcataggaaggccgctcagtgtgatccctgtattccaggcgtttcattcagccctgaccatcatactcgccctcactgtgagagctgcaggcattgcaactccggcctgttggtgagaaattgtaccatcaccgccaatgcagagtgtgcctgcaggaatgggtggcagtgccgtgataaagagtgtacggaatgcgatccgctcccaaaccctagcctaaccgctcgatctagccaagctctgtctcctcacccccagccaacacatcttccatacgtgtccgaaatgttagaggccaggacagcaggacacatgcaaacactggctgatttccgtcaattacccgctcggacactgagcacacactggcctccccagagaagtctttgttctagcgattttattcgcatccttgtgatcttctctggcatgttcctggtcttcactcttgctggggctctcttcctacatcagcgccgtaaatataggagcaataaaggggaaagccccgttgaacccgcagagccttgtcactactcgtgccccagagaagaggagggaagcacaatcccaattcaagaagattaccgtaaaccggagccagcctgctccccatag

SEQ ID NO: 27888 - DNA, 1158 bp, synthetic construct
  misc_feature 1..1158: note = Description of Artificial Sequence: Synthetic coding sequence
  source 1..1158: mol_type = other DNA
atgctagtgaggcgcggagccagagccggaccacggatgcccagaggctggaccgccctttgccttctctctctcctgccctcagggttcatgtccctagataacaacggaaccgccacaccagaactgccaacacaaggcactttttcaaatgtctctaccaacgtttcctaccaggagactaccacacccagtacgctggggagtacgagcctgcaccctgtgtcacagcatggtaatgaggccactaccaacattacggaaaccaccgtaaagttcacatccacctctgtcatcacatccgtgtacgggaacactaactcctccgtgcaatcacagacatcagttatcagcaccgtctttacaacaccagccaacgtgtctactcctgaaacgacgctcaagccgtctctgtctcctggcaacgtatcagacctgagtactactagcaccagtctggcgacttcacccaccaagccatataccagttccagccccattttgagcgacataaaagccgagattaaatgctctggcattagggaggtaaaactgacccaggggatctgcctagagcagaacaaaacttcttcttgcgctgaattcaaaaaagatagaggagaggggctcgcccgagtgctctgcggcgaggaacaggctgatgctgacgcgggtgcccaggtctgctccttactgctggcacagtccgaggtccgacctcaatgtctactcctggttctagccaaccggacggagatctctagcaagctgcagctaatgaagaagcaccaatcggatctgaaaaagttgggaatactggactttaccgagcaagacgtcgccagtcaccagtcctatagccaaaagaccctcatcgctctcgtgacaagcggcgctttgctggccgtgcttggtataacagggtatttccttatgaaccgcaggagttggagtccgaccggcgaacggctgggtgaggacccctattacactgaaaatggcggtgggcagggctattctagtggacctggcacttcgcctgaagcccaaggaaaagcgagcgtaaatagaggggctcaggagaatggaacaggccaagccacatctaggaatggacacagcgccaggcaacacgtggtggccgatactgagctctag

SEQ ID NO: 27889 - DNA, 987 bp, synthetic construct
  misc_feature 1..987: note = Description of Artificial Sequence: Synthetic coding sequence
  source 1..987: mol_type = other DNA
atgctggttagacgcggtgcgagagctgggccacgaatgccgagaggctggacagctttgtgcctgttatccctactgccctcaggatttatgtcactggacaataacggcacagcaaccccagagctgcctacacagggcacgttttcaaacgtttccacgaatgttagctaccaagaaaccaccacaccgagtaccctggggtccacatctctgcaccccgtctcccagcacgggaatgaggctactactaatatcaccgagaccaccgtcaagttcactagcacatctgtgatcacaagcgtgtacggtaatactaattcttccgtccagtcccagactagcgtgatcagcaccgtgtttacaacccctgccaatgtgagcacgccagaaacaaccctgaagcccagcctatcgccaggcaatgtttccgatctgtctactacttcaacaagcctagccacaagtcccacaaaaccgtacacaagtagtagccctattttgagcgacatcaaagcagagattaaatgttccggaatccgcgaggtgaaattgacgcaaggcatctgccttgaacaaaacaagacatcatcctgtgccgaatttaaaaaagacagaggtgagggtttggctagagtgctttgtggcgaggagcaggccgacgctgatgccggagcgcaggtttgcagtctcttgctggcccaatctgaagtgcgccctcagtgcctgcttcttgtacttgctaacagaactgagatcagcagtaaactccagcttatgaagaaacaccaaagcgaccttaaaaagctagggatccttgattttaccgagcaggatgttgcctcccaccagagttatagccagaagactttgattgcgctggtgacatccggcgcactattggcggttttgggtatcacaggttacttcctgatgaatcgaaggagctggagccctacaggcgaaagactcgaactagagccttag

SEQ ID NO: 27890 - DNA, 684 bp, synthetic construct
  misc_feature 1..684: note = Description of Artificial Sequence: Synthetic coding sequence
  source 1..684: mol_type = other DNA
atggacttcgggccaggccgtctgttcagattcttctcttactgtgtagtagctcatatccaacttgccgtgttctttttctcagtcggaattctcgagacaaggattctgcttgctgacggcgcagagtttaagaaggacagaggagaggggctggcacgagtgctttgcggggaggaacaggcagatgctgatgctggtgctcaagtgtgttccctcctgctagcacagtccgaggtccggccacagtgccttcttctcgtgctcgccaacaggacagaaatcagcagcaagctgcaactgatgaagaaacatcagtctgacctgaaaaaactggggatcctggacttcacggagcaggacgtggcttcccatcagtcctattcccagaaaacactgattgcgctggtgacctcaggcgcactgctggctgtcctgggaataactggctatttcctgatgaacagaaggtcctggagcccaaccggcgaacgcctaggcgaagatccgtattatactgagaatgggggaggccagggttacagcagtggcccaggtacatctccagaagcgcagggcaaagcctccgttaataggggcgcacaggaaaacggtactgggcaggcaacctcacggaacggacactccgccagacaacatgttgtagccgacactgaattgtag

SEQ ID NO: 27891 - DNA, 1068 bp, synthetic construct
  misc_feature 1..1068: note = Description of Artificial Sequence: Synthetic coding sequence
  source 1..1068: mol_type = other DNA
atgagcctcgacaacaacggtacagccacaccggagctccccacccagggaactttctccaacgtcagtactaacgtctcttaccaggaaactactacgcccagcacactggggtcaacatcactccatcccgtgtcacagcatggtaatgaggctactacaaacatcactgagacaaccgtgaaattcacaagcaccagtgtcatcacaagcgtgtacggcaataccaatagtagcgtgcaatcacagacttcagtaatcagtacagtgttcaccacaccggctaatgtgtccactccagagaccacattaaaaccctcattgtcacctgggaacgttagtgacctgtcgaccacatcaaccagtcttgccacaagccctacaaaaccatatacctcctcgtctcctattcttagtgacataaaggctgaaatcaagtgcagcggaatcagagaggtaaagcttacacagggcatatgcttggagcagaataagacctcctcctgcgccgaattcaagaaggatcggggagagggactcgcacgagttttgtgcggtgaggaacaggccgatgccgacgccggagctcaagtctgcagtctattactggcacagtctgaggtgaggccccaatgcctcctgctggttctagctaatagaaccgagatttccagcaagctacagttaatgaaaaagcaccaatccgacttgaaaaaactggggatcctcgacttcactgagcaggacgtcgctagtcaccagtcatactcccagaaaacactcatcgctctggtgaccagtggcgctctcctggcggttttaggaattacaggctacttcctgatgaaccggaggagttggtcacctaccggggaacggctgggcgaggacccttattacaccgagaatggagggggtcaaggttacagttctggtcccggaacctcacccgaggcgcagggaaaggcttctgtcaatcggggtgcccaggagaacgggaccggacaagctacatcaaggaacggacactccgcacgacagcacgtggtcgcagatacagaactgtag

SEQ ID NO: 27892 - DNA, 753 bp, synthetic construct
  misc_feature 1..753: note = Description of Artificial Sequence: Synthetic coding sequence
  source 1..753: mol_type = other DNA
atgtttctgcaaatgtatcccacaaagaaactgcagcatcttgtgccccttgaagtgcccgcttgtactctgtgcctcaatatggctatgcggcctcagcagactagccaggcagagatcaagtgcagcgggatcagagaggtgaagctgacacagggaatatgtcttgagcaaaataaaacgtcgtcctgtgccgaattcaagaaggaccgaggcgaggggctcgcgcgtgtcttatgcggcgaggagcaagccgatgcggatgctggggcacaagtctgtagtctgttactggcacaaagcgaagtgcgacctcaatgtctcctgctggttcttgctaacagaacagaaattagcagcaagctgcagctgatgaaaaaacatcagtctgacttgaaaaaacttggcattcttgatttcacagaacaggatgtggcgagccatcagtcctattcacagaaaactctgatcgccttagtcaccagcggcgcactgttggccgtcctaggcataacgggatatttcctgatgaatcggaggtcatggtcgccaaccggagaaagattaggggaggacccatattacactgaaaatgggggaggacagggatacagctctggaccaggaacatccccagaagcccaggggaaggccagtgtgaacaggggtgcacaggaaaatgggacaggccaagccacaagcaggaacggacattctgctcggcagcatgtggtcgccgacacagagctgtag

SEQ ID NO: 27893 - DNA, 516 bp, synthetic construct
  misc_feature 1..516: note = Description of Artificial Sequence: Synthetic coding sequence
  source 1..516: mol_type = other DNA
atggagcactcaacttttttgagtggccttgtcctagctacactactctctcaggtcagcccttttaaaattcccattgaggagttagaggatagggtattcgtgaactgcaacactagcatcacttgggtggaaggcactgtcgggactctgctgtccgatatcacaaggttagacttgggtaagcggatattagatccaagagggatatacaggtgtaacgggacggacatatataaggataaggagtcaacagtccaggtgcattataggatgtgccagtcttgcgttgagcttgatccagccaccgtcgccggtattatcgtgacagacgtcatcgctacactgctcctagctttgggtgtgttctgtttcgctggacatgagactggccgactcagtggagcagctgatactcaagcgctgctgcgcaacgaccaggtgtaccaacccctgcgggatcgagatgacgcccagtatagtcatcttggaggcaattgggcacgcaataaatag

SEQ ID NO: 27894 - DNA, 384 bp, synthetic construct
  misc_feature 1..384: note = Description of Artificial Sequence: Synthetic coding sequence
  source 1..384: mol_type = other DNA
atggaacactccacatttctctccgggcttgtgctggccactctgctgtctcaggttagccctttcaaaataccgatcgaggagttggaagacagagtgtttgtgaactgcaataccagcattacttgggtcgaaggcaccgtgggcacactcctttccgatatcacgagactggatttagggaagcggatactcgacccacgcggaatttacagatgcaatggaaccgacatctacaaggacaaagaatctactgtgcaggtgcactaccggacagccgacacccaggcactgctcagaaatgaccaggtgtatcagcccctgagggaccgcgatgatgcccaatattctcatttgggaggtaattgggcgcgaaataaatag

SEQ ID NO: 27895 - DNA, 1377 bp, synthetic construct
  misc_feature 1..1377: note = Description of Artificial Sequence: Synthetic coding sequence
  source 1..1377: mol_type = other DNA
atgaatcgaggggtgcctttcaggcacctgctcctggttctgcaattggccctcttgcccgctgctacccaggggaagaaggtcgtgctcgggaagaagggggacaccgtagagcttacctgtacagctagccaaaagaagtctattcagttccattggaaaaattcaaatcagatcaaaatactcgggaaccagggcagtttccttaccaagggaccatcaaagcttaacgaccgcgctgatagccgccgatccctatgggaccaaggcaattttcctttgatcattaaaaaccttaagatcgaggacagcgacacttacatctgcgaagtggaggatcagaaggaagaagtgcagctgctggtctttgggctgaccgctaactctgacacacacctgctccagggacaatcattaacgctgaccctggagtcacctcctggctcctctcccagtgttcagtgtcgctccccgagaggtaagaacattcaggggggaaagaccttatctgtttcccagttagagttgcaggatagcggcacctggacctgcaccgtgctgcagaaccagaaaaaggtagaatttaaaatcgatatcgtggtgctcgctttccaaaaagcttcatcaatcgtgtataagaaggaaggggaacaagtggagttctccttcccactggccttcaccgttgagaagctgactggaagcggagagttgtggtggcaggcagaaagagcatcctcaagtaagtcctggatcaccttcgacttgaagaataaagaggtgtctgttaagcgtgtcacccaagaccctaagctgcagatgggtaaaaagcttcccctgcatctcacccttccacaagcgctcccacagtacgcgggatccggtaacctgactctagccctggaagcgaagacaggaaagctgcatcaagaagttaatctggtggttatgcgggctacgcagctgcagaaaaacctcacctgcgaagtttggggtccaaccagtcccaaacttatgctcagcctcaaactggagaacaaggaggctaaggtttcaaagagggagaaggctgtctgggtgcttaatcctgaggctggcatgtggcagtgcctgttgagcgatagcggccaggtgctgcttgaatccaacataaaggtccttcctacatggtcaactccagtgcagcctatggctctgattgtgctcgggggtgtagccggattgctccttttcatcggcttgggcatatttttttgcgtaagatgtaggcaccgcagaaggcaggctgagcgcatgagccagatcaaacgccttctgtcggagaaaaagacctgccagtgtccccatagattccagaaaacatgttctccaatatag

SEQ ID NO: 27896 - DNA, 723 bp, synthetic construct
  misc_feature 1..723: note = Description of Artificial Sequence: Synthetic coding sequence
  source 1..723: mol_type = other DNA
atgatcgagacgtataaccagacatctccacgttcagcagccactggcctacctatctccatgaaaatattcatgtatctcctgacagtcttcctgataactcagatgatcggctcagccctattcgcagtgtatttacaccgtcgtctcgacaagatcgaggacgaacggaatcttcatgaggattttgtgttcatgaagacaattcagcgctgtaatactggagaaaggtccctgtccctgctgaactgcgaggagattaagagtcaattcgaaggttttgtgaaggacatcatgcttaacaaagaagagacaaagaaagaaaattccttcgagatgcaaaaggtgctccagtgggctgagaagggctactacacaatgtccaacaacttggtcacattagagaacggcaagcaattgacagtcaagagacaggggctctactacatttacgcacaggtcaccttttgcagcaaccgtgaagcctcttctcaagctcccttcattgcatccctatgcctgaaatctccgggacggtttgaacgaatcctgttgagggccgcaaatacccactctagcgccaaaccatgcggccagcaaagcatccatctgggcggtgtgtttgaactgcagcctggggcaagtgtttttgtgaatgtcacagaccctagtcaggtgagtcacgggacaggcttcacttcatttggtctgctgaagctctag

SEQ ID NO: 27897 - DNA, 786 bp, synthetic construct
  misc_feature 1..786: note = Description of Artificial Sequence: Synthetic coding sequence
  source 1..786: mol_type = other DNA
atgattgagacgtacaatcagacaagcccccgaagcgcagcgaccggacttcccataagtatgaaaatctttatgtatctgctgaccgtgtttcttatcacccaaatgataggctccgctctatttgccgtgtatctccatcgcaggctagataaaatcgaagatgagcgaaacctgcatgaggactttgtgttcatgaagactattcagaggtgtaacacaggtgagcgttcgctttctctgctgaattgtgaagaaatcaagtcccagtttgagggcttcgtcaaggatataatgctgaacaaagaggagaccaagaaggagaacagcttcgaaatgcaaaagggagaccagaacccacaaatcgcagctcacgtcatatcagaggcctcatcaaaaacaacatcggttctgcaatgggctgaaaagggctattataccatgtctaacaatttggtgaccttggaaaatggtaaacagctcaccgtgaagcggcagggcctttactacatatacgctcaggtgactttttgctctaatcgggaagccagcagtcaggcaccattcattgcttcgctctgcctgaaaagcccagggagatttgaacgcattttactgcgcgctgcaaacacccactctagcgctaagccatgtggccaacagtccatacacttaggcggagtattcgaattacagcctggcgctagtgtcttcgttaatgtaacagatccatcccaagtgagtcacggcaccggcttcacctcttttggtctgttgaagctgtag

SEQ ID NO: 27898 - DNA, 612 bp, synthetic construct
  misc_feature 1..612: note = Description of Artificial Sequence: Synthetic coding sequence
  source 1..612: mol_type = other DNA
atggtgaggctgcctctgcagtgtgtgctgtggggttgtctgctgaccgccgtacaccccgagcccccaacagcctgtagagaaaagcagtacctgattaactcccagtgctgttccctgtgtcaaccaggacaaaagttggtgtctgactgtacggagttcactgaaacagaatgcctcccctgcggggagagtgaattcttggacacctggaaccgtgagacacattgccaccagcacaaatactgcgaccccaacctcggccttcgggtacagcagaagggaacatcagagacagacacaatctgcacttgtgaggagggatggcattgtaccagcgaagcgtgtgagagctgtgttctccaccgatcatgctcccctgggtttggagtgaagcagattgccactggagtttctgacactatctgcgagccatgccctgtcggcttcttttcaaacgtttcctctgcattcgaaaaatgtcacccgtggacacggtcacctggatccgctgaatcccctggaggagaccctcatcaccttcgagatcctgtgtgtcaccctctcggggcaggactctaccagaagggaggtcaggaggccaaccagtag

SEQ ID NO: 27899 - DNA, 786 bp, synthetic construct
  misc_feature 1..786: note = Description of Artificial Sequence: Synthetic coding sequence
  source 1..786: mol_type = other DNA
ggaaggagtcccctccggacacgggatagagtcttgaccaactgggaggatggactgaccgtcgcttatggtgcagtgaagctgatccaatcactgtccctccagcctgttggctggcagcagaactggggcctcagcagtcccccaacaatgttgcttccttcacgcgctcagtcacctactgagttgccccttgctccgttggcagagccaaacacagggtgttcatctctgttatcctggcacagcaccagaggcgagttgcacctgtgggctctggggcttggacagatgggtggtagcaagtgtggtagtcccctgtcacctttggcccctaccctggaagcgctgcgcagaccatggtgcgggcagcaaggcgctgggggaactcggggtatttcgaccgaccccccaagcggaaaaggcggacgcgcatggggacgggaccccctacccagggaggggctactaaggggcaccgctgcccctgccgctggaggtgatctgaccccctgcctgagcagacctcctacacctagtcgcaatccgcgaagaagtatcttccccaccatcttcctggctcctacgctcctactgcagtgccgcagactctacatggacgcaaaccgctcccctcgcagaatggccaagcgggttgcatcacagtgccgcagagacagtgaggccgctcctacacaagaatgcggacacgttgggaagcaggccgtgggtcagagagcttggtgctgttgctgctgcggcgtcagagtcaggggatggcactag

SEQ ID NO: 27900 - DNA, 834 bp, synthetic construct
  misc_feature 1..834: note = Description of Artificial Sequence: Synthetic coding sequence
  source 1..834: mol_type = other DNA
atggtacgattacctcttcaatgcgtcctatggggctgcctgttgacagcagtgcatcccgagccgccaactgcctgcagagagaagcaatacctgatcaattctcagtgctgctctctgtgccagccagggcagaaattggtcagtgattgcacagaattcacagagacggaatgccttccctgtggggagtccgaattcctggatacatggaatcgggagactcactgtcaccagcataagtattgcgacccaaatctgggtttacgagtccagcagaaagggacaagcgaaaccgatacaatttgcacgtgcgaggaggggtggcactgcacttccgaggcttgcgagtcatgcgttttgcaccgcagctgctcccctggctttggtgtcaaacagattgcaaccggggtttctgacacaatttgcgaaccatgcccagtaggctttttctcgaacgtctcaagcgcttttgagaaatgtcacccttggacctcttgtgaaacaaaggacctggtcgtacagcaggccggtaccaacaagacagatgtggtgtgcggccctcaggacagactccgtgccttagtggtcattcctatcatcttcggcatcttgtttgccatcctgctggtcctggtgttcataaagaaggtggcaaaaaagccgaccaataaggcccctcaccccaagcaggaaccacaggaaataaactttccagacgacctcccaggaagtaataccgcggcacccgtccaggaaactttgcacgggtgccaacccgtgacccaggaggacgggaaagaaagccgcatcagcgtccaggaacgacaatag

SEQ ID NO: 27901 - DNA, 1086 bp, synthetic construct
  misc_feature 1..1086: note = Description of Artificial Sequence: Synthetic coding sequence
  source 1..1086: mol_type = other DNA
atggacaaattttggtggcacgctgcctggggactgtgcttggtacctctgtcattagcacagatcgacctcaacattacttgccgattcgccggagtttttcatgttgaaaagaacggcaggtacagcatttccagaaccgaggccgctgatctgtgtaaagccttcaactcaactcttcccacgatggcccagatggaaaaggcactttctatcggatttgagacatgccgttacggctttatcgaaggacacgtggtcatcccacgcattcaccccaattctatctgtgcagccaacaatactggggtgtatatcttgacgtcaaacacctcccagtatgatacttattgtttcaatgccagcgcccctcctgaggaagattgcacgagtgtcacagatttgcctaatgcctttgatggcccaattactatcaccatagtgaacagagatggtacacggtacgtgcagaaaggtgagtacagaaccaaccctgaggacatctatccgagtaaccctactgatgacgacgtctctagtggctcctcttctgagaggagctccacatccgggggttacatcttctatacttttagcactgttcaccctattccggacgaggatagcccctggattaccgactcaaccgacagaataccagccaccagggatcaggacacttttcatcccagcggcggttcacatacaacccacggctccgagagcgacggacactcccacgggagccaggaaggaggagcgaacaccacaagtggccctatcagaactccccagatacctgagtggctcattatcttggcctcattgttagctctggccctcatacttgcagtgtgcatcgctgtgaattctcgaagaagatgcgggcagaagaagaagctggtgataaattcaggaaatggagcggtggaggatagaaagccgagcggattaaacggggaagctagtaagagtcaagaaatggtccatttagttaataaggaaagttcagaaacgccagatcagttcatgaccgccgacgaaaccagaaatctgcaaaacgtggatatgaaaattggcgtctag

SEQ ID NO: 27902 - DNA, 420 bp, synthetic construct
  misc_feature 1..420: note = Description of Artificial Sequence: Synthetic coding sequence
  source 1..420: mol_type = other DNA
atggacaagttttggtggcatgcggcatgggggctctgtcttgtgccactgagtctcgcccagatcgacctgaatatcacctgcagatttgcgggagttttccacgtcgagaaaaacggcaggtattcaataagcaggaccgaagccgctgatctctgcaaagcgtttaactccactctgccaactatggcccagatggagaaagccttgagcattggattcgagacatgttcactgcactgcagtcagcaatcaaagaaagtgtgggctgaggaaaaggctagcgatcagcaatggcagtggagttgcggtgggcaaaaggctaagtggacgcaacggcgaggccagcaggtatccggcaacggagcattcggggagcaaggcgtcgtgagaaactctcgtccagtttacgactcctag

SEQ ID NO: 27903 - DNA, 1023 bp, synthetic construct
  misc_feature 1..1023: note = Description of Artificial Sequence: Synthetic coding sequence
  source 1..1023: mol_type = other DNA
atggataaattctggtggcacgccgcttggggtttgtgcctggtcccactctcactggcccagatcgatttgaatatcacctgtcggttcgccggtgttttccatgtggagaagaatgggcgatacagcatcagtcgtacagaagctgcagatctgtgcaaagccttcaacagcacactgccaactatggcccagatggaaaaggctctaagtatcggctttgagacctgccgttacggctttattgaaggccacgtggtgatacccaggatccaccctaattccatttgtgcagctaataacactggagtgtacattcttacttctaacacatctcagtatgatacatactgcttcaatgcttccgcaccgccagaggaagactgtacgtcagtgacggatctcccaaatgcctttgacggacctattactattacaatagtgaacagggatggcaccaggtatgtgcaaaagggagaatatagaacgaatcccgaagatatctacccatccaaccccactgatgacgacgtaagttctgggagctctagcgagaggagcagcacgagcggcggatacatcttctataccttctccacagtgcatccaatccctgacgaagattcgccctggattacagacagtaccgatagaattcccgctacgcggcattcacacggcagtcaagagggtggggcaaatacaactagtggaccgatccggaccccccaaatacccgaatggcttatcatcctcgcttctctgctggccctcgctttaatattggccgtctgtatcgcagtgaattccaggcgcaggtgtggtcagaagaaaaagttagtgatcaactcgggcaacggcgcagttgaggatagaaagcccagcggcctgaatggggaagctagcaaatcgcaggagatggtacacctagtaaacaaagagagttccgaaacaccagaccagttcatgactgccgatgagacgcggaacttgcagaatgtggatatgaaaattggggtttag

SEQ ID NO: 27904 - DNA, 1191 bp, synthetic construct
  misc_feature 1..1191: note = Description of Artificial Sequence: Synthetic coding sequence
  source 1..1191: mol_type = other DNA
atggataaattttggtggcacgccgcttggggcttatgtctcgtgcccctgtcattggcccagattgatctcaacattacatgtaggttcgccggagtgttccacgtggagaaaaatggcagatattcaatctcacgtactgaggctgcggacctctgcaaagccttcaatagcactctgcctaccatggcacagatggaaaaggccctatcaataggtttcgagacttgcaggtacggctttatagagggccatgtcgtgatcccgcgaattcatccgaacagcatttgtgcggcaaacaacactggggtgtatatactgactagcaacacctcccaatatgacacttattgcttcaatgccagcgcaccacctgaagaggattgcactagcgtgacagacctccctaacgcctttgacggccctatcacaatcaccatcgtcaatcgggatggcacacggtacgtgcagaaaggtgaatataggaccaaccccgaggacatttacccttcaaatcctacagatgacgatgtctcatccggttcatcgtcagagcggtccagtacaagtgggggttatatattctatacattctcgactgtgcatcccattccagacgaggattctccatggatcactgatagcacagacagaatcccagctacaaacatggattcgagccactcgatcacccttcaacctacagccaaccccaatacaggtttagtagaagacctcgacagaacagggccattgagcatgaccactaggcgcgaccaggacacttttcacccaagtggaggcagccatactactcacggttctgaaagcgacgggcatagccacggctcacaggaggggggagctaacactaccagcggcccaatcaggacacctcaaatccccgagtggctcatcatcctggcgagtctcctcgccctcgctctgatcctggcggtctgcattgcagtgaattctagaagacgatgtggtcagaaaaaaaaactggtaattaacagtggtaacggagctgtggaagatagaaagccaagtggtttaaatggcgaggcatcaaagagccaggagatggtgcacttggtcaataaggaatcatcagagacgccggatcagttcatgaccgctgatgagactcggaatctccaaaacgtcgacatgaaaattggcgtctag

SEQ ID NO: 27905 - DNA, 2100 bp, synthetic construct
  misc_feature 1..2100: note = Description of Artificial Sequence: Synthetic coding sequence
  source 1..2100: mol_type = other DNA
atggacaaattctggtggcatgccgcatggggcctctgcctggtccctctatccttggcccagattgatctcaatattacttgtcgcttcgccggtgtgtttcatgttgagaaaaatgggaggtactcaattagcagaaccgaagctgctgacctttgcaaggcatttaattcaacactgcccactatggcgcagatggagaaggccctctccatagggttcgaaacctgtcgttacggttttatagagggtcacgtggtgattcccaggattcacccgaactcaatttgtgccgctaacaataccggtgtatatattctaacgagcaacacatcgcaatacgatacctactgtttcaacgcctcagccccacccgaggaggactgcacttccgtcacggatcttccgaatgcattcgacggcccaattacaattactatcgttaaccgggacgggactagatacgttcagaaaggagagtacaggactaatccggaggatatatatcccagcaatcctaccgatgatgacgtgtcctctggctcctcctcggagcgcagctcgacttctgggggttacatcttctacaccttctccacagtgcatcctatacccgacgaggacagtccgtggatcaccgatagcaccgacaggattccagccactagcacatcctccaacactatctctgccggttgggaacccaatgaggaaaatgaagatgaacgggatcgccacctaagtttttcaggctccggcattgacgatgatgaggatttcatctcatcgacaatcagcacaacacccagagccttcgaccacactaagcagaaccaggactggacccagtggaacccatctcactctaaccccgaagtcctgctgcaaacaaccaccaggatgaccgacgtcgacaggaacgggacaacggcctacgaggggaattggaacccggaggcccacccccctctcattcaccacgagcaccatgaggaagaggagacaccgcactccacgagcacaatccaagccaccccttcttcaactaccgaggagaccgctacgcagaaagagcaatggtttggaaaccggtggcatgaaggatacaggcaaactccaaaggaagattcccacagtactaccggcacagctgctgcatcagctcatacgtcccacccaatgcagggcagaacaacacccagtcccgaagacagttcctggaccgacttcttcaatccgatctcacatcccatgggcagaggccaccaagctggacggagaatggatatggacagttcgcactctataactttacagcctacggctaatccaaataccggactcgtcgaagacctggaccggacagggcctttgagtatgactacccagcagagtaactcacagtcttttagcacatcccacgagggcctagaagaggacaaagatcatcccactacctcaacactcacaagcagtaatcggaatgacgtgaccggcggacgtcgcgaccctaaccacagcgaaggatccaccaccctgctggagggatatacttctcactacccccacaccaaagaatcccggactttcatcccagtgacctccgcaaagacaggctcatttggagtgacggcagtgaccgtcggtgactcaaattctaacgtgaatcgctctctctccggcgaccaggacacgttccacccttccggcggatcccacacaacacacggcagcgaaagtgatgggcactcccatggttcgcaggagggtggggcaaacaccacgtctggacctatcagaacgccccagatccctgagtggctgattatcttggcatcactgctggccctggcgctcattctggccgtctgcatagccgtgaactcccgaaggcgatgtggccaaaagaagaagctcgtcatcaatagcggcaatggggctgtggaggatcggaagccatccggcctgaatggggaggcctccaagagccaggaaatggtccacctggtgaataaggagtcttccgagacacccgaccagttcatgacggcagacgaaacccgtaatttgcaaaacgtggatatgaagattggagtgtag

SEQ ID NO: 27906 - DNA, 243 bp, synthetic construct
  misc_feature 1..243: note = Description of Artificial Sequence: Synthetic coding sequence
  source 1..243: mol_type = other DNA
atggacaagttctggtggcatgcagcatggggcctatgcctagtacccctgtctttagctcaaattgatctaaatattacctgccgcttcgctggagtgttccatgtagaaaaaaatggacggtactccattagtcggacagaggccgctgacttgtgcaaagcttttaatagcaccctccctacaatggcccagatggagaaagctttaagcattggctttgagacgtgctcttccacttag

SEQ ID NO: 27907 - DNA, 2229 bp, synthetic construct
  misc_feature 1..2229: note = Description of Artificial Sequence: Synthetic coding sequence
  source 1..2229: mol_type = other DNA
atggacaagttttggtggcacgcggcttggggtctgtgtctggtcccgctgagcctcgcccaaatcgacttaaatattacgtgtcggtttgcaggtgtgtttcacgtcgagaaaaacggccgatattctatctcccgcacagaggctgcagatctttgcaaggccttcaattctacactccctacaatggcacagatggagaaagcactctcaatcggctttgaaacatgccggtatggattcattgaaggccacgttgttatccctcggattcatcccaattctatctgtgctgccaataatacaggtgtgtacattctgacatctaatacatcccagtatgacacgtactgcttcaacgcatctgcaccccctgaggaggactgcacctccgttaccgatctgccgaacgcctttgatggcccaattacaatcaccattgtgaaccgggacggaactaggtacgtgcagaaaggcgagtaccgcactaatccggaagacatttacccttccaacccaactgatgacgacgtgtccagtggcagcagctccgaacgctccagtacatcgggcggatatatcttctacacattctcaactgtccatcccatccccgacgaggactcaccctggatcacagacagcacagacaggattcctgccaccacattgatgagtactagcgccactgctacagaaacagccacaaagcggcaagagacatgggattggttttcatggcttttcctgccctcagagtccaagaatcatttgcacactacaacccagatggcaggcaccagctcgaacactatttccgcaggctgggagccaaatgaagaaaatgaggatgaaagagacagacacttgagcttctccgggtccggtatcgatgacgacgaagactttatcagcagtacaatatctacaacacctagggctttcgaccacaccaaacaaaaccaggattggacccagtggaatcctagtcactctaatcctgaagtcctgctgcagacaacaacacgaatgaccgacgtagaccggaatggaaccaccgcctacgaggggaactggaaccctgaggcacatccgccactcatccatcatgaacaccacgaggaggaggagaccccccactccacaagcacaatccaggctacacccagttcaacaaccgaggaaacggctactcagaaggaacagtggtttggcaacagatggcatgaagggtaccggcagacacccaaggaggattcgcactctaccactggcacagcggctgcctcagctcacacgtcccaccccatgcaaggccgtacgacgcctagccctgaggactccagttggacagacttcttcaatccaatttcccatccaatggggcgagggcaccaggccggtcgtcgcatggatatggactccagccactctatcactttgcagcccaccgcaaatccaaatacaggcctggttgaggatttggataggacgggaccattgtctatgacaacacagcagagtaatagccagtctttcagtacatcccatgagggtctggaggaagacaaagaccaccccaccacttctacattgacatcctccaatcggaacgatgttaccgggggtaggcgcgaccccaatcactcagaaggatccaccacacttttagagggctatacatctcattacccgcacactaaagagtctcgcactttcatacctgtgacgagcgctaaaacaggcagcttcggggtgaccgcggtgacagtcggggactctaacagtaacgtaaaccgaagtcttagtggcgaccaagatactttccatccgtcgggtgggagccatactacccacggatcagaatccgatggacatagtcatgggtcccaggaaggcggagcaaacaccacgagcggcccaattagaacccctcaaatcccagagtggttgatcattctggctagtctgttggcattagctctcattcttgctgtgtgcatcgcggtgaattcacgcaggcggtgtggacagaagaagaagcttgtgattaattccgggaatggcgcagtggaggatcggaagccctcgggcttgaacggcgaagcgagtaaatctcaggagatggtgcacctagttaataaagagagttctgaaactcctgaccagttcatgaccgccgatgaaaccagaaatttacagaacgtggatatgaagattggagtatag

SEQ ID NO: 27908 - DNA, 2145 bp, synthetic construct
  misc_feature 1..2145: note = Description of Artificial Sequence: Synthetic coding sequence
  source 1..2145: mol_type = other DNA
atggataagttttggtggcacgctgcttgggggctttgcctcgtgccactgagtctggcacagatcgatcttaacatcacgtgccggttcgctggagtctttcatgtagagaaaaacggaaggtacagcatctctcggaccgaggcagcggatctctgcaaggccttcaattctacccttccaacaatggcacagatggaaaaggcactctcgatcgggtttgagacctgcagatatggattcatcgaaggacacgtcgtgattcccagaatccacccaaatagcatctgtgctgcgaataataccggcgtgtatattctgacaagcaacacaagccagtatgatacatattgttttaacgcttccgctcccccagaggaagattgcacaagcgtcacagatctacccaatgcttttgatggtcccatcaccatcacgattgtgaaccgcgacggcaccaggtacgtgcagaaaggcgagtataggaccaacccagaggatatctatccttcaaaccctaccgatgacgacgtgtccagcgggagctcctcagaaaggtcatctacatctggaggatacattttttacaccttttccaccgtacacccaatccccgatgaggatagtccctggatcactgactccacagacaggataccagccactacgttgatgtccacctctgccacagcgaccgaaacggcaaccaagcgccaggagacatgggactggtttagctggctctttctcccttcagaaagcaaaaatcatctgcacactaccacccagatggcgggaacatccagcaacaccatcagtgccggatgggaacctaacgaagaaaacgaggatgaacgcgacagacacctgtcattcagtggctcggggattgacgacgatgaggactttatatcttcgaccattagcaccactccccgagctttcgatcacaccaagcagaatcaggattggacccagtggaacccttcacattccaaccccgaggtgcttttgcaaacaaccacacgcatgaccgctgacgttgatcgcaatggcaccacagcgtacgaggggaactggaaccctgaagcccacccccctctcatccatcacgaacatcatgaggaggaggagacccctcactccacctcaacaatacaggccacgccaagttcgactaccgaggaaaccgccacccagaaagagcagtggtttggtaacaggtggcatgagggctatcgacagacccctaaggaggattctcattccacaaccgggaccgccgctgcttcagctcatacctctcatccaatgcagggaagaaccacaccatcccccgaagacagtagctggaccgatttctttaaccccatttcacaccccatggggaggggccaccaggccggtaggagaatggatatggacagttctcactccatcaccctccagcctacagccaaccccaatacgggcttggtggaagatctcgacagaacgggaccacttagtatgactacgagaaatcggaacgacgtaaccggcggtcgcagagaccctaatcattctgaaggctctacaactttgctggagggctacacttcccactacccccacaccaaggagtcgcgcaccttcatcccagtgaccagtgctaaaactgggtcattcggagtgacagccgtgaccgttggcgactcaaatagcaacgttaatcggtctctgtctggcgatcaggacactttccacccctccggcggaagccacactactcacggttcggagagtgacggtcactctcacgggagtcaggagggaggagcgaatacgacaagtggccctattagaacaccacagataccagaatggctcattatcctcgcatccctcttggctctggctctgattctagctgtgtgcatagccgtaaactcccgtcgcaggtgcggtcagaaaaaaaaactggtgatcaactccggcaatggggcagtcgaggaccgcaagccgtccggtctaaatggggaagcttccaagtcacaggaaatggtgcatctggtaaataaggaatcttccgagacacccgaccagttcatgaccgctgatgagacaaggaacctccagaatgtcgacatgaagattggcgtctag

SEQ ID NO: 27909 - DNA, 1482 bp, synthetic construct
  misc_feature 1..1482: note = Description of Artificial Sequence: Synthetic coding sequence
  source 1..1482: mol_type = other DNA
atggacaagttttggtggcatgccgcatggggcctttgtttggtgcccctgtccttagctcagatcgatctcaatattacttgccggttcgctggcgtgtttcacgtggagaaaaacgggcgttacagcattagcaggacagaagccgcagatctctgcaaagcattcaatagcacactccctacaatggcccagatggaaaaggctttgtctatcggctttgagacttgtcgatacggattcattgagggtcatgtggtgatcccaaggatccaccccaattccatttgcgcagccaataatacaggcgtctatatcctgacgagcaacaccagtcaatacgatacatactgcttcaatgccagtgccccaccagaggaagattgcaccagcgtcaccgacctccctaatgccttcgatggaccaatcacgataacaatcgtcaatcgtgacgggacccgttacgtccagaagggggaatacagaaccaaccctgaggacatctatccatcaaatcctaccgacgatgatgttagcagtggcagtagctcagaacgaagtagcacaagcggaggatacatcttctacacattctctacagtgcatcccataccggacgaggactccccgtggataacggatagcacagacagaatcccggctactaatatggattccagccactccattaccctacaacctactgcgaaccccaacaccggactcgtggaggatctcgaccgcacggggcctctttccatgacgacccagcagagtaacagccagagttttagtacttcccacgaggggctagaagaggacaaagaccatcccacgacttctactttgacatccagcaataggaacgacgtgacagggggacgtcgggatccaaatcatagcgaggggagtacgacactgctggaaggttatacttctcactatccacataccaaagaatctcggactttcattcccgtgacaagcgctaagactgggtcctttggcgtgacagctgtgacggtgggagactcaaattccaatgtcaaccgctctctgtcaggtgaccaggacacgtttcaccccagcgggggatcccacaccacacacgggagtgagtccgatgggcattctcacggttctcaggaaggaggcgcaaacactaccagtggcccaatccgaactccgcaaatccccgagtggcttattattctggcatccttgctggcattggcccttatcttagcagtgtgtatcgccgtcaatagccgtagacggtgcggccaaaaaaagaaactcgtgatcaatagcggaaatggagctgtggaagataggaagccctccggactgaacggcgaagctagtaagagccaagagatggttcatctcgtgaataaagagagctccgaaactccagatcagttcatgaccgccgatgagacaaggaatttgcagaatgttgacatgaagatcggggtgtag

SEQ ID NO: 27910 - DNA, 1290 bp, synthetic construct
  misc_feature 1..1290: note = Description of Artificial Sequence: Synthetic coding sequence
  source 1..1290: mol_type = other DNA
atggacaaattctggtggcacgcagcatggggtctttgtctcgtccctctgtccctggcccagatcgacctgaatatcacctgcagattcgctggcgttttccatgttgaaaaaaacgggagatacagcatttcacgtactgaagccgctgacctctgtaaagcttttaattccaccttgccaacaatggcccaaatggaaaaagcgctcagcattggatttgagacttgccgctacggctttattgaggggcacgtggtgattccaagaatccacccaaactctatctgcgctgcgaacaatactggcgtttatatactgacatctaatacatctcaatacgatacatactgtttcaacgcgagcgctccacctgaggaagattgtacatctgttactgaccttccaaacgcttttgacggacccattactataaccatcgtaaacagagatgggactagatatgtgcagaaaggcgagtaccgtaccaatcctgaggacatctacccaagcaacccaactgatgatgacgtctcgtcaggctcaagctctgaaaggagctccacaagtgggggttatatcttttataccttcagcactgtgcaccccatccctgatgaagactccccttggatcaccgactctactgacagaattcccgctacgaaccggaatgacgtgaccggcggtagacgggatcccaaccactctgaggggtcaacaacccttttggagggatacaccagtcactatccacatactaaagagtcccgaaccttcatccccgtcacctcagccaaaaccggatcattcggtgtgacagccgtgacagtgggtgactctaatagcaatgtcaaccgctcactcagcggggatcaggacactttccacccatcggggggatcacatacaacacacgggagtgaaagcgacggacattctcacggaagccaggaaggaggcgctaacacgactagtggccctattagaacaccacagatccctgagtggctgattatcctggcctctcttctcgcactggcgctgatcctggccgtgtgcatcgccgtaaattcacggagacgttgtggtcaaaagaagaaactggtcataaattctggaaatggcgctgtcgaggacagaaaaccgtctgggctgaatggggaagcctcaaaatctcaggaaatggttcacctggtgaacaaggagtcatccgaaacccccgaccagttcatgacagctgacgaaactcgaaacctccagaatgttgacatgaaaatcggcgtttag

SEQ ID NO: 27911 - DNA, 2025 bp, synthetic construct
  misc_feature 1..2025: note = Description of Artificial Sequence: Synthetic coding sequence
  source 1..2025: mol_type = other DNA
atggacaagttttggtggcacgctgcttggggcctgtgtctcgtcccgttgagcctggcgcagatcgatttaaacattacctgtaggtttgcgggagtgttccacgttgaaaagaatggcagatactctatctccagaaccgaagctgccgatctctgtaaggccttcaattctaccctgcccaccatggcccagatggagaaagccctgagtatcggttttgaaacttgtcgatatggattcatcgagggccacgtcgttatccctagaatccatccgaatagtatctgcgccgcaaacaacaccggagtgtatatcttaaccagtaacacatcccagtatgacacttattgttttaacgcatcagcccctcctgaggaggattgcactagtgtaactgacctgccaaatgccttcgatggcccaatcaccattaccatagtcaacagggacggaactcgatatgtccagaaaggggagtaccgtaccaatccggaagacatctacccaagtaaccccaccgatgacgatgtcagctctggaagctccagtgagcgatcttccaccagcggaggttacattttttacacctttagcactgtgcatccgatccccgacgaagactccccctggataaccgactctactgaccggatcccagccacaacactgatgagcacttcggctactgctactgagaccgctacaaaacgacaagagacttgggactggttcagttggttattcctgccatccgaatccaagaatcatctccacacaaccactcagatggcaggaacctctagtaacaccataagcgcaggctgggaacccaacgaggaaaatgaagatgaaagggataggcacctttcctttagcgggagtggcatcgatgacgacgaagactttatatctagcactatctccacaactccgagagcctttgaccacactaaacagaaccaagattggacccagtggaatccaagccatagcaatccagaagtgctgctccaaaccactacccgcatgaccgatgttgaccgcaacgggactacagcttacgaaggaaactggaatcctgaggcccaccctcctctcattcatcatgagcaccatgaggaggaagagactcctcactccacatctacgattcaggcaactcccagctcaaccaccgaggagactgcgactcagaaggagcagtggttcggtaataggtggcatgaggggtaccgccagacaccaaaggaagatagccacagcactacaggcactgccgcagcttccgctcacacatcccatcccatgcaaggtcggacaacgcccagcccagaagatagctcatggaccgatttcttcaaccccatctcacacccaatggggagaggacatcaggctggaagacgtatggacatggatagtagtcatagtattaccctgcaacctaccgccaaccctaatacaggtctggttgaagacctagaccgcaccgggcctttaagcatgactacccagcagtctaatagccagagtttttccacctcccatgaaggtttggaagaggacaaagatcatcctacaacctccaccctaaccagcagccgggaccaggatactttccacccctccggtggcagtcatactacccacgggtcagaatctgatgggcattcacacggaagccaggaagggggagctaacaccacaagcggccctatcagaacacctcagatccccgagtggctaataatcctggcctcactcttggcgctggcccttatcctggccgtctgcatagcagtgaacagcagacggcgatgcggccagaagaaaaagctcgtgattaacagtggtaacggggcagtggaagaccggaagcctagtggcctaaacggcgaggcctctaagtcccaggagatggtccatctggtgaacaaagaaagctcagaaactcccgaccagttcatgacagctgacgaaacacgcaacctccagaacgtggacatgaagattggcgtgtag

SEQ ID NO: 27912 - DNA, 2100 bp, synthetic construct
  misc_feature 1..2100: note = Description of Artificial Sequence: Synthetic coding sequence
  source 1..2100: mol_type = other DNA
atggataagttctggtggcacgccgcttgggggctgtgtttggtgccactgtctctggcccagatagaccttaatatcacctgtcggttcgccggagtatttcatgtcgaaaagaatggcagatattctatatcccgaacagaggcggctgacttgtgtaaagctttcaattcgaccctgcccacaatggctcagatggaaaaagcactgtcaattggatttgagacatgcaggtacggattcatagagggccatgtggtcataccaaggattcatcccaacagcatctgcgccgcaaacaatactggtgtgtatatcctgacgtccaatacatcccagtatgatacgtactgcttcaatgccagcgcccctcctgaggaggactgcacatccgtgaccgatctgcccaacgctttcgacggacccattaccatcaccatcgtaaaccgggacggcacacgatacgttcagaagggcgaataccgcacaaaccccgaagacatatatccttctaatccgacagatgatgatgtgagcagcgggagcagcagtgagcgcagcagcaccagtggagggtatatcttttacacattcagcacggtgcatcccatacctgatgaagactcgccatggatcaccgattccacggaccgaatcccagctacgacactgatgtccactagtgccaccgcaaccgagacggcaactaaacgccaggaaacatgggactggttttcatggctgttcctgccctctgagtccaagaatcacctccataccacaacgcaaatggcgggaacctcgtcgaatacgatctctgctggctgggaaccaaatgaggaaaatgaagatgagagagacaggcacctttcattcagcgggtctggcatcgacgacgacgaggacttcatcagttccaccatctccacgacgccccgtgcctttgatcacacgaagcagaaccaggactggacgcagtggaatccgagccacagcaaccctgaggtcctgttgcagactacaacgaggatgaccgatgtggatcgcaacggaaccaccgcctatgaaggcaactggaatccagaggctcaccccccactgattcaccatgagcaccatgaggaggaggaaactccccactcaacgtctactactgcatccgcgcatacttcacatcccatgcaggggaggacgacaccaagccctgaggacagcagttggacagacttttttaatcccatcagccaccccatggggcgaggacaccaagctggcagacgaatggacatggactcttctcattcgatcacacttcagcccacggccaacccaaatactgggttggttgaggatctggaccgcactgggccacttagcatgaccacccagcagtcaaactctcagtccttctcgaccagccacgagggcctggaagaggataaagaccacccgacgacctctacactgacttcatcgaacaggaatgatgtgaccggtggtaggcgtgaccccaatcactctgaaggctctacaacactcctggaagggtacacatcgcactatccccacacaaaggagagcagaactttcatccctgtaaccagcgcgaaaaccggctccttcggtgtgaccgccgttactgtcggcgactcgaactctaacgtgaatcgtagcctctctggtgatcaggacactttccatccgtccggaggctcgcacaccactcacggttctgaatccgacggccattcacacggttcccaggagggaggggcaaatacaacatccggacccatccgaacaccccagataccggaatggctcatcatactcgcgtcactgctggctctagctctcattctagccgtgtgtatcgcggtcaatagtaggagaagatgcgggcagaagaagaagttggtgatcaatagtggcaatggagctgtggaagaccggaagcctagcggactcaatggcgaggcatcaaaatcacaagagatggtgcatctcgtcaataaagaaagcagcgagactccggatcagttcatgactgctgacgaaactaggaacctgcagaatgtagacatgaagatcggcgtctag

SEQ ID NO: 27913 - DNA, 237 bp, synthetic construct
  misc_feature 1..237: note = Description of Artificial Sequence: Synthetic coding sequence
  source 1..237: mol_type = other DNA
atggacaagttctggtggcatgctgcctggggcttgtgtctggttccactgagtctcgcccaaatcgacttgaacatcacatgtaggtttgcaggagtctttcatgtggaaaagaacgggagatactccatatctcgtaccgaagccgcagacctctgcaaggcatttaactccacactgcctaccatggctcaaatggaaaaagccctaagcattggattcgaaacgtgcagatag

SEQ ID NO: 27914 - DNA, 885 bp, synthetic construct
  misc_feature 1..885: note = Description of Artificial Sequence: Synthetic coding sequence
  source 1..885: mol_type = other DNA
tgagacaagttctggtggcatgctgcctggggcctgtgcctggtgcctctctctcttgcccagatcgaccttaatatcacgtgccgctttgcgggagtgtttcacgtggaaaagaacggcaggtatagcatcagccggaccgaagcagctgacttgtgtaaagcatttaacagcactttacctaccatggctcagatggagaaggcgctcagtattggatttgaaacctgccgctatggtttcattgaaggccacgtggtgatcccgaggattcaccctaattctatatgcgcagccaataacaccggagtctacatcctcacatccaacacctctcaatatgacacttattgctttaacgcctctgcccctccagaagaagattgcacttccgtgaccgatcttcccaacgccttcgatggcccaataaccatcaccatagtgaaccgcgacggcacaagatacgtgcagaagggcgagtatcggactaatcccgaggacatctatcctagcaatcccactgatgatgacgtgtcctccggatcatcgagcgagaggagcagcacatccggaggctacattttctacacctttagcaccgtacatccaatccctgatgaagatagcccatggattaccgacagtacggacaggatcccagcaaccagggaccaggacaccttccacccatcaggtggcagtcacactacccacgggtccgagtctgatggtcacagccatggcagccaggaaggtggtgccaatactacgtccggccctataagaaccccccagatacccgaatggctcattatcctggcctccctgcttgcactcgcactgattctggctgtgtgtatcgcagtaaacagcagaagatcctag

SEQ ID NO: 27915 - DNA, 918 bp, synthetic construct
  misc_feature 1..918: note = Description of Artificial Sequence: Synthetic coding sequence
  source 1..918: mol_type = other DNA
atgtggccgctcgtggccgctctgctgctgggtagcgcctgctgtgggagcgcccagctcctgttcaataaaaccaaaagtgtcgaattcacattctgtaatgatactgttgtcataccttgtttcgtgaccaatatggaagctcagaacactaccgaggtgtatgtgaaatggaaatttaaaggaagagacatatacacatttgatggggcattaaataaaagtacagtccccaccgatttctctagtgcaaagattgaggtgtctcaattactgaaaggcgatgctagtctcaagatggacaagagcgacgctgtcagccacaccgggaattacacatgtgaggttaccgaactaacacgcgaaggcgaaacaattattgagcttaagtacagagtagtgtcctggttcagtcccaatgaaaacattctgattgtgatttttccaatattcgctatccttttattttggggacagtttggaattaagactttaaagtaccggtcaggcggtatggacgaaaagaccatagcccttcttgtggccggacttgttatcacggttattgtaatcgtgggcgcaattctgttcgtgccaggagaatactcactaaaaaatgcgactgggttgggtctgatcgtgacatctacaggaatcctgatcctccttcattactatgtcttcagcacggccatcggtctgacttcctttgttatcgccattctggtcatacaagtgatcgcctatatcctggccgtggtgggcttatcactctgtatcgccgcatgcataccaatgcatggtccacttcttatctctgggctgtcaattctggccctcgctcagctcctcgggttggtgtacatgaagttcgtcgccagcaatcaaaaaacgattcagccgccacggaacaattag

SEQ ID NO: 27916 - DNA, 972 bp, synthetic construct
  misc_feature 1..972: note = Description of Artificial Sequence: Synthetic coding sequence
  source 1..972: mol_type = other DNA
atgtggcctttggtcgcagcgctattgttgggatcagcttgttgcggctctgctcagttactcttcaataagacaaagtcggtcgagtttaccttctgtaatgataccgtggttattccttgcttcgttacaaatatggaggcccagaacacaaccgaagtttatgttaagtggaaattcaagggaagagacatctatacatttgacggggctctgaacaagtccacggtacccaccgacttttcttcagcgaagatcgaggtctctcagcttttgaagggcgatgcttcccttaagatggataagtccgacgccgtgtcacacaccggcaactacacctgtgaggtgactgagcttaccagagagggagagactatcattgagctgaagtaccgcgtagtgagctggttcagtcccaacgaaaacatcctcatcgtcatttttcctattttcgccatcctgctgttctgggggcaatttggtatcaaaacactgaagtatcggtctggcggaatggacgaaaaaactattgctcttctggtggctggcttggttattacagtgatcgttatagttggggcaatccttttcgttcccggagagtacagtctgaaaaacgcaacaggattaggactcatcgttaccagtaccggaattctgatactgttgcactactacgtgttttccaccgccattggcctcacaagctttgttatcgcaatcttagtgatccaggtgatcgcctacatcctggccgtggtgggactgagtttgtgtattgccgcttgtatcccgatgcacggaccattgcttatctcaggtctgtcgatattggcgctggctcagctgctcggtctggtttacatgaagttcgtggcaagcaatcagaagacgattcagcctccacgaaaagcagtggaagaacctttgaacgcgttcaaagaatccaagggcatgatgaatgacgaatag

SEQ ID NO: 27917 - DNA, 1488 bp, synthetic construct
  misc_feature 1..1488: note = Description of Artificial Sequence: Synthetic coding sequence
  source 1..1488: mol_type = other DNA
atgccgatggggagcttgcagccgctggcaactctgtacctgcttggaatgcttgttgccagctgtctaggcagactgagctggtatgaccccgatttccaggcacggctaacccgctctaattccaaatgccaaggacagcttgaggtgtacctgaaggacggatggcatatggtttgtagtcagagctggggacgaagttctaagcagtgggaggatccttcccaggcctctaaggtgtgtcagcggctcaactgcggtgttcccctgagtcttggccctttccttgtaacttacactcctcagagttctatcatttgttacgggcagcttggaagtttcagcaattgttcacactccagaaacgacatgtgtcattccctgggactaacttgtctagagcctcagaagactacccccccaacaacacgtccacccccaaccaccactccggaaccaaccgcccctcccagactccagctcgtggcccagtcaggcggacagcattgtgctggagtggtggaattttatagtggttcactggggggtaccatatcgtacgaggctcaggacaagacgcaggatctggagaacttcctgtgcaacaacctgcaatgtggatctttcctgaaacacctaccagagactgaggcagggcgagctcaagatcccggtgagcccagagaacaccagcctctcccaatacagtggaaaattcaaaatagtagttgtacgagcttggaacactgtttccgtaaaatcaagcctcaaaagagtggccgtgttctagccctgttgtgctccgggttccagcccaaagtgcaatcccgcttagtcggtgggtcgagtatttgtgaggggaccgtcgaagtgaggcaaggcgctcaatgggcagccctgtgcgatagctcaagcgctcgctcttctctgagatgggaggaggtgtgtcgggagcaacaatgcgggtccgtgaactcatatcgcgttctagacgcgggagacccaacctcaagaggcctcttctgcccccaccagaaactgtcccagtgccatgagctttgggagcgcaattcctactgcaagaaggtgtttgtgacctgccaagatccaaacccggcaggactggccgcaggcaccgtggccagcattatcctcgccctggtgctcttggtggtattacttgttgtgtgtggaccgctggcatataaaaagctggtgaaaaaattcagacagaaaaagcagcggcaatggatcggccctactggcatgaaccaaaacatgtcctttcacagaaatcatacggccaccgtcagaagccacgcagaaaatccgaccgcatcccacgtggacaacgagtattctcagccaccacgaaactcacatctgtctgcttaccccgcactcgagggcgcacttcataggtcctccatgcagcctgataacagcagcgacagcgactatgatctgcacggtgcacagaggctgtag

SEQ ID NO: 27918 - DNA, 582 bp, synthetic construct
  misc_feature 1..582: note = Description of Artificial Sequence: Synthetic coding sequence
  source 1..582: mol_type = other DNA
atgccagaagagggcagcggatgtagtgtaagacgccgaccctatggatgtgtgctccgggcagctctcgtgcccttggttgccggtcttgtcatatgcctcgtcgtttgcatccaacgatttgcccaagcacagcagcagcttccactggaatcccttgggtgggacgtcgcagagcttcagttgaaccacacagggcctcagcaagacccaaggctctactggcaagggggtcccgcactcggtcgttcttttctacatggtcctgaattagacaaaggccagctacgcatacaccgggatgggatctatatggtccacatacaggtaactctcgcgatctgctcttccacaacagcaagccgccatcaccctacaaccttagccgtgggtatttgcagcccagcttctcgatctatcagtctgctgcgattatccttccaccagggttgcactatcgcctcccagcgtctcaccccattagctaggggcgataccctttgtacaaacctgaccggaaccctgctgccctctagaaataccgacgagaccttttttggagtacaatgggtgcgtccatag

SEQ ID NO: 27919 - DNA, 627 bp, synthetic construct
  misc_feature 1..627: note = Description of Artificial Sequence: Synthetic coding sequence
  source 1..627: mol_type = other DNA
atgcccgaagaggggagcgggtgttcagtcaggaggcgtccctatgggtgcgttctgcgtgccgctctcgttcctttggtagcgggattggtgatttgtttggtcgtctgcattcagaggttcgcccaagcccaacagcagctgcccctggagtcgctgggctgggacgtggcagagttgcagctcaatcacaccggtccacaacaggaccccaggttatactggcaaggaggtcccgctttgggcaggagtttcctgcatggccctgaacttgacaagggacaacttcgtattcaccgggacggaatatacatggttcacatccaggtcactctagccatttgcagctccacaaccgcatctcgccaccaccccaccactcttgccgtggggatttgttcacctgcttcaaggagcattagcctcctgcgcctgtcgttccaccagggcttatttgggttttggaattggggcttgaaagtcaagtgtttccttcggcatcttatctggaccgcccactgtttcatcccccttacacagctggtgtttatgcaggccttgcagtcctggagaaaccatcattgcagccactttaccgatgaggagaatcggggtgttaatcggtag

SEQ ID NO: 27920 - DNA, 1305 bp, synthetic construct
  misc_feature 1..1305: note = Description of Artificial Sequence: Synthetic coding sequence
  source 1..1305: mol_type = other DNA
atgtcggcagacggcgcagaggccgatggcagcacacaagtaacagtcgaagagccggtccagcagccatccgtagtggaccgggttgcgtcgatgcctctgattagctccacatgtgacatggtctccgccgcttatgcatcaaccaaagagagttaccctcacatcaagacagtctgcgatgcagcggaaaagggagttcgtaccctcactgcggctgcggtatccggggctcaaccaattttatcaaagttggaaccccaaatcgccagcgcctccgaatatgcccacaggggcctggataaactagaggaaaatctgccgatcttgcaacagccaacagaaaaagtgttagctgacaccaaggaactagtgtcctcaaaggtctccggcgctcaggagatggtctcctccgcgaaggataccgtggccacgcagctgagcgaggccgtcgatgctacacggggtgcagtccagagcggagtggacaagaccaaatccgtggtgacaggcggagtgcagtccgtgatgggctcccgtctgggccagatggttttgtccggtgtggatacagtcttaggtaagtccgaggagtgggctgacaatcatctgcccttgacggatgccgaattagctcgcattgctacgagtcttgatggctttgacgtggcttccgtgcagcagcagcggcaagaacagagttactttgtccggcttggaagcttgagtgaaagactgagacaacacgcttacgagcacagtctgggcaaattaagagcaacaaaacagcgggctcaggaggccctactgcagctgtcccaggtgctctcactcatggaaactgtgaaacagggggtggaccagaaactcgtggagggacaagagaaactgcaccagatgtggctgagctggaaccagaaacagttacagggccctgagaaagaaccacctaaaccagagcaggtggagtccagggctcttacaatgtttagggatattgcacagcagttacaggcgacctgcaccagcttgggatcttcgattcaggggctgcccaccaacgtgaaggatcaagttcaacaggctaggaggcaggtcgaagacctccaggccacgttttcgtctatccattccttccaagatctctcctccagtatactggctcaaagcagagaaagagtggcgtcagcccgagaggctttagaccacatggtggaatacgtcgcccagaacacccccgttacttggttagtcgggcctttcgcccctggcattacagagaaggcccctgaagagaagaaatag

SEQ ID NO: 27921 - DNA, 567 bp, synthetic construct
  misc_feature 1..567: note = Description of Artificial Sequence: Synthetic coding sequence
  source 1..567: mol_type = other DNA
atgcctggaggcccaggggtgctccaggccctgcccgcaacaatctttctcctcttcttgcttagtgcggtgtacctcggccctggatgccaggccttgtggatgcacaaagtgcccgcatctctgatggtctcactgggcgaggatgcacacttccaatgcccacacaactctagcaacaatgcgaacgtaacctggtggcgagttttgcacggaaattatacttggccgccagagttcctgggcccaggagaggaccccaacgagccccctcctcgacccttcttggatatgggagagggaacgaaaaatagaattatcacagctgaggggatcatcctgctcttctgtgctgtggtccctggcacattgctgctcttcaggaagcggtggcagaatgaaaagctcgggctcgacgccggagatgagtatgaggatgagaacctgtacgaaggtctgaatctcgacgattgctcgatgtatgaagacatctcacgcggactgcagggcacctaccaagacgtggggtccctgaacataggagatgttcagctggagaaaccctag

SEQ ID NO: 27922 - DNA, 867 bp, synthetic construct
  misc_feature 1..867: note = Description of Artificial Sequence: Synthetic coding sequence
  source 1..867: mol_type = other DNA
atgggtcacacgcgcagacaaggcacttcccccagcaagtgcccttatctgaacttttttcaactgcttgttctggctggtctgtctcatttttgctcaggggtgatacacgtcactaaagaggttaaggaggtggccactttaagttgtggacacaacgtttccgtggaggagttagcacagacaaggatctattggcaaaaggagaagaagatggtcctgactatgatgtctggagatatgaacatctggccggagtacaagaatcgaacaatcttcgacatcacaaataacttaagtattgtcatccttgccttgaggccaagcgacgagggaacgtacgagtgcgtggtgctgaaatatgaaaaggatgcttttaagagagagcacctggccgaagttactctcagcgtgaaggccgacttcccgacgccctccatttctgactttgagatccccacaagcaatatacgtcgcatcatatgcagcaccagcggtggctttccggagccacatctatcctggttagagaacggggaagagctaaatgctattaatacgaccgtgtcgcaggatccagagacagaactgtacgctgtctcaagtaagctggattttaacatgaccacaaatcattctttcatgtgtctgatcaagtatggtcatctgagagtcaatcagaccttcaattggaacaccactaaacaagaacacttcccagacaatctgctgccgtcatgggccatcacgttgatatcagtgaatggcatatttgtgatttgttgcctaacatattgcttcgccccacgttgcagggaacgcagaagaaatgaacggctgcgacgcgagagtgttagacccgtgtag

SEQ ID NO: 27923 - DNA, 489 bp, synthetic construct
  misc_feature 1..489: note = Description of Artificial Sequence: Synthetic coding sequence
  source 1..489: mol_type = other DNA
atggggcacactcggaggcagggaacgtctccgagtaaatgtccctacctgaacttctttcagttgcttgtgctcgccggtctatcacatttctgtagcggcgtgatccatgtgacaaaagaagtgaaggaggtggctacattatcatgtggccacaatgtgagcgtagaggagttggctcagacacgcatatattggcagaaggaaaaaaaaatggttttgacaatgatgagcggtgatatgaacatttggcccgagtacaagaacaggaccatctttgacataacaaacaacctgagcatcgtgattctggccttgaggccaagcgatgaaggaacatatgaatgtgtcgtcttgaagtacgagaaagatgcctttaagcgagaacatcttgcagaagtgacactgtccgtcaagggattcgcacccaggtgccgcgaacggcgacgaaacgagcgccttagacgcgaaagtgtgcggccagtgtag

SEQ ID NO: 27924 - DNA, 771 bp, synthetic construct
  misc_feature 1..771: note = Description of Artificial Sequence: Synthetic coding sequence
  source 1..771: mol_type = other DNA
atgggccacactagacggcagggcacctcgcctagcaagtgtccatatctgaactttttccagctcctcgtgctggcagggcttagccatttttgttcaggagtgattcacgtgactaaggaggttaaggaagtggctacactgtcttgtggacataatgttagcgtggaggagctggcacaaactagaatatactggcaaaaggaaaagaagatggtcttgactatgatgtctggggacatgaatatatggcctgagtataaaaacagaaccatctttgatatcacaaacaacctttcaatcgtgatcttggcgctgagacctagcgatgaaggcacatacgagtgcgtagtgcttaagtatgagaaggacgcctttaaacgggaacacctggccgaggtcacactgtcagtaaaggccgactttcctactccatccatcagcgactttgagattccaacgagcaatattcggcgtattatctgtagcaccagcgggggatttccagaaccgcatttgagttggctagagaacggagaggaactgaacgctataaatacaactgtgtcgcaagaccccgaaacggagttgtacgccgtttcatctaagctagattttaacatgactacaaatcacagcttcatgtgtctgatcaagtatgggcatttaagagtaaatcagacttttaattggaacacaagctttgctcccaggtgcagggagagacgcaggaatgagcggcttcggagggaatccgtgaggcccgtttag

SEQ ID NO: 27925 - DNA, 867 bp, synthetic construct
  misc_feature 1..867: note = Description of Artificial Sequence: Synthetic coding sequence
  source 1..867: mol_type = other DNA
atgggccacacaaggaggcagggaactagcccttcaaaatgtccctatctgaattttttccagcttcttgtcctggctggcctatcccatttttgcagcggggtcatccacgtgacgaaagaggtaaaagaagtcgcaacgctctcttgtgggcataacgtgtctgtggaggaactggcccagacgcggatttattggcaaaaggaaaagaagatggtgcttactatgatgagcggtgacatgaacatttggcccgaatataaaaaccgtaccattttcgatattactaataacctgtcaatagtcatcttggccctccgacccagtgatgaaggaacctatgagtgcgtcgtgctcaagtacgaaaaggacgctttcaagagagagcatttggccgaggtgacgctgtctgtaaaggccgattttccaaccccctctatttctgactttgaaatcccgacaagtaacatccggcgtatcatttgttcaaccagcgggggttttccagaaccccatctgagctggctcgagaacggggaagagctgaatgccatcaacaccaccgtgagccaggatcctgaaacagagctctacgccgtaagcagcaagcttgactttaatatgaccacaaaccatagttttatgtgtttaatcaagtatggacatcttagagttaaccagacattcaattggaacaccaccaagcaagaacacttccctgataaccttctccctagttgggccatcacccttatttcagtaaatggcatcttcgtcatctgttgtctgacttactgctttgcaccacgttgtcgcgagcgacggaggaacgaacgcctacgcagagaatctgtgagacctgtgtag

SEQ ID NO: 27926 - DNA, 456 bp, synthetic construct
  misc_feature 1..456: note = Description of Artificial Sequence: Synthetic coding sequence
  source 1..456: mol_type = other DNA
atgtccataccattctccaatacccattacagaattccccagggatttggcaatttgctagaaggactgacccgcgagatcctcagggaacagcccgacaatatccctgcttttgccgctgcctattttgagtccctcctcgaaaagcgcgaaaagactaatttcgatccggctgaatgggggagcaaagtggaggataggttttacaacaaccacgctttcgaagagcaggagccccctgaaaagagtgaccccaaacaagaagagtctcaaatatctggtaaggaggaagaaaccagcgtgacgatcctggattcttctgaggaggataaggagaaggaggaggttgccgcagtcaagattcaggccgcttttaggggccatatcgctcgggaggaggccaaaaagatgaagactaatagcctgcagaatgaggaaaaagaagagaataagtag

SEQ ID NO: 27927 - DNA, 729 bp, synthetic construct
  misc_feature 1..729: note = Description of Artificial Sequence: Synthetic coding sequence
  source 1..729: mol_type = other DNA
atgggctccgcgtgtataaaggtcacaaagtacttcctctttttgttcaacctgatattcttcattcttggcgctgtgatcctgggcttcggcgtctggatcctcgcagacaagagttctttcatcagtgtcctgcaaaccagtagttcctccctgagaatgggcgcatacgtgttcatcggcgtcggagcagtaactatgctcatgggctttctggggtgcattggggctgtgaacgaggtgcggtgcctcctcggcctgctcaaacaggagatggggggtatcgttactgaactcatcagagactacaatagtagcagagaagattcccttcaggacgcatgggattatgtccaagcccaggtcaagtgctgcggctgggtgtctttttacaactggactgacaacgccgaacttatgaaccgacccgaggttacttacccatgctcctgcgaagtcaagggcgaggaggacaactcgctctcggtgcggaaaggcttttgtgaggcgccaggcaatcgaacccagtcaggtaatcacccagaagactggccggtttaccaagagggatgcatggagaaggtgcaagcctggctccaggaaaacttaggcattattctaggggtcggagtcggcgtggccatcattgagttgttgggtatggtgcttagtatatgcctctgtaggcacgtgcatagcgaggattattcaaaagtgccaaaatactag

SEQ ID NO: 27928 - DNA, 207 bp, synthetic construct
  misc_feature 1..207: note = Description of Artificial Sequence: Synthetic coding sequence
  source 1..207: mol_type = other DNA
atgggcagtgcgtgtatcaaagttaccaagtactttctattcctcttcaacctcatattcttcatcctgggcgctgtcattctcggcttcggggtgtggattctagctgataagtctagtttcatttccgtgttgcagaccagctctagcagtctgcgcatgggcgcatacgtctttatcggagtgggtgcggtaacgatgctatag

SEQ ID NO: 27929 - DNA, 117 bp, synthetic construct
  misc_feature 1..117: note = Description of Artificial Sequence: Synthetic coding sequence
  source 1..117: mol_type = other DNA
atggggtctgcatgtattaaagtaaccaagtattttcttttcctttttaacctcatttttttcattctgggggctgttatactgggattcggcgtctggattctggctgacaagtag

SEQ ID NO: 27930 - DNA, 318 bp, synthetic construct
  misc_feature 1..318: note = Description of Artificial Sequence: Synthetic coding sequence
  source 1..318: mol_type = other DNA
atgggatctgcctgcattaaagtgaccaaatattttctctttctgttcaaccttattttctttatcctcggcgcagttattctgggattcggcgtatggatcctcgccgacaaaagctctttcattagcgtcctccaaacctcctcctcatctctgagaatgggtgcctacgtttttatcggagtcggagcagtgaccatgttgatggggtttctcgggtgcatcggggcagtgaacgaagtgagatgtctcctgggactctacttcgcgtttcttttgctaatcttaatagctcaagtgacagctggggcactctag

SEQ ID NO: 27931 - DNA, 327 bp, synthetic construct
  misc_feature 1..327: note = Description of Artificial Sequence: Synthetic coding sequence
  source 1..327: mol_type = other DNA
atggggtccgcctgtattaaagtgaccaagtatttcttgttcctgttcaatttaatattttttatcctcggggctgtgattttgggatttggtgtatggatcttggcagataagtcatcttttataagcgtgctccagacatcttcttcgtctctgcggatgggtgcttacgtattcatcggcgtgggagctgtaacaatgctgatgggctttttgggctgtatcggtgctgtgaatgaggtgaggtgcctactgggcctgtacttcgcatttctgctgctgattctcatcgcccaggtcaccgccggtgcactgttttatttctag

SEQ ID NO: 27932 - DNA, 708 bp, synthetic construct
  misc_feature 1..708: note = Description of Artificial Sequence: Synthetic coding sequence
  source 1..708: mol_type = other DNA
atggccttgcccgtcaccgctctcctgctgcccctggccctgctccttcatgctgctcgaccttcccagttccgggtaagccctctcgataggacctggaatttgggtgagactgttgagttaaagtgccaggtgttgttgagcaaccccacctccggctgctcctggctgtttcagcccaggggggctgccgcatcacccactttcctgttgtatctgagccaaaataaacctaaggctgcggagggacttgatacccaaagattttcaggaaagagactgggggatacattcgtgctgaccctgtccgactttagacgggaaaatgagggctattacttctgtagtgccctgagcaattccatcatgtactttagccatttcgtgccggttttcttacccgctaaacctacgacgactcctgccccaagaccacctacccccgcacctacaatagctagccagcctctttccctaaggcctgaagcctgcagaccagccgctgggggagccgtccacacccggggactggacttcgcgtgcgacatttacatatgggcgccactagcgggtacttgcggggtcctattactgagccttgttattacgctatattgcaaccaccgcaatcgacggagggtttgtaagtgtccacgtccagtcgtgaaaagcggcgataaaccctctctaagcgcgagatacgtctag

SEQ ID NO: 27933 - DNA, 597 bp, synthetic construct
  misc_feature 1..597: note = Description of Artificial Sequence: Synthetic coding sequence
  source 1..597: mol_type = other DNA
atggcgctcccagtgaccgccttgctgctgcctctcgctctgctgctgcacgcggcacggccttcccagtttagggtgtccccgctcgaccgcacgtggaacctcggagagacggttgagctgaaatgtcaggtcctgcttagtaatcctacctctggctgttcctggctgttccagcctcgcggagccgcagcttcgccaactttccttctgtatctcagtcagaacaagcctaaagccgcagagggtctcgatacacagcgatttagcggtaaacgcttgggagatacctttgtcctgacccttagcgactttcgacgagaaaacgaggggtattacttttgcagcgccctgagcaattctataatgtatttctcacactttgttcctgtgttcctccctgcgaaaccgactacaacccccgctcccagaccacctaccccagctccgactatcgcttcccagccgctgagcctgaggccagaggcctgtcgaccggctgccggtggggctggaaacagacgcagggtgtgtaaatgccctcgacccgtagtcaagtctggcgataaaccatcactatccgcccgttacgtttag

SEQ ID NO: 27934 - DNA, 708 bp, synthetic construct
  misc_feature 1..708: note = Description of Artificial Sequence: Synthetic coding sequence
  source 1..708: mol_type = other DNA
atggccctgccagtgacagcgctgctcctgccgctggctcttctgttacacgcggctaggccttcccaattccgggttagcccccttgatagaacttggaaccttggggaaactgtagaattgaagtgccaggtgttgctgagtaatcctacgtctggctgctcttggctttttcagccgagaggcgctgcagcttcccctactttcttgctgtacctctcacagaacaaacctaaagccgctgagggcctggatacccagagattctctggcaaacgtttaggagatacatttgtcctaactctatcagacttcagaagagaaaatgagggctattacttttgcagcgcactgtcaaacagcatcatgtacttttctcactttgtccccgtgtttctcccagcaaaaccaaccaccaccccagcacctaggccacccacccccgctccaaccatagccagccagcccctgtcactccgaccggaggcatgtcgtccggcagctggcggagccgtccacaccaggggtttagacttcgcatgtgatatttacatctgggcgccactggccggaacctgcggagtcctactgctgtcactagtgatcaccctgtattgcaaccatagaaatcgacgtagggtctgcaagtgtcccaggccagtggttaaatccggagacaagcctagtttgagcgctaggtatgtttag

SEQ ID NO: 27935 - DNA, 597 bp, synthetic construct
  misc_feature 1..597: note = Description of Artificial Sequence: Synthetic coding sequence
  source 1..597: mol_type = other DNA
atggctcttcctgtgactgctttacttctcccactagccctgctgctgcatgctgcgaggccgagccagttcagagtaagccccctcgatcgtacttggaatctaggagagaccgtggaactgaaatgtcaggttttactttctaaccctacctcaggatgcagctggttgttccagcctcgcggagccgctgcatcacccacgttcctcctgtacctgagccagaacaagcccaaggccgctgagggcctcgacacccagagattcagcggcaaaagattaggcgacaccttcgttctgacattatccgactttcgcagggaaaacgaaggctactacttctgcagcgcactgtccaactcaataatgtactttagccacttcgttccggttttcttgccagtgcatacccggggattggattttgcctgcgatatatacatttgggcccctctcgcaggtacctgtggagtattgttgctgagtctcgtgatcaccctgtactgtaatcacagaaacaggcggcgagtgtgtaagtgccccagacccgtcgtgaaaagcggggataagcccagcctgtccgccaggtacgtatag

SEQ ID NO: 27936 - DNA, 663 bp, synthetic construct
  misc_feature 1..663: note = Description of Artificial Sequence: Synthetic coding sequence
  source 1..663: mol_type = other DNA
atggccctccctgtgaccgcacttctgctccctcttgccctgctgcttcacgctgcgagacccagccagttccgggtgtctccactcgatcgaacatggaacctcggcgagaccgtggaattgaagtgccaagtgctgttgagcaacccaacgagtgggtgtagctggctctttcagccgcgaggcgcagctgcctcacccacctttctgctgtacctgtcccagaacaagcctaaggccgcagagggacttgatactctttcagatttccggagagaaaatgaaggctactacttctgttcagctctttctaactccattatgtacttttcccacttcgtgccagtctttttacccgctaagccaacgactacccctgctccacggccacccacccccgcaccgaccatagctagccagcccctgagtctcaggcctgaggcctgtcggcctgccgcagggggagcagtgcatactagaggactggatttcgcctgtgatatctatatttgggcacctttggcagggacctgtggcgtgctgttactctctctggtgattaccttatactgtaatcacaggaaccgtcgacgtgtttgtaaatgtccgcgaccagtcgtgaagtctggtgacaagccatccctttcagcgaggtacgtgtag

SEQ ID NO: 27937 - DNA, 597 bp, synthetic construct
  misc_feature 1..597: note = Description of Artificial Sequence: Synthetic coding sequence
  source 1..597: mol_type = other DNA
atggctctgcccgtgaccgcgcttctgctgcccctagcattattgctccacgctgcacgtccatcccaatttcgtgtcagcccgcttgacaggacatggaatcttggcgaaacagtggagctcaagtgtcaagttctcctgagtaacccaacgtctggctgtagttggttattccagcccaggggcgctgctgcctcgcctactttcctgctctatcttagtcagaacaagccaaaggctgccgaagggctcgatacccagcgcttctctggaaaacgactgggtgacacatttgtccttactctttcggactttcgtcgggaaaacgagggctattacttctgctctgcactctcaaacagtatcatgtacttcagtcacttcgtccccgtgtttctgccagctaagcctactaccacccctgcaccgaggccacctacaccagctccaacgatcgctagtcagcccctatccctccgccctgaggcttgccgcccagccgctggaggagctggcaatcggcgtcgtgtttgcaaatgccctcggcctgtcgttaagtccggggacaagccaagcctgagcgctcgttacgtttag

SEQ ID NO: 27938 - DNA, 831 bp, synthetic construct
  misc_feature 1..831: note = Description of Artificial Sequence: Synthetic coding sequence
  source 1..831: mol_type = other DNA
atgagaaatcaagccccaggccgtcctaaaggcgcaacatttccaccgcgtcggcctaccggttctcgcgctcctcccctcgcacccgagctcagagctaagcagcgtccgggagagagggtaatggccctacctgtgactgctctccttctccctctggccctgctgctgcacgccgctcgcccttcgcaattcagagtgtcacctctcgatcgcacctggaacctgggagaaacagtggagcttaaatgtcaggtgctactgtccaaccccacgagtggatgctcctggctctttcagcccaggggagcagctgcctcaccgacttttctcctgtacctgagccagaacaagcctaaggccgcagagggcctggatacccagcggttcagcggaaagagactgggagacacctttgttctgacactctctgacttcagaagggagaacgaaggctactatttctgtagcgccttatcgaacagtattatgtatttctctcacttcgttccagtgtttttgcctgctaaacccactacaactccagctcccagaccccctacgcctgcacccactatcgcgagtcagccactcagcttgcgccctgaggcctgtaggcctgcagccggtggtgcagtccacacacgtggcctggattttgcctgtgatatttacatttgggcccctctagccggaacctgcggggtcttactgctaagccttgtgatcaccctgtattgtaatcaccgcaataggaggcgtgtgtgcaaatgtccccgtcctgttgtcaagagcggggacaaacctagccttagcgctcggtacgtgtag

SEQ ID NO: 27939 - DNA, 240 bp, synthetic construct
  misc_feature 1..240: note = Description of Artificial Sequence: Synthetic coding sequence
  source 1..240: mol_type = other DNA
atgagccataaacagatttattactccgacaaatacgacgacgaggaatttgaatacaggcacgtgatgctccccaaggatatcgctaaacttgtgccgaagactcatttgatgtcagagtcagaatggcggaacttgggcgtgcagcagtcccagggatgggttcattatatgatccacgaacctgagccacacatcctgctttttcggagaccgctgcctaaaaaacctaagaagtag

SEQ ID NO: 27940 - DNA, 204 bp, synthetic construct
  misc_feature 1..204: note = Description of Artificial Sequence: Synthetic coding sequence
  source 1..204: mol_type = other DNA
atgtctcacaagcagatatactacagcgataagtacgatgacgaggaatttgagtaccgtcatgtcatgttgcccaaagacattgcaaaactggtgccaaaaactcacctgatgtcggagagcgaatggaggaacttaggtgttcagcagagccagggctgggtgcactacatgatccacgaaccgggtcagtgcaccggctag

SEQ ID NO: 27941 - DNA, 192 bp, synthetic construct
  misc_feature 1..192: note = Description of Artificial Sequence: Synthetic coding sequence
  source 1..192: mol_type = other DNA
atgcgcacacggcatgtaatgcttccaaaagatattgcaaaacttgtgcctaaaacccatctgatgtcagaatccgaatggagaaatctcggggtgcagcagtcacaaggatgggtgcactatatgatacacgaaccggagccgcacattctgcttttccgcagacctctcccaaaaaaacccaaaaaatag

SEQ ID NO: 27942 - DNA, 240 bp, synthetic construct
  misc_feature 1..240: note = Description of Artificial Sequence: Synthetic coding sequence
  source 1..240: mol_type = other DNA
atggctcacaaacagatctattatagtgacaaatatttcgacgaacactacgagtacaggcacgttatgttgcctagagaattgtcaaagcaggtgcctaagactcatttaatgtctgaggaagagtggcggaggctcggagtgcagcagagtctcggttgggtgcattacatgattcacgaacccgagccccatatcttactgttccgtcggccactgcctaaagatcagcagaagtag

SEQ ID NO: 27943 - DNA, 1533 bp, synthetic construct
  misc_feature 1..1533: note = Description of Artificial Sequence: Synthetic coding sequence
  source 1..1533: mol_type = other DNA
atgcatcctctgcagtgcgtcctgcaagtgcaacgttccctcggctggggacccttggccagcgtgagctggcttagtttacgtatgtgcagagctcatagttcattgtccagtaccatgtgcccctcgcctgaacggcaggaagatggggctcgaaaagatttcagttccagactcgctgccggacctaccttccagcatttcttgaaatctgcctctgccccacaggaaaaactgtcctctgaggtggaggaccctccaccatacctgatgatggacgaactgctcggacggcagcggaaagtgtatttagaaacttacggatgccagatgaatgtaaacgatacagagatcgcgtggtctatcttgcagaaaagcggctatcttaggacttcaaatcttcaagaagctgatgtaattctcttagtcacttgctcaataagggagaaggcggaacagacaatctggaatcggctgcaccaactgaaagctctgaaaaccagacgcccaaggagccgcgtcccactgcgcataggcattctggggtgtatggccgaacgcttgaaggaagagatcctgaatagggagaagatggtggatatcctggccggaccagatgcttaccgggacctgccacgcctgctggccgtggctgagagtggccaacaggccgcaaacgttttgctgagtcttgacgagacatatgctgatgtcatgcccgtgcagacctccgctagcgccacgagtgcattcgttagcatcatgcggggttgtgataacatgtgttcttattgtattgtcccattcacgcgcggacgggaaaggagtagacccattgcctctatcctcgaagaagtgaaaaaactgagcgagcaagtgctgcagttaatccatgaacgcgataacatctgcaagcagattcatctcccagcacaatcaggatcaagccgggtgctggaagccatgaggcgaggttacagccgagaagcctacgtagagcttgtacaccatatcagagaaagcatcccaggggtcagcctcagttctgacttcatagccggattctgtggggaaaccgaagaggatcatgttcagacagtatctctactcagggaagtacagtacaacatggggtttttgttcgcatattccatgcggcagaagacgagggcttaccaccgacttaaggatgacgtcccggaggaggttaagttgaggcgcttggaagagctgattaccattttccgagaggaagctaccaaagctaatcagacatcggtagggtgcacacagctggtgctggtggaagggctgtccaagagatcggcaacggacctgtgtggacggaatgacggaaatctgaaagtcattttccccgacgcagagatggaagacgtgaacaacccaggccttagggtgcgcgctcaaccgggtgattatgtgttagtgaaaatcacgtcagcctctagtcaaactctgcgcggtcacgtgttgtgtaggaccacactgagagattcctctgcatattgctag

SEQ ID NO: 27944 - DNA, 1764 bp, synthetic construct
  misc_feature 1..1764: note = Description of Artificial Sequence: Synthetic coding sequence
  source 1..1764: mol_type = other DNA
atgcatcccttgcagtgcgtgctgcaagtccagcgatccctaggctggggtcccctggccagcgtgtcctggctgtcccttagaatgtgcagggcacactcatccctgagctccaccatgtgcccgagccctgagagacaggaagacggggcacggaaggatttctctagccgactagccgctggccctacatttcagcactttctgaagtctgcctccgctcctcaggaaaagcttagctcagaagtcgaagacccgccaccgtacctcatgatggacgaactactgggacgccagcgcaaggtgtacctagaaacttatggatgccagatgaatgttaatgatacagagatcgcctggtcgatactccagaaatcggggtaccttagaacaagcaatctgcaggaggcagacgtgattttgctggtgacctgctccatcagggaaaaggccgagcaaacaatttggaacaggcttcaccaactaaaagctctgaagacacgacggccacggtcacgcgttccgcttcggatcggtatcttgggttgcatggccgagcgcctgaaagaagagattttgaatagagaaaaaatggtggatattctagctggcccagatgcatatcgggacctcccccgactgctggccgtggccgagtctggacagcaggctgcaaatgtgctgttaagtctggatgagacttatgccgatgtgatgccagtgcaaacctccgcttccgccacgtccgccttcgtatccatcatgcgtggatgcgacaatatgtgctcatactgcattgtcccattcacaagggggagggaaaggtccagacctatcgccagcatcctggaggaggtaaagaagctctcagaacagggcttgaaggaggtaacgctgctcggacaaaatgtaaacagttttcgagataactcagaagtccagtttaattccgccgtgccaaccaacctgtcacgcggattcacaacaaattataagaccaagcagggtggtctgaggtttgcacacctgctggaccaggtgtcacgtgtggaccctgagatgcgaattagatttacatccccccatcctaaggattttccagacgaggttcttcaattgattcacgagcgcgacaatatttgtaagcagatccacttaccagcccagagcgggtcaagtagagtattagaagcaatgagaagagggtacagcagggaagcttatgtggagctggtgcaccatatacgcgaatccattccaggggtgtccctaagctcagacttcattgccggtttctgtggtgagacggaggaagatcatgttcagacagtgtctctgctgagggaggttcagtataatatggggttcctgttcgcttattcaatgaggcaaaagacaagggcttaccaccgcctcaaggacgatgtgcctgaagaggtgaaactccggagacttgaagaactcatcaccatttttagagaggaagcgactaaggccaaccagacttctgtcggctgcacacagctggtgctcgttgaaggcctctctaaaaggtccgctactgacttgtgcggaaggaatgatggaaatctgaaggtgatttttcccgatgccgagatggaagatgtgaacaaccctggcttacgcgtgcgcgcacaacccggtgactatgtgctggtgaagatcacctccgctagttcccagactttacggggtcacgtattgtgtcgtacaacactgcgtgactcgagtgcctactgctag

SEQ ID NO: 27945 - DNA, 1806 bp, synthetic construct
  misc_feature 1..1806: note = Description of Artificial Sequence: Synthetic coding sequence
  source 1..1806: mol_type = other DNA
atgcacccactgcagtgcgtcctacaggtgcagaggagtctcgggtgggggcctctggcctccgtatcatggctgtctctacgtatgtgtagggctcatagcagtctctccagtaccatgtgtccgtccccggagcgccaggaggacggggctcgcaaagatttctcctccagacttgcagctggtccaaccttccagcattttctcaaaagcgcttctgctccccaagaaaagctttctagcgaagttgaggatccccctccttacctcatgatggatgagcttctgggcagacagagaaaagtgtatcttgaaacatacggctgtcagatgaatgtcaatgacactgagattgcgtggagcattctgcaaaaatccggatacctccggacaagcaatttacaggaggccgacgtgatccttctggtgacgtgttccattcgtgaaaaggccgagcagacgatctggaaccgcctccaccagttaaaagccttgaagacacgcagaccacggtctcgggtgcccctgaggatcggaatcctcggatgcatggcggagagactgaaggaagagattttaaaccgcgagaagatggttgatattctggcaggcccagatgcttaccgagatttaccgaggctgctggccgtggccgaaagcggacaacaggctgccaatgttcttctctctctggatgagacctacgccgacgtaatgcccgttcagactagtgccagtgccaccagcgccttcgtgagcattatgcgtggatgtgacaacatgtgttcctactgcatcgtgccatttaccagaggccgagaaaggagccgacctatcgcttctatacttgaagaggttaagaagctgtcagaacaggtgtttctaccacctcgcccaccaaaggtgctgggactgcagggactaaaggaggtgacattgttaggacagaacgttaactcctttcgtgacaattccgaagttcaattcaacagtgcagtcccaactaatttgagccggggttttactacaaattacaaaacaaagcagggagggctcagatttgcccacctgctcgatcaagtctctagagtagatccagagatgagaattcgattcaccagccctcatcctaaagacttccctgatgaggtgctccagttaatccacgaaagagataatatttgcaagcaaattcatctcccagcacaatccggttcctcaagggtgctcgaagcaatgagaaggggatacagccgtgaagcctacgtcgaactggtccaccacatccgggagtcaattcctggggtgagcctctcttctgacttcattgccggtttctgtggcgaaacagaagaagatcacgtgcagacagttagtctgctgagagaagtccagtataatatggggtttctgttcgcatattctatgcgccaaaagactcgagcctaccaccgcctgaaggacgacgtgcccgaggaggtgaagctccgccgtctagaggagctgataacaattttccgagaggaggccaccaaagccaaccagacttctgttggctgcacccagttggtgctagtagaggggctttctaagagatccgccactgacctatgcggccgtaatgacggcaatcttaaagtcatttttcccgacgccgagatggaagacgtgaataatcccggtctgcgtgtccgggctcagcctggcgattacgtacttgttaagatcacatccgcaagttctcagacgttaaggggacacgtgctttgccgaaccactctgcgagactctagcgcctattgttag

SEQ ID NO: 27946 - DNA, 984 bp, synthetic construct
  misc_feature 1..984: note = Description of Artificial Sequence: Synthetic coding sequence
  source 1..984: mol_type = other DNA
atgaacgtcaacgacacagaaatcgcctggagcattctgcaaaaaagcggttatctgcggacaagcaacctgcaggaagctgatgtaattctgttggtgacctgttccatccgcgaaaaagcagagcagacaatttggaacaggttgcaccagctcaaagcactcaaaacccgtagaccgagatcaagggtgcccttgaggatcgggattctaggatgtatggccgaacggttgaaagaggagatcctcaaccgagagaaaatggtcgacatcctggccggaccagatgcatatagagatttgcccaggctgctcgccgtggcggagtcgggccaacaggccgctaatgtactgctgagcctcgacgagacctacgccgatgtcatgccagtgcagacatccgcgtcggccacatctgcgtttgtctattcgagggaggcgtatgttgaacttgtgcaccatatcagagaatcaatacccggagtctcattgtcaagtgacttcatcgctggattctgcggagaaacagaagaagaccacgtccagacagtgagccttctcagggaggtccagtataatatgggattcctttttgcctactcaatgaggcagaagacccgtgcctatcatcgactcaaggatgacgtaccagaagaagtgaagctccggaggctcgaggaactcattacgatattccgggaagaggcaacaaaggcaaaccagacgtctgtcggatgtacccagttggtattagttgaggggctgtctaagagaagcgccaccgacctctgcggcagaaacgacggcaacttgaaggtgattttccccgatgccgagatggaggatgtcaacaacccagggcttcgcgtcagagcccaacccggtgattatgtccttgtcaaaataacttccgcctctagccagactcttcgcggacacgtgctctgcagaaccactctaagggattcttctgcatattgttag

SEQ ID NO: 27947 - DNA, 1494 bp, synthetic construct
  misc_feature 1..1494: note = Description of Artificial Sequence: Synthetic coding sequence
  source 1..1494: mol_type = other DNA
atgatggatgaactcctcggtcgccagagaaaggtgtatctggagacatacggctgtcagatgaatgtcaacgacactgagattgcctggtctattctacaaaaaagtggttaccttcgcacctcgaatctacaggaggctgacgtgatcctgttggtgacctgctccatcagagaaaaggccgaacagacgatctggaaccgcctgcatcagttaaaggccctgaagactcggcgtccccgaagccgggtccccctgcgcatcggaatcctgggatgcatggccgagcgattaaaggaagagatcctgaatcgcgagaagatggtagacatcctcgcaggccctgacgcctaccgcgatttgcccagactgttggccgtggcagagagcggtcaacaagccgcaaatgtcctgctgagtttggatgaaacttatgccgatgtcatgcctgtgcagacaagcgcctctgccacttctgccttcgtttctataatgcggggttgtgacaacatgtgtagttactgcattgtacccttcacgcgcggtagagaacgctctagacccatcgcaagtattctagaagaggtaaagaaactgtccgagcagggccttaaagaggtgactttgctggggcaaaacgtcaactcctttcgagataattcggaagtccagtttaactctgccgtcccaacaaacctgtcccgcggatttactacgaactacaagaccaagcagggaggcctgaggttcgcgcatctcttagaccaggtgtcacgggtggatccggagatgcgcattcggtttactagtccacatcccaaggattttccggatgaggttctacagctgatacacgagcgcgataatatttgtaagcagatccacttgcctgcccagtcaggtagctctcgggtattagaggcaatgcgacggggatactctcgcgaggcatacgttgaacttgtgcatcatataagagagtcaattcccggagtgtcgctaagctcggactttatcgcaggcttttgcggcgaaactgaggaagaccatgtgcaaacggtgtctctcctgagagaggttcagtacaatatgggatttctgttcgcatatagcatgcgacagaagactagagcctatcacagactgaaagacgacgtgccagaggaagtgaaattgagaagactcgaagaattgattacaatctttagggaggaagccactaaagctaatcagacttccgtaggttgtactcagttggtgcttgtggaggggctcagcaaaaggagcgctaccgatttatgcggacggaacgatggtaatctcaaggtaatttttccagatgctgagatggaagatgtgaataatcccggactgagggtaagagctcagccaggggactatgtacttgtcaaaatcacctcagcctcctcccaaacgctaagaggacatgtactatgcaggaccactctacgagacagtagtgcttactgctag

SEQ ID NO: 27948 - DNA, 1281 bp, synthetic construct
  misc_feature 1..1281: note = Description of Artificial Sequence: Synthetic coding sequence
  source 1..1281: mol_type = other DNA
atgcatcccctccaatgtgtcctgcaagtacagcggtctctgggctgggggccactcgccagcgtgtcttggctctcactgagaatgtgtcgagcgcatagttccctcagctccactatgtgcccatcgcctgagcgccaagaagatggagcacgcaaggacttctcttctcgcctggccgctggacccacattccagcactttttgaagagcgcaagcgccccacaggagaagttgtcttctgaagttgaagatcctcctccttacttgatgatggacgagctgctgggaaggcagcgcaaggtgtacctggagacctatggttgccaaatgaacgtcaacgacactgaaatcgcctggtctatcctgcagaagtctggctacctgaggacttccaatctgcaagaagccgacgttatccttctggtcacctgcagtatccgggaaaaggccgaacagactatctggaataggctccatcagctgaaggcactgaagacccgtcgccctcggtcaagggtgccactgagaattggaatcctggggtgtatggctgaaaggctcaaggaagagatactcaaccgggagaaaatggtggatattctcgctggcccagacgcctaccgtgatctcccccgactgctggccgtggcggagtctgggcagcaggctgctaatgtcctcctcagtctggatgaaacctatgccgacgtcatgcccgtgcagacctctgccagtgcaacatccgccttcgtctctataatgagaggttgtgacaatatgtgcagctactgtatcgttcctttcaccagggggagagaaagatcccgacctattgccagtattctggaagaggtgaagaagctgtcagaacaggggttaaaagaggttactctgctgggtcagaacgtcaacagctttcgggataacagcgaggtccagttcaactcagctgtgcccacaaacctcagcagaggcttcaccaccaactacaaaacaaaacagggagggctgagatttgcacatctcctcgaccaagtttctagagtggacccggaaatgcgaatcagatttacctctccacatccaaaagattttcccgacgaggtgcttcaactaatccacgagcgggataacatttgcaaacagattcatctccctgcccagtcaggatcctctagggtcctcgaggccatgagacggggttattccagggaagcttatgtagagctggtccatcacatccgtgagagtattcctgaggatactggcatatcttag

SEQ ID NO: 27949 - DNA, 1122 bp, synthetic construct
  misc_feature 1..1122: note = Description of Artificial Sequence: Synthetic coding sequence
  source 1..1122: mol_type = other DNA
ggcgatgggcagaatctgtttaccaaggatgtaactgtgatcgagggagaggtggcaaccatctcttgccaggtcaataagtcagatgacagtgtcattcagttgctgaaccctaatcggcagacgatttacttcagagattttcggccattgaaagacagccgattccaactgctgaacttctccagctcggaactcaaagtgtccctgaccaatgtatctatatctgacgaagggcgttatttctgtcagctttatacagaccctccacaggaatcttatacaactattaccgtgctggttcctcccaggaatcttatgatcgatatccaaaaggataccgcagtcgaaggggaggaaatcgaagtgaactgcacggccatggcaagcaaacctgctactactatcaggtggttcaagggtaataccgagctgaagggcaaatccgaggtggaggaatggagtgatatgtacacggtgactagtcaactcatgttaaaagttcataaggaagatgacggcgtccccgtcatctgtcaggtcgagcatccggctgtcacagggaatttgcagacccagcgctatcttgaggtgcaatacaaaccccaggtgcacatacaaatgacataccccctgcaaggacttactagagagggtgatgcgttagaactcacatgcgaggctattggaaaaccccagcctgttatggtgacatgggtcagagtcgacgatgagatgccacagcatgctgtgctgtccgggccaaacctctttatcaacaatcttaataaaactgacaacggaacgtatcgttgcgaagcatctaatatagttggaaaggcccacagcgactatatgctgtatgtgtacgactcccgggcaggagaagagggctccattcgggcagtcgaccacgcagtgatcggtggcgtagtagccgttgtcgtgttcgccatgctgtgcctgctgatcattctggggaggtatttcgccagacataaaggtacgtattttacccatgaggcgaagggcgctgatgacgccgctgacgcagatacagctatcatcaatgcagagggcggtcagaataactccgaggagaaaaaagagtattttatttag

SEQ ID NO: 27950 - DNA, 1329 bp, synthetic construct
  misc_feature 1..1329: note = Description of Artificial Sequence: Synthetic coding sequence
  source 1..1329: mol_type = other DNA
atggccagcgtggtgcttcccagcggaagccagtgtgccgctgcagctgctgctgccgctccccctggattgaggctgcggctgttgctcctgctctttagcgccgctgcactgattcctaccggagacggccaaaatctgttcactaaagacgttaccgtgatcgagggggaggttgcaactatctcttgccaggtgaacaaaagtgacgactctgtgatacaactcctgaacccaaatcgacagaccatatatttccgcgacttccgtccactgaaagatagccgctttcagttattaaacttttcctcttccgaacttaaagtctcgctcactaacgtctccatcagtgatgaaggccgatatttctgccagctgtacaccgacccaccacaagaaagttatacgactattaccgttttggtccctccgaggaatcttatgattgatatacagaaggacacagccgtggagggagaagaaatcgaggtaaactgcactgccatggcatctaagccggctacgaccatccgatggttcaagggtaataccgagctgaaaggtaagtccgaagtggaggagtggagtgacatgtataccgtcacatcccagttgatgttaaaggtgcacaaggaggacgacggtgtgccagtgatctgtcaggtggagcatcctgccgttaccgggaatttacagacccagcggtacctggaggtacaatacaaaccgcaggttcacatccagatgacctaccctttgcagggactgacgagggagggcgatgcactcgaactaacctgcgaggcaattggaaagccacagcctgtgatggtgacgtgggtacgtgtcgatgacgaaatgcctcagcatgctgtcctgagcggaccaaacctgtttattaacaatctcaacaaaacggataacggcacgtaccgttgtgaagcttccaacatcgttggtaaagcacatagcgattacatgttgtacgtttacgaccctccgacaacgattcctcctcctactaccacaaccacaaccaccacaaccacaaccaccacaatcctgacaattatcacagacagtcgggcaggcgaggaagggagcatcagggctgtcgaccatgccgtcattggcggtgtggtggccgtcgtcgttttcgccatgctgtgtctgcttataatactgggcaggtacttcgctcgccacaagggaacttatttcacgcatgaagcaaaaggtgctgacgacgctgcagacgctgataccgccattataaatgccgagggtgggcaaaacaatagcgaggagaagaaggagtattttatctag

SEQ ID NO: 27951 - DNA, 384 bp, synthetic construct
  misc_feature 1..384: note = Description of Artificial Sequence: Synthetic coding sequence
  source 1..384: mol_type = other DNA
atgctctacgtgtacgatcccccaacgactattcctcccccaactaccacgacaacaaccaccaccacgactaccacaaccattcttactattatcacggatacaaccgccaccactgaacccgctgtccacgactctcgcgcaggtgaagagggctcgatccgcgcagtggaccacgccgtgatcggaggagtggtcgctgtggttgttttcgccatgctctgtctgctaatcatcctgggcagatatttcgcgagacataagggaacctatttcactcacgaagctaagggcgctgacgacgccgcagacgctgatacagcgattattaacgccgaaggtggtcagaacaattcagaggagaagaaagagtatttcatttag

SEQ ID NO: 27952 - DNA, 1245 bp, synthetic construct
  misc_feature 1..1245: note = Description of Artificial Sequence: Synthetic coding sequence
  source 1..1245: mol_type = other DNA
atggcaagtgttgtattacccagcggaagccagtgtgcagcagcagccgctgccgctgccccacccggtctgcgcctacgtctgctactcctcctattctctgccgcagcccttatacctactggtgatggacagaacctgtttactaaggacgtgaccgtgatcgagggcgaggtggcaactatttcttgtcaggtcaacaaatctgacgactccgtgattcagctgcttaatcccaatcgccagaccatctatttcagggatttccggcctctcaaagacagcagattccagttactgaacttttcctccagcgaactgaaagtcagtttaacaaatgtctccatctccgacgaaggacgatatttttgtcagctgtacaccgatccccctcaggagtcgtataccaccatcactgttcttgttccaccgagaaacctgatgatagacatacagaaggatacagccgtggagggagaggagatagaagtgaactgtaccgcaatggcatcaaagcccgctactacgatccggtggtttaaagggaacacagagttaaaaggaaagagcgaagtcgaggagtggtcagatatgtacacggtgacatcccagcttatgctgaaggtgcataaagaggacgatggagtgccagtaatctgtcaggttgaacacccagccgtgacaggtaacctgcagacccagcgatacttggaggtccaatataagcctcaggtgcacatacagatgacctaccctctccagggtttgacacgggaaggggatgccttagagctgacgtgtgaagcaatcggtaagccccaaccagtgatggtgacatgggtgagagttgatgatgaaatgccacagcacgccgttttgtcaggcccaaacctgttcattaacaatctgaacaaaactgacaatggcacctaccgctgcgaggcatccaacatagtgggcaaggctcactccgattatatgctctacgtgtacgattcaagagcaggggaagaaggctccatcagggctgtagaccatgcggtgattggcggagtagtggcggtcgtcgtgttcgctatgctttgcctactaataattttgggcagatacttcgcgagacacaaaggcacctattttacccacgaagccaagggcgctgacgatgcagctgatgccgacaccgccatcattaatgccgaggggggtcagaacaattctgaggagaaaaaagagtacttcatttag

SEQ ID NO: 27953 - DNA, 5346 bp, synthetic construct
  misc_feature 1..5346: note = Description of Artificial Sequence: Synthetic coding sequence
  source 1..5346: mol_type = other DNA
atgactacttaccgcgctatacctagcgacggagtggatctggccgctagttgtggcgctagagttggcgacgtgctccccggtcctcatacgggagactacgctcctttgggattttgggcacaaaatggatccatgtctcagcctctcggtgagtcccccgcaacagccactgccactgctactgcgacgactcgccctagtccgactacacccgctatgcctaagatgggtgtgagagctcgcgtggctgactggccccctaaacgagaggccctcagggagcacagcaaccccagtccatcccaggatactgatggtaccaaagctaccaagatggcccacagcatgcggagcatccaaaacggtcagcccccaaccagcacccccgcatctagtgggtctaaggcgtttcataggctttcacggcgtcgtagtaaggatgtggaattccaggatggctggcccaggtctccaggcagggccttccttccgttgagacacagaagttctagcgaaatcaccctttccgagtgtgatgcagaagatgcaggtgagcctcgcggtgctaggcacaccggggctctcccactgttccgggagtatggtagtacaagctccattgacgttcaggggatgccagaacagtccttctttgacattctgaacgaatttaggagcgaacagcccgacgctcggggttgccaagcgctgaccgagttgctcagagccgatcctggtcctcatctaatgggcggtgggggtggggcaaagggagactcccacaatgggcaacctgccaaagacagtcttcttccccttcagcctaccaaggaaaaggagaaggctcgcaaaaaacctgccagaggcctgggcggtggcgacaccgtggactctagcatcttccgcaagctgaggagctcaaaacctgagggcgaagcaggaaggtctccaggcgaggccgacgagggaaggtccccaccagaggcctcccgtccctgggtgtgtcagaaatcattcgcacacttcgacgtgcaatcaatgctctttgatctgaacgaggccgctgccaaccgggtatccgtgagtcagagacgaaatacaactactggtgcaagcgccgcttcagcggcaagcgccatggcctctctgacggcctcacgtgcccattctcttggcggattggacccagctttcacatcaaccgaagacctgaactgtaaggagaaccttgaacaggatctcggggacgacaattcgaacgaccttctgttgagttgcccccactttagaaacgaaatcggaggggagtgtgagcggaatgtgagtttctcccgcgcatccgtagggagcccaagcagcggtgagggccatctggccgaaccggcattgtcagcctaccgcacaaacgcctcaatctccgtgcttgaggtgcctaaggagcagcagaggacccagtcccgacccagacagtatagcatcgaacacgtcgacctgggcgcacgctattaccaggattacttcgtgggaaaggaacatgccaattattttggggtggacgagaagctgggcccagtcgctgtgtcgattaaaagggagaagctcgaggatcacaaggaacatggcccacagtaccagtatagaattatcttcaggacacgcgagctgatcacgctgaggggaagcattctggaggacgcgacacctaccgccactaagcacggcaccggcagaggtcttcccctgaaggatgcgttagagtatgtgattcccgaactcaatatacattgtctgcgactagcactgaacacccccaaagtcaccgagcagcttctcaaactggacgagcaaggactctgtcgcaaacataaggtgggaatcctgtactgcaaggctgggcagtcctccgaagaagagatgtacaacaacgaagaggccggtcccgcatttgaagagtttctatcccttataggagagaaagtgtgcctcaaaggatttactaagtacgcagcacagctggacgtcaaaacagacagcaccgggactcactcactctacacaatgtaccaggattacgagattatgtttcacgtgtccaccctcctaccctacacacctaacaatcgccaacaactgctacgtaagagacacatcggtaatgatatcgtaacaatcatcttccaagaaccaggcgctctgccatttacccccaaaaacatcaggagccactttcaacatgtgtttatcattgtgagagtacacaacccctgtactgataacgtgtgttacagcatggccgtcacccgcagtaaagatgcccctccttttggtcctcccatcccttcagggaccacctttaggaagtccgatgtctttagagactttctattggccaaggtgattaatgctgagaatgccgcacataaaagtgataaatttcatactatggcaacgaggactcgccaggagtacctaaaggacttagccgaaaactgcgtctctaatacccccatcgatagtaccggaaagtttaatctcattagtttgaccagcaagaaaaaggagaagacaaaggcgagagcaggggctgaacagcattccgctggggcaatcgcgtggcgcgtggtggcccaggactatgcacagggggttgagattgattgcatactggggatcagtaatgaatttgtcgtacttctcgatctccgtactaaagaggttgtcttcaattgctactgtggcgatgtgataggttggacgccagattccagcacattgaaaattttctacgggaggggagaccacattttcctgcaggcgactgaaggatcagttgaagatatccgcgagatcgtacagcgcctgaaagttatgacatctggatgggagacagttgatatgacactccggcgaaacgggttgggtcagttgggcttccacgtcaaatacgacgggaccgtcgccgaggtcgaggactatggctttgcttggcaggccggacttagacaaggcagccgacttgtggaaatctgcaaggtcgccgtcgtgactctgactcacgaccagatgattgatcttctcaggaccagcgtgactgtcaaggtggtgataattcccccttttgaggatggaactccgcgaagaggttggcctgagacctacgatatgaacacctccgaaccaaaaactgaacaggaatctatcacgcctgggggacgtcccccttaccgcagtaatgccccttggcaatggtcagggcctgccagtcataatagtctgcctgcttctaagtgggctacccccaccacaccagggcatgcccagtctctgagccgcccactgaaacagacgcctatagtccctttccgagagagccagcctcttcattctaaaagacctgtgagtttccctgaaacgccttacactgtaagccccgctggcgctgatagagtccccccttataggcagccatctggctctttctctactcccggatcagcaacatacgtcagatataaaccctctccagagagatacactgctgcaccccatcctctcctgtctctggatccacacttctctcacgatggcacatcctctggcgacagtagttcaggaggactcacgtcccaggaaagcaccatggagagacagaagcccgaacctctgtggcacgtgcctgcccaggccaggttatcagctatagcaggaagttctggcaacaagcatccctcccgccaggatgctgctggaaaggacagccctaatcggcactcaaaaggcgaaccccagtacagctcccacagctcctcaaataccttgtcatctaatgcctcatccagtcactcggacgaccgatggtttgatcctttagatccactcgagcccgagcaggatccattgagtaaggggggatcaagcgactcaggaatcgatacaactctgtacacaagctctcccagctgcatgtcactagccaaggcaccccgacccgctaaaccacataaaccccctggctctatgggactgtgtggtgggggacgagaggctgctggaaggagccatcatgctgacaggcggcgtgaggtgtcgcccgctcccgctgtggcaggccaatcaaagggctacagaccgaaattgtactccagtggctcatctacccctacagggctggccggtggttcaagagaccccccacgccaaccgtccgacatgggctctagagttggctatcccgctcaggtgtataagacagcatccgcggagacacccaggccatctcaactggcacaaccttcaccctttcaactctctgccagcgtcccaaagtcatttttttctaagcagcctgtacgcaacaagcacccaaccggctggaaaagaaccgaggagccaccgccaaggccactgccgttttccgatcccaagaaacaggtggatacaaataccaagaacgtatttggacagcctcgcttaagagcctcattacgggacttgcgctcgcctcgcaagaactacaagtccaccatcgaggacgatctgaagaaacttataatcatggacaacctgggccctgaacaggagcgggacacaggccagtctccgcagaaagggttgcagaggacactgtcagacgaatcgctgtgtagcgggcgtcgcgaacctagctttgccagccctgctggattggaacccggacttccctccgacgtcctgtttacttccacatgtgcctttccttcttcaacactccctgcacgtcgtcagcatcagcaccctcatccgccagtcggcccaggagccacacccgcagcaggcagcggcttcccagaaaagaaatccactatttcagcgtcagagctgtctctcgctgacggccgtgatagacccctaaggaggctcgaccctggcctgatgcctttgcccgacacggctgccggtttagagtggagttcattggtaaatgctgccaaagcgtatgaagtgcagagggccgtgagtctttttagtttaaacgatcctgctctgagtcccgatatccccccagcccatagccccgtccattcccacctgtccctggagaggggacccccaaccccccgtaccactcctacgatgtcagaggagccaccacttgatttgacagggaaagtgtaccagctcgaggtgatgctcaagcagcttcatacagacttgcagaaggaaaagcaggataaggtggtccttcaaagcgaagtcgccagtctgagacagaacaaccagcgcttgcaggaggaaagccaggctgcaagcgagcagctcaggaagtttgcggagattttctgtagggaaaaaaaagaactctag

SEQ ID NO: 27954 - DNA, 660 bp, synthetic construct
  misc_feature 1..660: note = Description of Artificial Sequence: Synthetic coding sequence
  source 1..660: mol_type = other DNA
atggaagcggctagagactacgcgggtgccttgatcagacctttgaccttcatgggcagccagacaaaacgcgtcttgtttactccactgatgcatccagcgaggccttttagagtgagcaaccatgacaggtctagccggaggggggttatggcatcctccctccaggagcttatctcaaagacacttgatgcattggtgatcgccacagggctggtgactctggtgttagaggaggacggaaccgtggtggatactgaagaattcttccagacactgggagacaacacccacttcatgattctggaaaaaggccaaaaatggatgcccggttcccagcacgtgcctacttgtagtcctccgaaaaggtccggaatcgccagggtcacgtttgatctgtatagactgaatccgaaggatttcataggatgcctaaatgtcaaggctaccatgtatgagatgtactcagtgagctacgacataagatgcaccggcttaaagggactgctgcgttcactgctcaggtttctgtcttacagcgcgcaggtcactggacaattcctgatctacctcgggacatatatgctgcgagtcctcgatgataaggaagaacgcccaagcctgagatcccaggcaaaggggaggttcacctgtggctag

SEQ ID NO: 27955 - DNA, 660 bp, synthetic construct
  misc_feature 1..660: note = Description of Artificial Sequence: Synthetic coding sequence
  source 1..660: mol_type = other DNA
atggaatatttatcagcgcttaacccatcagacttattaaggtccgtgtcaaacatctcctctgagttcggaagaagagtgtggacatctgccccacctcctcaacggccatttcgcgtatgtgatcataagcgtacaatccgcaagggtctgacggctgccacccgacaggagttgctggcaaaagctctggaaaccttacttctgaacggcgtcctaacattggtactggaagaagatggaacagccgtggactcggaggatttcttccaactgctcgaggatgatacctgtttgatggtgctgcagtccggccagtcttggtctccaactcgatcaggggttctaagctatggcttaggtagggagcggcctaaacactccaaagatatcgccagatttacttttgacgtctacaagcaaaacccaagggatttgtttgggagccttaatgtcaaagcaactttttacggtctttatagcatgagttgtgacttccagggtctgggacctaaaaaggtgctgagggagctcctcagatggacatccaccttacttcaggggcttggccatatgcttctgggcattagctctacgctccgccacgctgtggagggggctgagcagtggcagcagaaaggtcgcctgcatagttactag

SEQ ID NO: 27956 - DNA, 660 bp, synthetic construct
  misc_feature 1..660: note = Description of Artificial Sequence: Synthetic coding sequence
  source 1..660: mol_type = other DNA
atggaatacctcagtgcacttaatccttccgatctgcttagatcagtgagtaatatctcttccgaattcgggcgacgggtctggacatctgctcccccaccacagcggccttttagagtgtgtgatcacaagcgtaccataagaaaaggccttacagctgctacacgccaggagctgctcgccaaagccttggagactctgctcctgaacggtgtcctcacattggtcctggaagaggatggcacagctgtggactcagaagatttttttcaactcctcgaggatgacacatgtctcatggtcttgcagtccggacaatcctggtcacctacacgatctggggttttgagttatgggctggggcgtgaacgccctaaacactcgaaggacatcgcgagatttacttttgacgtgtacaaacaaaatcccagagatctattcgggtccctcaacgttaaggcaacattctacgggctctattcaatgtcttgcgacttccagggactagggcctaagaaggtgctgcgagaactcctgagatggaccagcacactgctgcagggattaggccacatgttgctggggattagctctactctccgtcatgcagtggagggcgcagaacagtggcagcagaaaggtaggttgcacagttattag

SEQ ID NO: 27957 - DNA, 660 bp, synthetic construct
  misc_feature 1..660: note = Description of Artificial Sequence: Synthetic coding sequence
  source 1..660: mol_type = other DNA
atggagtatctttctgcattaaatcctagcgacttgttgcggagtgtgtcgaatatatccagtgaattcgggagacgagtatggaccagtgcgccacccccacagcggccatttcgagtctgtgaccataagagaaccatccggaagggcttgactgccgcaacacgacaggaactgctggccaaagcgctcgagactctgctgttgaacggcgtccttaccctagtgttggaagaggatggtacagctgtggactctgaagatttcttccagttactggaggatgacacatgtttgatggttctgcagtcaggacagtcctggagtccaacccgcagtggcgttttgagctatgggcttggtcgagagaggcccaagcacagtaaggacattgcaagattcacttttgacgtctacaagcaaaacccacgtgaccttttcgggtcgttgaacgtgaaagctacattttacggcctatattcaatgagctgtgattttcagggcctagggccaaaaaaggttctgcgggaattgctgcgctggacaagcactcttttgcaggggcttggacacatgctactggggatctcgagtacactgcgtcacgccgtcgagggtgctgaacagtggcagcagaagggcagactgcattcatactag

SEQ ID NO: 27958 - DNA, 660 bp, synthetic construct
  misc_feature 1..660: note = Description of Artificial Sequence: Synthetic coding sequence
  source 1..660: mol_type = other DNA
atggagtacctgagcgctctaaatccatctgatctgcttcgcagcgtgtctaatatttctagtgaattcggcaggcgtgtttggacatctgcccctccgcctcagcgacctttcagagtttgtgaccacaagcggacaattagaaaggggcttacggctgctacacgacaagaactgctggcaaaagcactggaaaccctgcttctcaatggagttctaacactagtgctggaggaagatggcaccgcagtagattcagaggacttttttcagcttctggaggatgatacctgcctgatggtccttcaatccgggcagtcttggtcacctacccgatcaggcgttctttcttatggcctgggaagggaacgcccaaaacattctaaggacatcgctaggttcactttcgatgtgtacaaacaaaatccacgggatctctttggatcgttgaatgtcaaagcaaccttctacgggctgtattcaatgagttgcgacttccagggtcttggaccaaaaaaggtgttgagggaactgttacgatggacctccacgctgttgcagggtctcggccatatgctgcttggcatctctagcaccctgcggcatgccgtagagggcgctgaacagtggcagcagaaagggagattgcattcgtattag

SEQ ID NO: 27959 - DNA, 1860 bp, synthetic construct
  misc_feature 1..1860: note = Description of Artificial Sequence: Synthetic coding sequence
  source 1..1860: mol_type = other DNA
atgaacctggagcgcctcaggaaaagggtccggcagtacctcgaccaacagcagtaccagtctgccctcttttgggctgataaggtcgcatcactgtcccgggaacctcaggatatctactggctagcacagtgcctatacctgacagctcagtaccatagagcggcacacgccctccgtagtcggaagctggataaactgtatgaagcatgtaggtaccttgcagctcgttgccactacgccgcaaaagaacatcagcaagctctggacgtgctcgacatggaagagcctatcaacaagcgattgttcgaaaagtacctgaaggatgagagtggctttaaggacccgtcgtccgattgggagatgtcgcaaagtagcattaagagttctatttgtctgttaagggggaagatctacgatgctctggataaccgcacactggctacctatagctacaaggaggccctcaaactagatgtgtactgttttgaggccttcgatctcctgacatcgcaccatatgctgactgcgcaggaagagaaggagctgctggagtccctaccccttagtaaattgtgtaatgaggagcaagagctcctccggtttctgttcgagaataaactgaagaagtataacaagccgtcggagactgtcattccagagtctgtggacgggttgcaggagaatttggacgtggtggtgagcctggcagaacggcactactacaactgtgacttcaaaatgtgttacaaattaacctccgtcgtcatggaaaaggacccctttcatgctagctgcttgcctgtccacatcggaacgcttgttgagctcaacaaggcgaatgaactattctacctgagccataagttagtggacctttatccaagtaaccctgttagctggttcgccgtgggctgttattacctgatggttggtcacaagaatgaacatgcaaggcgctatttgagcaaggccactaccctggagaaaacttatgggcctgcgtggatcgcttacggccacagcttcgccgtggaaagcgaacatgatcaggcgatggctgcgtacttcactgcagcccagttaatgaagggctgtcatctgcctatgctgtacatagggctcgagtacggcttgacaaataactctaaactggcagagagattctttagtcaagcattgtccattgccccagaggacccttttgtcatgcatgaggttggagtggtggccttccagaacggcgaatggaaaaccgcagagaaatggtttctggatgctttggaaaagatcaaagctatcggcaatgaagttaccgtggacaagtgggaaccgctgctgaacaatctgggccatgtgtgcaggaaattgaaaaaatatgccgaggccttggattatcaccgccaggccctggtgctcatccctcagaatgcttctacctattcagcgatcgggtacatccactccctgatggggaacttcgagaatgcggtggactacttccatactgcactcggtctgcggagagacgatacattcagtgtcacaatgctcggccactgtattgagatgtatattggcgattccgaggcttacattggcgcagatattaaggataagctgaagtgttacgactttgatgtccacaccatgaagaccctcaaaaatatcatctcacccccttgggactttcgcgagtttgaggttgagaaacagaccgcagaggaaacagggcttactccgcttgaaacctctaggaagacgcccgattcccggccatccctggaagagacgttcgagattgagatgaacgagtccgacatgatgctggagacatctatgtccgaccactccacttag

SEQ ID NO: 27960 - DNA, 1428 bp, synthetic construct
  misc_feature 1..1428: note = Description of Artificial Sequence: Synthetic coding sequence
  source 1..1428: mol_type = other DNA
atggaagaacctatcaataaaagactcttcgagaaataccttaaagatgagtctggctttaaagatccaagtagcgattgggagatgtcgcaaagttctattaagagcagtatttgcctccttcgcggaaaaatctacgacgccctggacaatcgtaccttggccacctacagctataaagaagccttgaagttggatgtctactgcttcgaagcattcgatcttctcacgtcacaccatatgctcactgcccaggaggagaaagaattgctggaaagcctacctcttagcaaactctgcaacgaggagcaggagctactcaggttccttttcgagaacaagttaaagaaatacaacaaaccatcggagaccgtcatccccgaaagcgtggacggccttcaggagaacctggatgtggtggtaagccttgctgagcggcactactataactgcgatttcaagatgtgctataaactgacgtctgtggtcatggagaaagatcctttccacgcgtcttgcctgccagttcacatcggcactcttgtggaattaaataaggctaacgaacttttctacctctcccataagctggttgacctgtatccgtcaaacccagtctcctggttcgcagttgggtgctactatctcatggtgggccacaagaacgagcatgccagacggtatctttcgaaggcaaccacacttgaaaagacatacggcccagcttggattgcatatgggcacagcttcgccgtggagtccgaacatgaccaggcgatggcggcatatttcactgccgcacagctgatgaagggatggaaaactgccgaaaagtggttcctggatgctctggaaaaaatcaaggccattggaaatgaggttaccgtagacaagtgggagcctctactcaacaaccttgggcacgtgtgtaggaagctgaaaaagtatgctgaagccctggattaccaccgacaggccctcgtgctgatcccccaaaatgccagcacttacagcgctattggatacattcatagcttaatgggaaacttcgagaatgccgtcgattactttcatacagccttagggctgcggcgagacgacactttctccgtgactatgttgggacactgcatcgagatgtacatcggggactctgaagcttatatcggcgcagacatcaaggacaaactgaagtgctatgatttcgacgtccatacgatgaagacacttaagaatattatttccccaccttgggatttccgagagtttgaggtggaaaaacagaccgcagaagagaccggcctaacccctttagaaactagccgcaaaactccagattcacggccttccctggaagagacttttgagatcgagatgaatgagagcgatatgatgctggaaaccagtatgtcggaccattccacctag

SEQ ID NO: 27961 - DNA, 1863 bp, synthetic construct
  misc_feature 1..1863: note = Description of Artificial Sequence: Synthetic coding sequence
  source 1..1863: mol_type = other DNA
atgaacctagaaaggttgcgtaaacgcgtgaggcaatacctcgatcagcagcagtatcagtccgccctcttttgggccgataaggtcgcaagcctgagccgcgaggagcctcaggatatttattggctcgcccagtgcctttacctcaccgcgcagtatcaccgcgctgctcatgccttaagaagccgcaagttagacaaactgtatgaagcatgtcggtacttggccgctcggtgtcattatgccgctaaggagcatcaacaagcgctcgatgtgctcgatatggaggagccaatcaacaaaaggttatttgagaaatacctgaaggatgagtccggattcaaagatccaagctctgactgggagatgtcacagtccagtatcaagtctagtatttgcctgctgcgcggaaagatttacgatgcactagacaatagaacattggcgacctattcatataaagaggccctgaaattggatgtgtattgttttgaagcgtttgacttactgaccagtcaccacatgctgactgcgcaggaggagaaggaactgctggaaagcttaccgttgagtaagctctgcaacgaggaacaagaactcctgcgtttcctgttcgaaaataaactgaagaaatacaataagcccagcgaaactgtaatcccagagagcgtggacgggctgcaggagaacttagatgtcgttgtttccctcgctgagaggcattactacaactgcgatttcaaaatgtgttacaaacttaccagcgtagtgatggagaaggaccctttccatgccagctgtttgccagtccatataggcaccctagtggagctgaacaaggccaatgagttattttacctgagtcacaagctagtggatctgtatccctcgaacccagtaagctggtttgcagtgggatgttactaccttatggtgggtcacaagaacgaacacgctagaagatatctgtccaaggcaaccactctagagaaaacctacggtcccgcatggatcgcctacgggcatagcttcgctgtcgagtcagagcatgaccaggcaatggcagcgtactttaccgctgcgcagcttatgaagggctgtcacttgccaatgctgtacatcggattggagtacggactgactaacaactccaagctggccgaacggtttttttctcaagccctgtccatcgcccctgaagacccattcgtgatgcacgaggttggggtcgtagccttccagaatggtgagtggaagactgccgagaagtggtttctcgatgctctggagaaaatcaaggcaattgggaacgaggttacagtggacaagtgggagccactgctaaataatctggggcacgtttgtcgaaagctcaaaaagtatgccgaggcacttgactaccatcggcaggctcttgtcctcatcccccagaacgcttccacctacagcgctatcggctatattcatagcctgatgggaaacttcgagaatgctgtcgattacttccatacagcacttggccttcgcagggatgacaccttttctgtgacgatgctgggccattgcattgagatgtacatcggggattcggaggcctatattggggctgacataaaagacaagctgaagtgttacgactttgatgtgcacactatgaaaacgctgaagaacatcatcagccccccttgggatttccgcgaatttgaagttgaaaagcaaaccgccgaggagaccggcctaacacctctcgagacgagtaggaagacacccgacagtcgtcccagtcttgaggagacgtttgagattgagatgaatgagtccgatatgatgttagagacttcgatgtccgaccattcgacatag

SEQ ID NO: 27962 - DNA, 1863 bp, synthetic construct
  misc_feature 1..1863: note = Description of Artificial Sequence: Synthetic coding sequence
  source 1..1863: mol_type = other DNA
atgaaccttgaacgcttgcggaagcgagttagacaataccttgatcagcagcagtatcagtctgccctgttttgggctgacaaagtcgcctccctatcccgcgaagagccccaggacatctattggcttgcccagtgcctatacttgactgcccagtaccaccgagctgctcacgctctgcgaagtagaaagctggataagctgtacgaagcctgccgatatctcgccgcacggtgccattatgctgcaaaggaacatcagcaagccctcgatgtattggacatggaggaacctatcaataaaaggctcttcgaaaaatacttgaaggatgagagcggctttaaggatccatccagcgactgggagatgtctcagtctagtataaaatcatcaatctgcctgcttaggggaaagatctatgatgccttggacaaccgcactctggctacttatagctataaagaggcgttaaaactggatgtctactgtttcgaggcgttcgatctgctgactagtcatcacatgctgaccgctcaggaagagaaggagttattggagtccctcccactgagtaagttgtgcaacgaggaacaggagcttttgaggttcttatttgagaataagttgaaaaaatataacaagccatcagagacagtcatccctgagagtgtagatggattgcaagaaaatctcgacgtcgtagtcagtctagcagagcgccactactataactgcgacttcaagatgtgctacaagttgacctccgtggttatggagaaggatcccttccacgccagttgtctgcctgtccatattggcacattggtggagctgaataaggctaacgagttattttatctatcacacaaattggtagatttataccccagcaatccagttagttggtttgctgtgggatgttactatcttatggtgggacataaaaacgaacatgccaggcgctaccttagcaaagccaccactctggagaaaacctatggtccggcttggatcgcatatggtcatagcttcgcagtggaatcagagcacgaccaagccatggcggcatatttcaccgctgcgcagctaatgaaaggatgccacctgcccatgctctatattggtttagaatacggactgactaataactccaaactagctgaacggtttttctctcaagcacttagcatcgcccctgaggaccccttcgtcatgcacgaagtcggcgtggtggccttccagaacggcgaatggaagaccgctgaaaagtggttcctggacgccctcgaaaaaattaaggcaatcgggaatgaagtgaccgtggataagtgggaacctctgttgaacaacctcggtcacgtgtgccggaagctgaagaagtacgccgaagctctcgattaccacaggcaagctctggtgctaatccctcagaatgctagcacttacagtgccattggctatattcattcgctcatgggaaactttgaaaatgctgttgattattttcataccgccctcggcctgcggagagatgatacattttctgtgactatgctgggccattgcattgagatgtacattggcgacagcgaagcttatatcggcgctgacatcaaggacaagctcaaatgctacgattttgacgtgcacaccatgaagaccctcaaaaatatcatttctccgccatgggacttccgggagttcgaagtggagaagcagactgccgaggaaactggcctaaccccccttgaaacttcacgaaaaaccccagattcgcgaccctctctcgaagagacttttgagatcgagatgaacgagtccgatatgatgcttgaaacatctatgtccgatcatagcacgtag

SEQ ID NO: 27963 - DNA, 1581 bp, synthetic construct
  misc_feature 1..1581: note = Description of Artificial Sequence: Synthetic coding sequence
  source 1..1581: mol_type = other DNA
atggaagaacctatcaataagcggttattcgagaagtacctgaaagatgagtcaggctttaaagacccaagttcagactgggaaatgtcgcagagctcaattaaatcaagcatatgtcttttaagaggcaaaatctacgacgccttggataaccgcacactggccacttatagctacaaggaggctctcaaacttgatgtgtactgttttgaggcatttgacctactaacatcccaccacatgctgacggctcaggaagaaaaggagctactggagagtctcccactaagcaaactgtgtaacgaggagcaagagctcctcagattcttatttgaaaataaactgaagaagtataacaaaccatcggagactgtgatcccggagtcagtcgacggcctccaggagaatcttgacgtggtagtctccctggccgagcgccactactacaattgcgatttcaagatgtgttacaaactgacctccgtagtgatggagaaagatccattccatgcgagttgtctgcccgtacacattggcaccctcgtcgagcttaataaggcaaatgagctgttctacctgtcccataaactggtcgatctgtaccctagtaatcccgtctcatggtttgcagttggttgctattacctcatggtgggccacaaaaacgagcacgccaggcggtatctgtctaaagctacgacactcgagaagacttacggaccagcatggattgcttacggccactcgtttgccgtggaatccgaacatgatcaggctatggctgcctatttcactgcagcccagttgatgaaagggtgccatcttcccatgctatatattggactcgaatacggattgacaaacaactccaaattggcagagcgatttttttcacaggcattgtccattgcccctgaggaccccttcgtgatgcacgaggtaggcgtggtagccttccagaacggggagtggaaaacggccgaaaagtggtttctggacgctctcgagaagattaaagccatcggcaacgaagtgacggtggataagtgggagccactgctaaataatctgggccatgtgtgtcggaagctgaagaagtatgccgaggcactcgactatcacagacaggccctggtgctgatcccacagaatgcatctacctattctgccatagggtacatccactccctgatgggcaattttgaaaacgccgtggattacttccatactgctctcggcttgagaagagacgacacattttccgtaacgatgctcgggcactgtatcgaaatgtatatcggagactcggaggcctatattggggctgacatcaaggacaagctgaagtgctatgacttcgacgttcacacaatgaaaactctcaagaatataatctctcctccttgggattttcgtgaattcgaggtggagaagcagaccgctgaagagactggcctgaccccccttgagacaagtagaaagacacccgattccagaccctccctggaggagacctttgaaatcgagatgaatgagagtgacatgatgctagagacgtccatgtccgatcacagtacatag

SEQ ID NO: 27964 - DNA, 1581 bp, synthetic construct
  misc_feature 1..1581: note = Description of Artificial Sequence: Synthetic coding sequence
  source 1..1581: mol_type = other DNA
atggaggaacccattaataaaaggctcttcgagaagtacctgaaggatgaaagtgggtttaaagaccccagctctgactgggaaatgtcccagtcttctataaaatcaagcatttgtttgctgcgcggaaaaatctatgacgccctcgacaatcgcaccctggctacttacagttataaggaggcgcttaaattggatgtatattgcttcgaggcctttgatttacttacatcccaccatatgctgaccgctcaagaagaaaaagagttgttggaatccctccccttgagcaagctttgcaatgaagagcaagagctactgaggttcctgttcgagaacaagctgaagaagtataataaaccaagtgagactgttatccctgagagcgttgacggattgcaagaaaacctggacgtcgtcgttagccttgccgagcgtcactactacaactgcgacttcaaaatgtgctacaaactaactagcgtggtaatggaaaaggacccattccatgcttcctgtctccccgtgcacattggcaccttggtggaactgaataaggccaacgagctgttctacctgagccataaattagttgacctctacccgtccaacccggtttcatggttcgccgtggggtgctactacttaatggtcggccacaagaatgagcacgccaggcgttacctgtctaaggccacaaccctggagaagacatatggccctgcatggatcgcctatggtcactcttttgccgtcgagagcgaacatgatcaggccatggcagcatactttactgccgctcagctcatgaaaggctgccatctgccaatgttatatattggtctggagtacggtctcactaacaatagtaagctggctgagagattcttctcccaggccctgtctatagctccagaggacccatttgtgatgcatgaggtgggggttgtggcattccaaaacggcgaatggaaaacagccgaaaaatggtttttggatgcccttgagaagatcaaggccataggcaatgaggtgacggtggacaagtgggaaccactgctgaacaacctgggccacgtgtgtcggaagctaaagaagtatgctgaagcactggattaccatcgtcaggccttagtcctaattcctcaaaatgctagcacatacagcgcaatcggctacatacacagcctgatgggaaacttcgagaatgctgtcgactacttccacactgctctcggacttagacgcgacgatacttttagcgttactatgcttggacactgtatcgagatgtatattggggactctgaggcatacatcggtgccgatatcaaggataaattaaaatgttacgatttcgacgtgcatacaatgaagaccctcaagaacatcatttctcccccttgggattttcgagagttcgaggtcgagaaacaaacagctgaggagaccggcctcaccccattagagacttcacgtaaaaccccagactccaggccatctctggaagaaacgttcgaaattgagatgaatgaaagcgacatgatgcttgagactagcatgtctgatcattcaacttag

SEQ ID NO: 27965 - DNA, 1428 bp, synthetic construct
  misc_feature 1..1428: note = Description of Artificial Sequence: Synthetic coding sequence
  source 1..1428: mol_type = other DNA
atggaggagccaatcaacaagagactgttcgagaagtacctcaaagatgaaagcgggttcaaagacccgtcaagtgactgggagatgagccagagctcaattaagtcatctatttgtctgcttcgcggaaagatctacgatgccctggacaatcgcacccttgcaacctattcatataaggaggccctgaaactggacgtgtactgctttgaggccttcgacctgctcacctcccaccacatgctgactgctcaggaagagaaggaactgctcgaaagcctcccccttagcaagctatgcaacgaggagcaggaactccttagattcctgttcgagaataaattgaagaaatacaataaaccaagcgagacagttataccagaaagcgtcgacggtctgcaagagaatctggatgtcgttgtgtcattggccgagcgacattattataattgtgattttaaaatgtgttacaaactaaccagcgttgtgatggagaaagacccattccatgcgagttgcctccctgtgcacattgggacccttgttgagcttaacaaggccaacgagttattttacctgtctcacaaactcgtggacttgtatccctccaatccagtgagctggttcgccgtgggatgctactatctgatggtcggtcataaaaatgaacatgctcgcaggtacttaagcaaagctacaactcttgagaaaacatatggtccggcatggatcgcctacggccacagctttgcagttgaatctgagcatgaccaggcaatggctgcatacttcacggctgcccagttaatgaaagggtggaagaccgcagagaagtggttcctggacgctctggagaagattaaggccattgggaacgaggtcactgtggacaaatgggagcccctgctgaacaacctgggtcatgtatgccggaagctgaaaaagtatgcagaggcgcttgactaccacaggcaggcactggttctgatccctcagaacgcgtcaacctattccgccatcggttacattcactccctgatgggcaattttgaaaatgccgtggattactttcacaccgctctcggcctgcggagggatgacaccttcagcgtcaccatgctcggccattgtatcgaaatgtatataggggatagcgaggcctatatcggtgctgacattaaggacaaacttaagtgctatgacttcgacgttcacacgatgaaaacgctgaaaaatatcataagccccccatgggattttcgcgaatttgaggtggaaaagcagaccgccgaggaaaccggcctgacccccctagaaacttcacgtaaaacacctgactccaggccttcccttgaagagacattcgaaatcgaaatgaatgagagcgacatgatgctcgagacatcaatgtccgatcacagcacgtag

SEQ ID NO: 27966 - DNA, 1500 bp, synthetic construct
  misc_feature 1..1500: note = Description of Artificial Sequence: Synthetic coding sequence
  source 1..1500: mol_type = other DNA
atggctcaattcgctttcgaaagcgacctgcactcgctgttgcagctggatgcaccgattcctaatgcccctcccgctcgctggcagcggaaggctaaggaggcggctggcccagccccaagccccatgcgggctgccaatcggagccacagtgctggcaggactcccggtagaaccccaggcaagagctcttccaaggtgcagaccacccctagcaaacctggaggagacaggtatatcccacaccgttctgccgctcaaatggaagtggcatccttccttttgagcaaggaaaaccagccagagaacagccagacgccgactaaaaaagagcaccagaaagcctgggcacttaacctcaacggattcgatgtggaagaggccaagatcctgaggctgagcgggaaacctcagaacgcacccgaaggttaccagaatcgtctgaaagtcctgtacagccagaaggctactcccggaagttcccggaaaacttgcagatacattcccagtttgccagacaggatactggatgctccagagatccgtaatgactactaccttaatcttgtggattggagctcgggtaacgtgctagccgtggctctggataactcagtgtacctctggtcagccagttccggcgatattctgcagctccttcaaatggagcagcctggggaatacatctcgagtgtcgcctggattaaggaagggaactacttggccgttggaacatctagtgctgaggtgcagctgtgggatgttcagcaacagaaacggctacgaaacatgacgagtcactccgcgcgagtcgggtctctcagctggaactcctatatactgtcttccggaagtaggtccgggcatattcaccatcacgacgttcgagttgcagaacatcatgtcgcaactttgagcggccattcccaggaggtgtgcggactgcggtgggccccagatggccgacatctcgcttctgggggaaatgataacctagttaatgtatggccctctgcacccggagaaggaggctgggtcccattgcagacatttacgcagcaccagggtgctgttaaggcagttgcatggtgtccatggcaatcgaacgttctggccactggaggaggcacctctgatcggcacatacgtatctggaacgtgtgtagtggcgcttgcctgtccgcagtggatgctcactcccaagtatgcagcattctttggagcccacactacaaagaacttatctccggtcatggattcgcacaaaatcagctggtcatctggaaatatccgacgatggccaaagtggcagaactgaagggccacacaagtagggttctcagtctgacaatgagccctgacggggctacggtcgcctctgctgccgcagatgaaacattacgcctgtggagatgcttcgaactcgatccagcacgtaggagggaaagagaaaaggcctccgccgcaaagtctagtctgatccaccagggcatcaggtag

SEQ ID NO: 27967 - DNA, 1500 bp, synthetic construct
  misc_feature 1..1500: note = Description of Artificial Sequence: Synthetic coding sequence
  source 1..1500: mol_type = other DNA
atggctcagttcgccttcgagtctgatttacacagccttctgcaactggacgcacccatacccaatgcccctccagcaagatggcagcggaaggccaaggaagccgcaggaccagcccctagccccatgagagctgccaatagatcccactccgccggtaggaccccgggacggacacccggtaagtcatcaagtaaggtccagaccactccaagtaagccaggcggtgatcgatacattccccatagaagcgccgctcaaatggaggtggccagtttcctgttgtcaaaggagaatcagccggaaaatagtcagaccccaactaagaaggagcatcagaaggcctgggcgctgaatctcaacggatttgacgtcgaggaggctaagatactgcgactcagcggaaagccacaaaacgcacccgaaggctatcagaaccggctgaaggttctgtacagtcagaaggcgaccccaggctcttcaagaaaaacatgtagatacatacctagcctacctgacagaatcctggacgccccagaaattagaaatgattattatcttaatttagtggattggtcctctggaaacgttctggccgtcgctctggacaattcagtgtacctttggtccgcaagcagcggcgatatcctccagttgctccaaatggagcagcccggagaatacatctcctctgtcgcatggatcaaagaagggaactacctcgccgttgggaccagtagcgcagaagtgcagctctgggacgtacagcaacaaaagcggctgagaaatatgactagccactcagccagagtggggtcactgagttggaattcatacatattgtccagtggcagtcgctcgggccatatccatcatcacgacgttcgcgtggccgagcatcacgtagctactctcagtggtcacagccaggaagtctgtggcctgcggtgggctcctgatggccgacacctggcctctggaggaaacgacaacctggtgaacgtgtggccctcagccccaggtgaagggggttgggtgccactccagacgttcacgcaacatcagggtgccgttaaggcagtagcgtggtgcccctggcaaagcaatgtgttggctaccggtggcggaactagtgatcggcacatccgaatttggaatgtctgcagtggcgcatgtctctcagccgttgatgctcattctcaggtgtgtagcatactctggtctccacactacaaagagctcatctcgggacatggcttcgctcaaaaccagctggtaatctggaagtatccaaccatggccaaagtggcggagctgaaaggccataccagcagagtcctgagtctgaccatgagtcctgatggcgctacggttgcttcggccgctgctgatgaaacgcttcgactctggcgttgttttgagctggatccggctcggaggagagagcgagagaaagccagcgctgccaagtctagtctgatccaccagggcattcgttag

SEQ ID NO: 27968 - DNA, 1428 bp, synthetic construct
  misc_feature 1..1428: note = Description of Artificial Sequence: Synthetic coding sequence
  source 1..1428: mol_type = other DNA
atggcacagttcgccttcgaaagcgacttacattccctcctccagctggatgctcctattcccaacgccccacccgctcggtggcagcgcaaggcaaaggaagctgccggtcccgctccctctcccatgcgcgctgccaatcggtctcactccgcgggacgaacccctggacgtacacccggtaagagctcctccaaagtgcagacaacacctagcaaggaaaatcaacctgagaattcccagacccccaccaaaaaggaacaccaaaaagcctgggccctgaacttgaacggttttgatgttgaagaggcaaagatcctgcgcttgtcgggcaagccacagaacgcgccagagggataccagaaccgcctgaaagtcctctactctcaaaaagcaactcctggttcaagcagaaaaacatgtcgatatatcccttctctgcccgacagaatattagacgctccagagatccggaatgactattacctcaatctagtcgattggagtagtggaaatgtgctagcggtcgcgctggataattctgtgtacctgtggtctgcatcatccggggacatattacaactgctccagatggaacagcctggagaatacatatcctctgtcgcttggatcaaggagggaaattacttagccgtgggtaccagctccgcggaggttcagctgtgggacgtgcagcaacaaaagcggttgcgcaacatgacgtcccacagcgcccgagtcggatccctctcgtggaatagttacattctttcaagtggttccagatcagggcacatccaccaccacgacgtgcgggttgctgagcatcacgttgcgacactgagtggacactcgcaggaagtttgcggattacgctgggcccctgacggtagacacctggcatcaggaggtaatgacaatcttgtgaacgtttggcccagcgcccctggcgaaggtggttgggtgccgctacagactttcacccagcaccagggcgctgtgaaggcagtggcttggtgcccttggcagagtaacgtgctggccacaggcggaggcacctcagataggcatattagaatctggaatgtgtgtagcggggcttgtctgagtgccgtagacgcacatagtcaggtgtgcagcattctgtggagtccacactacaaggaacttatctctggacacgggttcgcccagaaccagctggtcatttggaagtacccaactatggcaaaggttgcagagctcaagggccatacgtcccgagtcctcagtttaaccatgagccctgacggagctactgtggcatcagctgcggcagatgaaactctacgcctatggcggtgttttgaactggatcccgctcggaggcgagagcgagaaaaggctagtgctgcaaagtcctcattgattcaccagggcattcgctag

SEQ ID NO: 27969 - DNA, 1422 bp, synthetic construct
  misc_feature 1..1422: note = Description of Artificial Sequence: Synthetic coding sequence
  source 1..1422: mol_type = other DNA
atgtccacggagctgttctcttcaacgcgagaagagggctcgagtgggagcggcccttccttcaggtcaaatcagaggaagatgttgaatctcctgttggagcgagacacatccttcaccgtgtgcccggatgttcccagaacccccgttggcaagtttctgggtgacagcgcaaacctttctattctcagtggcggaactcctaaaagatgtctggatctaagcaacttgtcatccggcgagattactgccacacaattgacgacctcagcagacctggatgaaaccggacaccttgattcatcaggactacaggaggtgcacttagccggaatgaatcatgatcaacacctcatgaaatgctcacccgctcagttactatgcagcactccaaacgggcttgatcggggtcatcgcaaacgtgatgccatgtgctctagcagtgccaacaaggaaaacgacaacggtaacctggttgattctgaaatgaaatacctgggatcacccatcacgactgtgcctaagctcgacaagaaccccaacctgggagaagatcaggctgaagagattagtgacgaactgatggagttctccctgaaagatcaggaagctaaggtctcgaggtcgggcctgtacagaagtccgagtatgcccgagaacttgaataggccacgattgaagcaggttgagaaattcaaggacaatactatccctgacaaagtgaagaagaaatatttctcaggccaaggcaagttaagaaagggtctgtgtttgaagaagaccgtctccctgtgtgatattactattacacagatgcttgaggaggacagcaaccagggacaccttattggagacttctccaaggtgtgcgctctgcctacggtatcagggaagcatcaggatctgaaatacgttaatccagaaacagtcgcagctttgttgtccgggaagtttcagggccttatcgagaagttttacgtgattgattgccggtacccttatgagtacctgggtggacatatccagggcgctctcaacttgtatagccaggaagaactgtttaacttctttctgaaaaagcccatcgtcccactggatacacaaaaacggattataatagtgtttcattgtgagttcagttcagaaaggggccctcggatgtgccggtgcctgagagaagaggaccgctctttaaaccagtatccagcactgtactacccagaactctatatcctcaagggcggatatagagacttttttccagagtacatggaactgtgtgagccgcagagctactgccctatgcaccaccaggaccataaaacagagctgcttagatgtcgctcacagagcaaggtacaggagggggagcggcagcttcgggagcagatagcactgctggttaaagatatgtccccatag

SEQ ID NO: 27970 - DNA, 1203 bp, synthetic construct
  misc_feature 1..1203: note = Description of Artificial Sequence: Synthetic coding sequence
  source 1..1203: mol_type = other DNA
atgtccacagaactgttttcaagtacaagggaggagggctcgagtggatccggaccttctttccgctcaaatcagcgcaagatgctgaatctcctgttagagagggacacaagctttactgtgtgtcccgacgtgccacgcacaccggtgggcaagttcctgggagatagcgccaatctgagcatcctgagcgggagtcccggtttctttcgtactagcgggtccgctttttcttgggacgataacgggaacctggtggatagcgagatgaaatacttgggatcaccaattacaacagtacccaagctggataagaatccaaacttaggcgaagaccaagccgaagaaatcagtgatgagttgatggaattctctctgaaggaccaggaggctaaagtctcccgatcaggtctgtatcgctccccgtcgatgcctgagaacctgaatcggcctcgtctcaagcaggtagagaagttcaaggacaacacaatacctgataaagtgaaaaaaaagtacttctccggccagggcaagctccggaaggggttatgcctgaagaagaccgtttctctttgtgacataactatcactcagatgcttgaagaggacagcaaccagggccacctgattggggatttcagtaaggtgtgtgcgctcccaacagtgtctggaaaacatcaagatttgaaatatgttaacccagagactgtggccgcactgctgtccgggaaattccaggggcttatcgagaaattttacgtaattgactgtcggtatccctacgaatacctgggcggtcacatccagggtgcattaaacctctattcccaggaggaactcttcaatttcttcctgaagaagccaatagtgccactggatacacagaaacgcattatcatcgtgtttcattgcgaattcagctccgagagaggtccacgcatgtgccgatgtctgcgcgaggaagacagatcgcttaaccagtaccccgctctctattatccagagctgtacatcctgaagggcggatatagggattttttcccagagtacatggagctgtgcgagccccagtcatattgtcccatgcaccatcaggaccacaagactgagctgctgcgctgtcgcagtcaatcgaaggtccaagaaggcgaacggcagctcagagagcaaatcgcacttctggttaaagacatgtctccgtag

SEQ ID NO: 27971 - DNA, 1332 bp, synthetic construct
  misc_feature 1..1332: note = Description of Artificial Sequence: Synthetic coding sequence
  source 1..1332: mol_type = other DNA
atgtctaccgagctcttctccagcacacgggaggagggaagttccggctccggcccttccttcaggtcaaaccagaggaagatgcttaacctgctcctcgagagggacacatcattcaccgtttgcccagacgtgccaagaacccccgtcgggaaattcctgggggacagtgccaacctctccatactgagcggcggaacaccaaaaagatgcttggatctgagcaatctgtcctccggcgagatcacagctactcagctgacaacgagcgctgacttggatgagaccggccatctcgacagctctggactgcaggaagtgcacctggccggtatgaaccacgatcagcatctgatgaagtgttccccagacaacggcaacctagtagattccgaaatgaagtatcttgggtctcccatcaccacagtgcccaagctggacaagaaccccaacctgggggaggatcaggcggaagaaattagtgatgaattaatggaattcagtctgaaggaccaagaagcaaaagtatctagatccggcctctataggtccccttctatgcccgagaaccttaataggccccgattgaagcaggtggagaagtttaaagataataccattcctgacaaagtgaagaaaaagtacttctcaggtcagggtaagttgcgtaaagggctgtgtctcaaaaaaactgtaagcctctgtgacatcaccataacacaaatgctggaggaagattccaatcagggacatctcatcggagatttttccaaggtgtgcgccctcccaacagtgagcgggaaacaccaggatctgaagtacgttaaccccgagacggtcgcggctctgttatcaggcaaatttcaaggactaatcgagaaattctacgttattgattgccgctacccttatgagtatttgggcggtcatatccaaggggcactcaacctttacagccaggaagaactgtttaatttctttctaaaaaaacccatcgtgcccctggacacccaaaaaagaatcatcatcgtcttccactgcgaatttagctctgagagaggacccaggatgtgtaggtgtctgcgagaagaggacagaagcctaaatcagtaccctgcactctactaccctgaactctacatcctaaaggggggttaccgtgactttttcccggagtacatggagctatgtgagcctcagagctactgtccaatgcaccatcaggatcacaagactgagctactgaggtgccgatcccaaagtaaggtacaagaaggagaaagacagcttagggagcagatcgccttactggtgaaagacatgtccccatag

SEQ ID NO: 27972 - DNA, 1293 bp, synthetic construct
  misc_feature 1..1293: note = Description of Artificial Sequence: Synthetic coding sequence
  source 1..1293: mol_type = other DNA
atgagcacggaactgttcagttccaccagagaggagggaagttccggcagtgggccatcattcaggtctaaccagcgcaagatgctgaacctgctgctggagagagatacctctttcaccgtctgtcccgacgtgcctcgaacacccgtgggcaaatttttgggggactctgccaacctgagtatcctgtcaggttcacctggcttctttagaaccagcggttccgccttcagctgggatgcgcaactcctttgctctactcctaatgggctggatcggggacaccgtaagagagacgccatgtgcagctcttccgccaataaagagaacgataacggtaatctcgtggacagtgagatgaagtatcttggcagccctattaccacagtgccaaagctagacaaaaaccccaaccttggagaagaccaggctgaagaaatatcagatgaactcatggaattttcactgaaggaccaggaggccaaggtttctcggagtggcttgtatcggtccccgtcaatgccagaaaacttaaaccggccacggctcaagcaggtggagaagttcaaagacaacacgattcccgacaaggtgaaaaagaagtacttctcaggccaggggaagctccgcaagggcctatgcctcaagaagaccgtcagcctctgtgatatcaccattacacagatgctggaagaggactccaatcaaggacacctcataggggatttttcaaaagtgtgcgcactcccaacagtgagtggcaagcaccaagatctgaagtatgtgaatcctgagaccgtggccgcactcctgtccggcaaatttcagggactgattgaaaagttctatgttatcgactgtaggtacccctatgagtacctgggcggacatattcagggcgcactcaatctgtatagtcaggaagagctgtttaactttttcctgaaaaaacctatagtaccacttgacacccaaaaacgcatcatcattgtgtttcattgtgaattctcatctgagcggggtccaaggatgtgtcggtgcctgcgggaggaagaccgatccctgaaccagtaccctgcactgtattatccagagctatatatcctgaaaggcggatacagggatttctttccagagtatatggagctatgtgaaccgcagtcatattgtcctatgcatcatcaggatcacaagaccgaactcctcaggtgtaggagccagtcaaaggtgcaggaaggagaacgccagctgcgggagcagattgctctgttggtaaaagatatgagcccgtag

SEQ ID NO: 27973 - DNA, 1203 bp, synthetic construct
  misc_feature 1..1203: note = Description of Artificial Sequence: Synthetic coding sequence
  source 1..1203: mol_type = other DNA
atgtccacagaactcttctctagcacccgcgaagagggttcaagcggatccggaccaagtttcagaagtaaccagcgaaagatgcttaacctgcttctagagcgtgatacatcatttactgtatgtcccgacgttccaaggactcctgttggcaagttcttgggcgattccgccaacctcagcattctgtccgggagccccggattcttccggactagcggcagcgcgttctcttgggatgataacggaaaccttgtggatagtgagatgaaatatctggggagccctattaccacggtgcccaaacttgacaaaaacccaaaccttggagaagatcaggccgaggagatttctgacgagttgatggagttcagcctgaaggaccaggaagccaaggtatccaggtccggactatacaggtcccctagcatgccagaaaatctgaatagaccccgactgaaacaagtggaaaagttcaaagacaacaccatccccgacaaggtcaaaaagaagtatttttcgggccaaggcaaactgcgaaaaggactctgtctcaaaaaaacggtcagtttgtgcgacataaccattacgcagatgttggaagaagacagtaaccagggacacctcatcggcgacttttccaaggtctgcgctcttcctactgtttccgggaagcatcaggatctaaagtatgtcaaccccgagaccgtggccgcattgctatccggaaaatttcagggcctgattgagaaattttatgtcattgattgcaggtatccttatgagtatttgggagggcacatccagggggctctgaatctctactcacaggaagaactgttcaatttttttctgaaaaagcctatcgtgcctttagacactcagaagcgtatcattatcgtctttcactgcgagttttcatcggaacgaggacccaggatgtgccgctgcctacgggaggaagaccgaagccttaatcaatacccagcgttatactaccccgagctgtatatcctgaaaggcggataccgggattttttccccgaatacatggaattgtgtgagcctcaaagctactgccctatgcaccaccaagaccacaaaaccgagttactgaggtgtagatcacaatcaaaagtgcaggagggggagcgacagctcagagagcagatcgccctcctggtgaaagacatgtcaccctag

SEQ ID NO: 27974 - DNA, 750 bp, synthetic construct
  misc_feature 1..750: note = Description of Artificial Sequence: Synthetic coding sequence
  source 1..750: mol_type = other DNA
atgagcaccgagctcttctcatcgacccgggaagaaggcagttctggctctggcccatcttttcgctctaatcaacggaagatgctgaacctactgttggagcgggacacctcttttactgtctgtcctgatgttccccgaactcccgtcggcaagttcctaggagattctgcgaacctgtctatcttgagtggcggtactcctaagaggtgtttagatcttagcaatctgagttcaggcgagatcacggccacacagctgactacttccgccgatctcgatgagacgggccacttagactcctcaggactccaggaggtgcatctagcgggtatgaatcatgatcaacacttgatgaaatgttctccagcgcagcttctgtgctctacaccaaacggactcgaccgtggccacaggaaaagggatgccatgtgtagctcctctgccaacaaggagaacgataatggcaacctggtggactcggaaatgaagtacttagggagccctattactactgttcccaaattagataagaaccccaacctaggagaggatcaagccgaagagatttccgatgagctgatggaattttcactcaaagaccaggaagccaaggtgtctcggagcggtctgtatagatctcccagcatgcctgagaacctcaatcgtcctaggttgaaacaggtggagaagttcaaggataacaccattcccgacaaggttaaaaaaaagtattttagcggacagtag

SEQ ID NO: 27975 - DNA, 1422 bp, synthetic construct
  misc_feature 1..1422: note = Description of Artificial Sequence: Synthetic coding sequence
  source 1..1422: mol_type = other DNA
atgtccactgagctattttcctcaacacgcgaggaaggatcatctggatctggaccatcttttcggtccaaccagagaaagatgttaaacttactactagagcgcgacacctccttcaccgtgtgcccagacgttcctaggacacccgtggggaaatttcttggtgacagcgccaacttgtcaattctaagcggaggtacaccaaagagatgtctggacctgtctaacctcagcagcggcgagattacggccacgcagttaacaacttctgcagacctggacgaaaccgggcatctggattcttctggactgcaggaggtccacctggcgggaatgaaccatgaccagcacctgatgaagtgtagcccagcgcagctcctgtgttccacacctaatggactggaccggggacacagaaagagagacgccatgtgctcctccagtgcaaacaaggagaatgataacggtaaccttgttgatagcgagatgaaatatctgggtagcccaataacaaccgtgcctaaattggacaagaaccccaaccttggcgaggaccaagctgaagagattagcgacgagttgatggaattttcgctgaaggaccaggaggcgaaggtcagtaggagcggattgtaccggtcacccagcatgcccgagaatctaaatagaccaagattgaagcaggtcgagaagttcaaagataatacgatacctgataaggtgaaaaaaaaatacttctcggggcaagggaagctacgaaaggggctgtgtcttaagaagactgtcagtttgtgtgatataacaatcacccaaatgctagaagaggacagtaaccagggccacctcataggcgattttagcaaggtgtgtgcgttacccactgtgtccggaaagcaccaggacctgaagtatgtaaaccccgagactgtagcagccctcctatctggcaaattccaggggctaatagagaagttttacgtgatcgattgcagatacccttatgagtacctggggggtcacattcaaggagccctgaacctgtatagccaagaggagctatttaacttctttttaaaaaagcccattgtccccctcgatactcagaagcgcattatcatagttttccactgtgagtttagctccgaacgcggtcccagaatgtgtcggtgccttcgagaagaggacaggtcgctcaaccagtacccagccctctattacccagagttatacatcctgaagggaggataccgcgatttcttccctgagtacatggagctgtgcgaaccgcagtcgtattgcccaatgcaccaccaagaccataaaaccgagcttttacgctgccgcagtcaatcaaaggtgcaagagggtgaaaggcagctgcgcgaacagatcgccctgctcgtgaaggatatgtctccctag

SEQ ID NO: 27976 - DNA, 1473 bp, synthetic construct
  misc_feature 1..1473: note = Description of Artificial Sequence: Synthetic coding sequence
  source 1..1473: mol_type = other DNA
atgtccgaggaagcccgattttgcttcagccccggagagaacagcaaaactatgtccaccgaactgtttagcagtacgagagaggagggctcctctggttccggaccaagcttccggagcaaccagcgcaagatgctgaacctgttgttggaaagggacacatcatttaccgtctgtcccgatgtaccacgaacccccgtgggaaagtttctaggagacagcgccaatctgtctatactatcagggggaactccaaagaggtgtttggacctgtccaacttgtcctcaggcgagattaccgcaacacagctcacaacaagcgcggacctggacgaaacaggccatctcgactcctctgggttgcaagaggtgcacttagctggtatgaatcatgatcagcacctcatgaaatgttctccagctcagcttttgtgctcgactccaaatggcctcgatagagggcatcggaaaagggacgctatgtgttccagcagcgcaaacaaggaaaatgacaatgggaacctcgtggatagtgaaatgaagtacctgggatctccaataaccacagttcctaaacttgacaaaaacccaaacctgggagaggatcaggcagaggagatttccgacgagctcatggagttcagtctgaaggatcaggaagctaaagtgtctagatccggcttataccgaagcccctcgatgccagagaaccttaacagaccacgtctgaagcaggtagagaaattcaaggacaacaccatccctgataaagtgaaaaagaaatacttttccggccaaggcaaactgcggaagggcctgtgcctgaaaaaaactgtctccttatgcgacattactattacccaaatgcttgaggaggatagtaatcaaggccatctcattggagatttttcgaaggtatgtgcgctgccaaccgttagcggcaaacaccaggacctcaaatacgtgaatccagagaccgtagccgcattgctgagcggcaagttccaggggctaattgaaaagttctatgtgatcgattgtaggtatccttatgaatatttgggcggacatatccaaggcgctttgaatctgtacagccaagaggagttgttcaactttttcctaaaaaagcccatcgttcctttggatactcagaagcgaattatcattgtgttccactgtgaattcagttccgagagggggcctaggatgtgtaggtgcctgcgcgaggaagacaggagcctgaaccagtacccagccctctattaccccgagttgtacatcctcaaagggggataccgggacttcttccccgagtacatggaactgtgtgagccgcagtcttattgccctatgcatcaccaggaccacaagactgagcttttacggtgtcggagccagagcaaagtgcaggagggcgagcggcaactacgggagcagatcgccttgctcgtgaaagacatgagtccatag

SEQ ID NO: 27977 - DNA, 288 bp, synthetic construct
  misc_feature 1..288: note = Description of Artificial Sequence: Synthetic coding sequence
  source 1..288: mol_type = other DNA
atggaaggtggattcggcagcgactttgggggttctggaagcgggaaactggatcccggactcatcatggagcaagtgaaggtgcagattgcggtcgcgaacgctcaggaactcttgcagagaatgacagacaagtgcttcagaaaatgtatcggcaagccaggaggctcccttgataatagcgaacagaaatgcatcgctatgtgtatggataggtacatggatgcctggaatacagtgtccagagcatataactccagactgcagagagagagagccaatatgtag

SEQ ID NO: 27978 - DNA, 576 bp, synthetic construct
  misc_feature 1..576: note = Description of Artificial Sequence: Synthetic coding sequence
  source 1..576: mol_type = other DNA
atgcagactataaagtgtgtggtcgtcggagatggcgcagtggggaagacttgccttctgatttcttatacaacaaataaattccccagtgagtatgtccccacagtgtttgacaactacgcagtgacggttatgataggaggagaaccatatacgttgggactgttcgatacagctgggcaggaagattacgacagactccgcccactgagttacccacagaccgatgtctttctggtttgttttagcgtggtgagtccatcctcattcgaaaacgtgaaagagaaatgggtcccagaaatcacacaccactgtcccaagacaccatttctactcgtggggacacaaatcgacctcagagacgaccctagcactatcgaaaaattggcaaagaacaagcagaaaccgatcaccccagaaacagccgaaaaattagcaagagacctgaaagcagtgaagtatgtggagtgctccgccctaacgcagcgcggactgaagaacgtcttcgacgaggctattttggccgcacttgaaccacccgagacgcagcctaaaaggaagtgctgcattttttag

SEQ ID NO: 27979 - DNA, 576 bp, synthetic construct
  misc_feature 1..576: note = Description of Artificial Sequence: Synthetic coding sequence
  source 1..576: mol_type = other DNA
atgcagactataaagtgcgtcgtggttggagacggcgcagtgggtaaaacatgtctgctgatcagttacacaactaacaagtttccctccgagtacgtccccaccgttttcgacaattatgccgttacggtgatgatcggcggagaaccgtacacgctgggcctgttcgacaccgctggacaagaggactacgatcggctccgcccactttcgtatccacagactgatgtctttcttgtgtgcttttcagtcgtgagcccctctagctttgagaacgtcaaggagaagtgggtgcctgaaatcacgcaccattgccccaagacccccttcttactggtcggaacgcagatcgatctgcgtgatgatccgagcacaatagagaaactggctaaaaacaaacagaagccaataacccctgaaacggcagagaaactggcccgtgacttaaaggccgtgaagtatgtggagtgctccgcactcacacaaaaggggctaaagaacgtgtttgatgaggctatcctggcagccctggagcctcccgaaccaaagaagtctcgaaggtgcgtactactgtag

SEQ ID NO: 27980 - DNA, 576 bp, synthetic construct
  misc_feature 1..576: note = Description of Artificial Sequence: Synthetic coding sequence
  source 1..576: mol_type = other DNA
atgcagaccatcaagtgcgtagtcgttggcgacggcgcagtaggaaagacttgcctccttatttcttatactaccaataaattcccctctgagtatgtccccacagtgttcgacaattacgcagtgacagtcatgatagggggagagccttataccctgggcctctttgataccgcaggtcaagaggattacgataggctcagacctctgagttatccacagacggacgtgttcttagtttgctttagcgttgtgtcacccagttcctttgagaacgtaaaggagaagtgggtgccagagatcacacaccactgccccaagacacctttcctgcttgtcggaacccagatcgatttacgggacgacccatccaccatcgagaaactggccaagaataagcagaagcctatcactcccgagactgccgaaaaactggctcgggacctcaaggctgtgaagtatgttgagtgttccgccttgacacagaagggactgaaaaacgtcttcgacgaggcaatcctagccgctcttgaacccccagaacctaagaagagtagaaggtgcgtgcttctctag

SEQ ID NO: 27981 - DNA, 411 bp, synthetic construct
  misc_feature 1..411: note = Description of Artificial Sequence: Synthetic coding sequence
  source 1..411: mol_type = other DNA
atgcagaccattaaatgtgtcgtggtgggagatggcgcagttgggaagacctgcctccttatcagctacactaccaataagtttccttccgagtacgtccctactgtctttgataactatgctgtcacagtgatgattggaggggagccatacaccctaggactcttcgatactgctggacaggaagattatgaccgtctgcgtccgttgagttatcctcagactgacgtctttctcgtgtgttttagtgtagtctcaccgagctctttcgagaacgtcaaggagaaatgggtgcccgagattactcatcactgccccaaaaccccctttctgctcgtgggcacccaaatcgacctccgtgacgatccctctactatcgagaagttggccaagaataagcagaagccctag

SEQ ID NO: 27982 - DNA, 702 bp, synthetic construct
  misc_feature 1..702: note = Description of Artificial Sequence: Synthetic coding sequence
  source 1..702: mol_type = other DNA
atgagcccagatattttgcataataagcaaatctctatcggtatctgcaccgactatttggatttctcatgggtcaactacatccactttaaacagctgaaaaaccagtggaaagtcagaagaggcgacacaggtttcgcccgtagtgctggccgtcagaacagctctagacaggattctaacgaatggtggtctcagtttggggaggtatgtcccacaagctggaatgaagtcttcgacaattacgctgtgaccgttatgattgggggagagccctatacgttagggctattcgacacagccggtcaggaggactatgaccggcttagaccattgtcttaccctcagaccgacgtgtttctcgtttgtttttcggtggtgtcacccagctctttcgaaaacgtgaaagaaaagtgggtccccgagatcacacaccactgcccgaagacaccatttctcctggtcgggacccagattgatctgagagacgatccatccaccatcgaaaagctggctaagaataagcaaaaacctattaccccagagactgcagagaaacttgcacgagatctcaaggccgtgaaatacgtggagtgcagcgcccttactcagaagggactcaaaaatgtcttcgatgaagccatactcgcagctttggaaccgcctgagccgaagaaaagccggaggtgcgtgttgctctag

SEQ ID NO: 27983 - DNA, 1269 bp, synthetic construct
  misc_feature 1..1269: note = Description of Artificial Sequence: Synthetic coding sequence
  source 1..1269: mol_type = other DNA
atgaattccggccactcctttagtcagacgccctctgcaagcttccatggggcagggggtggctggggcagacccagaagcttcccaagagcaccaacggtgcatggaggggcaggcggagctcggattagtctgagttttaccacccgcagctgccccccacctggtgggagctggggctctggtagaagttctccgttgcttggcggaaatgggaaggccactatgcagaatctgaatgatcggctcgcgtcctaccttgagaaagtcagggctttggaggaggccaacatgaagctggaatcaaggatattaaaatggcaccagcagagggaccctgggagtaaaaaggactactcacaatatgaggagaacatcactcacctacaggagcagatcgtggatggcaaaatgacaaatgctcagattattcttcttattgataatgcacgaatggctgttgatgattttaatttaaaatacgagaacgaacactcattcaagaaggacctcgagatcgaggtcgaaggcctaaggcgtacgctggacaatttgactatcgtcacaacagatctggagcaagaagtcgaggggatgcgcaaagagcttattttgatgaagaaacaccatgagcaggagatggagaaacatcatgtcccttcagactttaatgtgaacgtgaaagtggatacggggcctagagaggaccttataaaggttcttgaagacatgaggcaagagtacgaactaattataaagaagaaacaccgcgacctggacacctggtacaaggaacagtccgccgctatgtcccaggaggcagcaagccccgctacggtacagagtcgccagggcgacattcatgagttaaagagaacattccaagcactggaaatcgatttgcaaacacagtatagcaccaagagtgcgctcgaaaacatgctgagtgaaactcaaagtcgttatagctgtaagctgcaggacatgcaagagattatctcccactacgaggaggaacttacacagctgaggcacgagctggaacgccagaataatgagtaccaggtgcttctgggcatcaagacgcatctggagaaagagatcacaacttatcgcagactgctggaaggcgagtccgagggcaccagggaggaatccaaaagttcaatgaaggtgtccgctacacctaaaatcaaggccattacacaggagacaattaatggtcgactcgtgttatgtcaggtcaacgaaatccagaagcacgcatag

SEQ ID NO: 27984 - DNA, 1596 bp, synthetic construct
  misc_feature 1..1596: note = Description of Artificial Sequence: Synthetic coding sequence
  source 1..1596: mol_type = other DNA
atggctgacgtcttgtccgtgctgcgacagtacaacatacaaaaaaaggagatcgtggttaagggagacgaggtaatttttggggagtttagctggccaaagaatgtgaaaacaaactatgtcgtatggggaactgggaaggagggacagccccgtgaatattataccttggattctattctgttcctcctgaacaatgtccacttatcccatcccgtgtatgttcgccgagcagccaccgagaacatccctgttgttcgcagaccagataggaaggatctcctcgggtatctgaacggcgaggcctctacttccgcatcgatcgatcgaagcgctccactagaaattggcctgcagcgtagcacacaagtgaagcgggctgcagatgaggtcctggccgaggccaagaaaccccgaatcgaggacgaggaatgcgtcagattggataaggaaaggctcgccgcacgcctcgaagggcacaaggaagggattgtgcagacagaacagatcaggtctctgagcgaggctatgtcggtggagaagatcgcagctataaaggcgaagatcatggccaaaaagcggtccactatcaaaacagatttggacgacgacatcacagccctgaagcagcgatccttcgttgatgccgaggtggatgtaacaagggatatcgtctcaagagagcgggtgtggcgtacccggaccaccatccttcagtctacgggaaagaactttagcaagaacatcttcgctatcttgcaaagtgtcaaggcacgggaggagggacgagcaccagaacagcggcctgccccaaacgcagctcctgtggaccccactctgcgcactaaacagccaatacccgcagcctacaacaggtacgaccaggagagattcaagggtaaggaggaaacagagggcttcaagattgatactatggggacttatcatggcatgacactaaaatcagtgacagagggggcttcagccaggaagacccagactccagccgctcagccggtgccaaggcccgtttctcaggcgagaccaccccctaaccaaaaaaaagggtcaagaactcccatcatcatcatccctgctgccactaccagcctaattacaatgctgaacgcaaaagaccttctccaggatctcaaatttgttccttccgatgagaagaaaaagcaggggtgccagcgcgaaaacgagaccctcatccagcgcaggaaagatcagatgcagccagggggaactgctattagtgtgactgtgccatatcgcgtggtcgaccagcccctcaaactgatgcctcaggactgggatcgcgtggtcgccgtgttcgttcagggcccagcctggcagttcaaaggttggccatggctactcccagatggcagcccggttgacatatttgcaaaaattaaagcgtttcatctgaagtatgatgaagtcagactggatccgaatgtgcaaaagtgggatgtgaccgtcttagagctatcttaccacaagcgacacctcgatagacccgtcttcttgcgattctgggaaacccttgataggtatatggtcaaacataaatcccacctgcgtttttag

SEQ ID NO: 27985 - DNA, 951 bp, synthetic construct
  misc_feature 1..951: note = Description of Artificial Sequence: Synthetic coding sequence
  source 1..951: mol_type = other DNA
atggccgacgtgctgtctgtactgaggcagtacaacatccagaagaaggaaatcgtggtgaaaggggacgaagtcattttcggtgagttttcgtggccaaaaaatgtaaagactaactatgtagtctgggggaccgggaaggagggacaacccagagagtactacactttagattcaattctgtttctcctcaacaacgtgcacctatcacaccctgtgtacgtccggagagctgctactgagaacatcccagtggtgcgcaggccggataggaaggaccttctgggctacctgaacggagaggccagcacatcagcttccatcgaccggtccgcacctctcgaaatcggcctgcagagatcgacacaggtgaagagggctgctgacgaagttttagccgaggctaaaaagccacgaattgaagacgaagagtgcgtcaggctcgacaaggaaaggctggccgctcggctggagggtcacaaagaaggcatcgtccagaccgagcaaattcggagtttaagtgaggccatgagcgtggagaaaattgccgctataaaagctaaaatcatggccaagaagaggagcacaatcaaaaccgacttggatgatgacatcaccgccctgaagcaacgctccttcgtggatgccgaagtggacgtgaccagggatattgtgagcagggaaagagtctggaggactcgcactactatcctgcagtctactgggaagaacttctccaaaaatatatttgccattctgcagtctgtgaaagcgagagaagaggggagggccccagagcagagacccgcacccaacgccgcacctgttgatcccacgctccgcactaaacaacctattccagctgcatataaccgctacgatcaggaacgcatcagcaacacacactatcataatagctgctcctaccacttgtttaacaatcacgcctag

SEQ ID NO: 27986 - DNA, 1317 bp, synthetic construct
  misc_feature 1..1317: note = Description of Artificial Sequence: Synthetic coding sequence
  source 1..1317: mol_type = other DNA
atgggcggttgtgcgggatctcgaagaagattttctgactcagagggtgaggagaccgtgcctgagccacggctgccactgctggaccaccagggtgcccattggaagaacgctgtcgggttttggctgctgggactttgcaataatttttcctatgtagtgatgttaagcgccgctcatgatattctgtcacacaaaaggacttctggaaaccagagccacgtggatcctggccctacccccattcctcataatagctcctcaaggttcgactgtaacagcgtcagtactgccgctgtgctgctcgccgacatcctccccacacttgttattaaacttctggcccctctagggctgcacctgttgccttattctcctcgcgttctcgtatccggaatctgcgccgcaggatccttcgtgttggttgccttcagtcacagtgtggggacttctctgtgcggagtggtatttgcaagcatatcttcgggtttgggggaggtgacgttccttagcctgacagccttttatccacgcgcagtcatttcatggtggagttccggcacaggcggagctgggctgcttggggctctgtcctaccttggattgacccaagccggacttagcccccagcagactcttctttccatgcttggaatcccagctctcctgctggctagctactttctactattaactagccccgaagcgcaggatcccggaggagaagaggaggctgaatctgccgctaggcagccactgatccggaccgaggctcctgagagcaaacccggatcttctagctccctgtctctgagggagcgctggactgttttcaaggggcttctgtggtacattgtgcccctcgtagtggtttacttcgccgagtactttattaatcagggcctgtttgaattgctcttcttctggaacaccagtctgagccacgctcagcagtataggtggtaccagatgctgtatcaggccggtgtctttgccagcaggtccagtctgcgctgctgccgcatacggttcacatgggccctggcactcctacagtgcctgaatcttgtctttctcctggccgatgtgtggtttggcttcctgccgagtatctatctcgtatttctcatcatcctctacgaggggctgctagggggagccgcatatgtaaacaccttccacaacatcgcccttgaaacctcagacgagcaccgagagttcgctatggccgcaacctgcatatcagataccctcgggatctctctgtcgggactcctcgccttgcccttgcatgacttcttatgtcagctgagttag

SEQ ID NO: 27987 - DNA, 504 bp, synthetic construct
  misc_feature 1..504: note = Description of Artificial Sequence: Synthetic coding sequence
  source 1..504: mol_type = other DNA
atgggcggttgcgcgggtagcaggagacgattttcggactcagaaggcgaggagacagtccctgagcccagactcccactgctcgaccaccaaggtgctcactggaagaacgccgtaggcttctggttgttgggattgtgcaataatttcagttatgtggtgatgctcagtgcagcacatgacatactaagccataagcggacttccggcaatcaatcccatccaccagggtctcgccagtgggacctttgttgttggaaacttaggcccggatgcctcttctctttctgcggtgaccaacctgtgtgttattttctgcttttaaccagccccgaggcacaggatccgggaggcgaagaggaagcggagtctgccgcacgtcagccactgattcgcactgaagctcccgaatcaaagccgggaagttcatccagtctcagcctgagggaacggtggactgtttttaagggtctgctctggtacatcgttcccctagtagtgtag

SEQ ID NO: 27988 - DNA, 1266 bp, synthetic construct
  misc_feature 1..1266: note = Description of Artificial Sequence: Synthetic coding sequence
  source 1..1266: mol_type = other DNA
atgggcggttgcgccggttcaagacgtcgcttcagcgactccgagggtgaggagaccgtgcctgagcccagattaccgttgttggaccaccagggagcacattggaagaacgctgtcggcttctggcttctggggctttgcaataacttttcatatgtggtgatgctgtcagcagcacacgacatcttgtctcataaaaggactagcggcaatcagtctcacgtagatccaggacccacccccattccacacaattcgtccagcaggttcgactgcaattccgtctcaacagcagcggtgctgctcgcggatatcctcccaaccttagtgatcaagttgctggcccctctggggctccacctcctgccttactcaccacgggtcctggtttctggcatatgcgcggcaggctccttcgttctcgtcgccttcagtcattccgtcggaacctccctttgcggagtggtcttcgcttctatcagctccggcttgggtgaggttacttttctaagtctcacagccttctacccgagggctgtgataagctggtggtcctcaggaacagggggagccggactcctcggagcactttcatacctgggattgacgcaggccggactaagtcctcagcagaccttactgagcatgctcggcattcctgccctgctattagcttcatatttcttgctgctcaccagccccgaggcacaagacccaggaggagaagaagaggctgagagcgccgcacggcagccactcatccgcaccgaagcgcctgagtccaaacccggtagcagcagttctcttagcctccgggaacgatggacggtctttaaagtgaggatgatggctggttttgaacttctgtttttttggaacacttctctgtctcatgctcaacagtaccgatggtatcagatgctctatcaggccggagtgtttgcatcccgttctagtctgcgctgctgccggattagatttacttgggccctcgcactccttcagtgtcttaatctggtgtttctgttagcggacgtttggttcgggttccttccttccatctacctcgtcttcctcatcatcctgtacgagggcctcctgggtggtgctgcctacgtgaatacctttcacaacatcgccctggagacttcagacgagcacagggaattcgcaatggctgctacgtgtatctctgacaccctgggaatttccctgtcaggcctcctggcattgcccttgcatgattttctatgccaactttcttag

SEQ ID NO: 27989 - DNA, 1173 bp, synthetic construct
  misc_feature 1..1173: note = Description of Artificial Sequence: Synthetic coding sequence
  source 1..1173: mol_type = other DNA
atgggcggatgtgccggaagtcggaggaggttctcagacagtgagggcgaggagactgtccctgagcctcgcctgcctcttctggatcaccagggagcacactggaaaaatgcggtcggcttctggctcttaggtctttgtaacaacttctcctacgttgtaatgctcagcgctgcacacgacattttgagccataagcggacctccggtaatcagtcacacgttgaccccggacccactcccataccacataattctagttcccggttcgattgcaattctgtgtctactgcagctgtcctgttggctgacatcctacccactctggtcatcaagctgctggctcctttggggctgcatttgctgccttatagccctcgggtattggtgtctggcatatgtgcagcaggcagtttcgtattggttgcgtttagccactcggtgggaacctccctgtgcggggtggttttcgcctcaattagttccggcctgggagaggtgaccttcttgtccttaacggctttctaccctagttactttctcctgcttaccagccccgaagcacaagatcctggaggagaggaggaggctgaatcagctgccagacagccattaatcagaaccgaagcccctgagagcaagcccggatcgagttcatcactcagcctacgcgaaaggtggacagtctttaaaggcctgctctggtacatcgtgccgcttgtggtggtgtacttcgctgaatactttatcaaccagggactgttcgaactacttttcttttggaacacctcgttgtcccacgcgcagcagtaccgctggtatcaaatgctctatcaggcgggagtgtttgcaagtaggagctctctccgctgttgtcgcatccggtttacgtgggccttggcattactgcaatgcctaaatctggtattcctcttggccgatgtttggtttggcttccttcccagcatttacctcgtattcttaattatactgtacgaaggccttttgggtggagccgcttatgtgaacaccttccataatattgctctcgaaacttccgacgaacacagggagttcgccatggcagccacatgtatcagtgacacgctgggcatctccctgagtggcttattagccctgcctttacatgatttcctgtgccagttaagctag

SEQ ID NO: 27990 - DNA, 762 bp, synthetic construct
  misc_feature 1..762: note = Description of Artificial Sequence: Synthetic coding sequence
  source 1..762: mol_type = other DNA
atgggcggatgcgccggtagccggaggagattctccgactccgaaggcgaggaaactgtgccggagcctcggcttcccctactagaccaccagggcgctcattggaagaacgccgtcggcttttggttgttaggcctatgtaataatttcagttacgtggtaatgcttagtgccgctcacgatatactctcacataagcgcacctctggcaaccagtcccatgtcgacccaggccctacacctattcctcacaactctagcagtcgctttgactgcaacagtgtgtccaccgcagctgtccttcttgctgacatcctacccaccctggtcattaaactgctcgcgcctctgggtttacatctattgccatacagtccaagagttctcgtgagcggaatatgcgccgctgggtcctttgtccttgtggccttctcacatagcgtgggcactagtctttgtggctcctcttcaagccttagtctcagggagcgctggacagtgttcaagggactgctgtggtacatcgtcccattagtcgtcgtctacttcgcggaatattttattaaccagggtctgtttgagcttctttttttttggaacacctctctgtcccacgctcagcagtacaggtggtaccagatgctttaccaagcaggagtgtttgcaagccgctcctcacttagatgctgtaggataagattcacatgggcacttgccctcctccagatggaaagccgctctgtcgctcaggctggtatgtag

SEQ ID NO: 27991 - DNA, 1020 bp, synthetic construct
  misc_feature 1..1020: note = Description of Artificial Sequence: Synthetic coding sequence
  source 1..1020: mol_type = other DNA
atggggggatgcgccggaagtagaaggcgattcagtgatagcgaaggtgaagagacagtgccagagcctcggctaccccttttggaccaccagggagcgcactggaagaacgcagtgggattttggctgctggggctgtgtaacaacttctcgtacgtagttatgcttagcgccgcacatgatattcttagccacaaaaggacgtctgggaaccagtctcacgttgatcctggtcctactccgattcctcacaactcatcttcacgcttcgactgtaattctgtgtcaactgccccacctggatccaggcagtgggacctgtgctgttggaagctcagacctggatgcttgttcagcttttgcggggatcaaccagtctgctatttcctgctacttactagccctgaggcccaagatcctggcggagaggaggaggcagagagtgccgcaagacaacccctgatcaggactgaggccccagagtccaaacccggtagctccagttccctttcattaagagagcgttggacggtattcaaaggcctgctctggtatatagtgccactggttgtggtatattttgccgaatactttatcaaccaagggctgtttgagctgctgtttttctggaatacatcgctgtcgcacgcgcagcaatacaggtggtatcagatgttgtatcaggccggagtgtttgcgagcagaagttcgcttcgatgctgcaggatccgcttcacttgggccctggcattgctgcaatgcttgaacctggtatttctcttagccgacgtgtggtttggttttctgccctcgatatacctggtcttccttataatcctgtatgagggactcctgggaggtgccgcttacgttaacactttccacaacatcgcgcttgagacaagtgacgagcaccgggaattcgctatggctgcaacctgcattagcgacacattgggaataagtttatccgggctgctcgccttaccactgcatgatttcctttgccaattatcctag

SEQ ID NO: 27992 - DNA, 1155 bp, synthetic construct
  misc_feature 1..1155: note = Description of Artificial Sequence: Synthetic coding sequence
  source 1..1155: mol_type = other DNA
atgctctctgcagcccacgacatcctgagtcataaacggacgagcggcaatcagtcccatgtggacccgggtccgaccccaatccctcacaattccagcagccgatttgactgtaacagtgtgagtacagctgctgtgcttctggctgacatcctgcccactctggttataaagctgctggctcctttgggactgcaccttctgccttactctccaagggttctagtctcaggtatctgcgctgctgggtcatttgtgcttgtggcgttttctcatagtgttggtacctccctctgtggagttgtgtttgccagcatctcctccgggttaggtgaggtgacatttttaagtctgactgcgttttatcctcgggctgtgatttcttggtggtcatcagggaccgggggtgctgggttgctgggggcattatcctatttaggcctcacccaggctggcctgtctcctcagcaaacactgttaagcatgctcggtatccccgctttgctgttagcatcatactttttactgcttactagtcctgaagctcaggaccccggaggggaggaagaggccgaatctgcagctcgccagcccctgataagaaccgaggcacccgaatctaagcctggttcttcctcctctctttccctaagagagaggtggaccgtatttaagggtctgctctggtacatcgtgcccctcgtggtcgtttactttgccgaatattttataaaccaagggctgtttgagctcctgtttttctggaacacttctctcagccacgcacagcagtatcgctggtatcagatgctctaccaagcgggagtgttcgctagccgctcatccctgagatgctgtcggatacgcttcacttgggcactggccttacttcaatgtttgaatctggtgttcctgctggccgacgtttggttcggattcctccctagtatctatctcgtattccttattatactgtacgagggactcctcggcggagcagcctacgtgaatacctttcacaatattgccttggagacttctgatgagcacagggaattcgcaatggcagcaacgtgcatctcagacacgctgggcatttccttatcagggctgctggccctgcctcttcacgacttcctgtgtcagctcagttag

SEQ ID NO: 27993 - DNA, 1317 bp, synthetic construct
  misc_feature 1..1317: note = Description of Artificial Sequence: Synthetic coding sequence
  source 1..1317: mol_type = other DNA
atggggggatgtgccggatctaggcgtcggttctctgattcagagggcgaagaaacggtaccagagcccagactgccacttcttgaccatcagggggctcactggaaaaacgcggtgggcttttggctgcttgggctgtgcaataacttcagttacgttgtaatgctgagcgcagcacacgacattctgagtcataagcggacatctggcaaccagtctcatgtggatcccggacctactccaatcccgcataatagcagctcgcggtttgactgtaactccgtgtccacagccgcagtcctgctggcagatattctgcccacactcgtgatcaagctgttggcccctctgggactgcacctcttgccctattcacctagggtgctggtgagtggcatctgtgctgctggatcctttgtcttggtagctttctcccattccgtcggaacgagtctgtgtggcgtggtgtttgcctctatatccagcggcttaggtgaggtgactttcctgtctttgacagcgttttacccacgcgctgtcatctcatggtggtctagcggtacaggaggggctggcttgctgggggcactttcttacctcggccttactcaggctggcctgagtcctcaacagacccttctcagtatgctgggaattcccgctctgctgctggcctcatatttcctcctgcttaccagtccagaggctcaagaccccggaggagaagaggaggcggagtccgccgcaagacaaccactcatccggacggaggctcccgagtcaaagcccggttcatcttcgtccctgtccctcagagagagatggactgtgtttaaaggcctcctgtggtacattgttccgctcgtcgtggtgtattttgcagagtattttatcaaccagggcctcttcgaattgctgttcttctggaatacgtctctttcacacgcccagcagtatagatggtatcagatgttgtaccaggctggagtgtttgcctcacgatcatccttacggtgctgtcgcatccggtttacctgggctctggctctcctgcagtgccttaatctggtttttctcctagccgacgtgtggttcggtttcctaccgtccatctacctggtgtttctgatcattctgtatgagggtcttctgggcggagctgcctacgtcaataccttccacaacattgccctggaaacaagcgacgaacacagagaattcgcgatggccgcaacctgtatttctgataccctggggatctcactgtcaggacttcttgccctaccgttacatgatttcctctgccagctgagctag

SEQ ID NO: 27994 - DNA, 1317 bp, synthetic construct
  misc_feature 1..1317: note = Description of Artificial Sequence: Synthetic coding sequence
  source 1..1317: mol_type = other DNA
atgggcggatgcgccggtagccggcgaaggttttccgactccgagggggaggagacagtccccgaaccgagactacctctgctggatcaccagggggctcattggaaaaatgcagtgggattttggttgctcgggctatgtaataactttagctacgtggtaatgctttcagctgcccatgacattctgtcgcataaaagaacctcagggaatcagtcacatgttgatcctggccctacaccaatacctcataacagctcctcccggtttgattgtaatagtgtgtctactgccgctgtactcctggcagatattctccccactctagttattaagctgctcgctccgttgggactccacttgctgccatactcccctcgcgtacttgtgagtgggatctgcgctgcaggctcttttgttctggtggcattctcccactccgtgggaacgtcactgtgtggcgtggtttttgcatcaatcagttccgggctgggcgaagtgaccttcttgtctctgaccgccttttaccctcgagcagtcatctcatggtggagttcaggtactggtggtgcaggacttctcggggctctgtcctacctagggttaacacaagcgggtctgtcacctcagcagacattgctgtccatgctcggaattccagctctgctgctcgcttcatatttcctgttgttgacaagtccagaggctcaggacccaggcggtgaggaggaagctgagtccgccgcacgccagccacttatccgcacagaggctcctgaaagcaagcctggaagcagcagtagcttgtccctgagggagcggtggacagttttcaaagggcttctctggtatatcgtgccattggtggtggtgtatttcgccgaatacttcattaaccaaggcctgtttgaacttctgttcttttggaacactagtctttctcacgcacagcagtatagatggtaccaaatgctataccaggccggtgttttcgccagcagatcatcattacgctgttgcaggattaggttcacctgggccctagccctactgcagtgtttgaaccttgtgttcctactcgccgatgtttggttcggattcctgccatctatttacctcgtgtttctaataatcctgtatgagggactgttgggaggcgctgcctatgtcaatacattccataacattgcactagagacgtcggacgagcaccgtgagtttgcgatggccgctacgtgcatctccgatactcttggcataagtttgtccgggttgctcgcactgccgctccacgacttcctgtgtcaattgtcttag

SEQ ID NO: 27995 - DNA, 1017 bp, synthetic construct
  misc_feature 1..1017: note = Description of Artificial Sequence: Synthetic coding sequence
  source 1..1017: mol_type = other DNA
atgtggacgcaagctcagagacgatcacctacaacggcccaccacgatcttaccgccactttgtccctgagactgccacgggtgctggtgagtgggatctgcgctgccggatcctttgtgctggtggcttttagtcatagtgtcggcacatctctctgtggggtcgtgttcgcgtctatcagctctggattaggcgaagtgacttttctcagcctcaccgccttttaccccagagcggtcatcagttggtggagcagcggaactggaggcgcaggccttctgggggctctttcttaccttggattaactcaagcaggattgtcccctcagcaaaccctactgtcgatgctggggattcctgccctactcctcgcgtcatactttctgctgctgacgagccctgaagctcaggaccccggaggggaggaggaggctgagtccgccgcacgacagcctcttattcggactgaggcccctgaatcgaagccgggaagttcgtcaagcctgagtctgagggaaaggtggacagtgtttaagggcttactctggtacatcgtgccactagtagtggtttactttgcagagtatttcattaatcagggcctgttcgaattgctgtttttttggaatacttccctgagtcatgctcaacagtacaggtggtaccaaatgctctatcaggccggagtgttcgcctcgagatctagtctgcggtgctgtaggatacggttcacgtgggctctggctctgttgcagtgccttaacctggttttcctgctggcggatgtctggtttgggttcctcccaagtatatatctcgtgtttctcattattctttacgagggattgctggggggagccgcttatgtcaacacctttcataatattgcactagaaacaagtgatgaacaccgagagttcgctatggcagctacgtgtatctccgatacgctcggcatatccctgtccggcctgcttgccctgccacttcacgatttcctgtgccagctgagctag

SEQ ID NO: 27996 - DNA, 1083 bp, synthetic construct
  misc_feature 1..1083: note = Description of Artificial Sequence: Synthetic coding sequence
  source 1..1083: mol_type = other DNA
atgttatctgctgcacacgacatactttctcacaaacgaacttctgggaaccaaagccacgccgtcctgttggctgacatcttacctactttagtcattaagcttttggcacctcttggcctccacttgttaccatattcaccaagagtgctcgtctcaggcatttgcgccgcaggcagctttgtgctcgtggcattttcccactcagtgggcacctccttgtgcggcgtcgttttcgcatccatttcctcaggcctgggcgaggtcacctttctatccctgaccgccttttaccctagggcagttattagctggtggtcgagtgggactggcggagcaggactgcttggcgcactgtcctatcttgggttaacacaggccggtctgtcaccccagcagactttgctgagcatgctcggaattccagccctgctgttggcatcctattttctgctacttacatcccctgaggcacaggacccgggaggcgaagaggaagctgagtccgctgcccgtcaaccgctgatccgcacggaggcacctgagtcgaaacccggaagcagctcctcgcttagtttgagggagcgatggaccgtgttcaaaggcctcctatggtacatagtcccgttggtggtggtctacttcgctgagtacttcattaatcaaggattatttgaactcctgtttttctggaacacatcactgtcccacgctcaacagtatagatggtatcagatgctgtaccaggccggagtatttgcctcccgctcctcactgcgctgttgccgcattcggtttacatgggccttggctctgctgcaatgtctgaacctggtgtttttgttggccgatgtatggtttggcttcctgccctccatctatctagtttttctaatcatcttatacgaaggtttgctgggaggcgcagcttatgtaaatacttttcacaatatcgcgctggaaaccagtgacgagcaccgggaattcgcaatggctgccacatgtatcagtgacacattgggtattagtctgtcaggcctcttggcacttccactgcacgatttcctgtgtcagttatcttag

SEQ ID NO: 27997 - DNA, 1299 bp, synthetic construct
  misc_feature 1..1299: note = Description of Artificial Sequence: Synthetic coding sequence
  source 1..1299: mol_type = other DNA
atggccgtccctttcgtggaggactgggacttggtgcagactctgggtgagggggcttacggagaagtacagctggcagtaaaccgcgttactgaggaagctgttgcagtgaagatagtcgacatgaaaagggccgtggactgtcctgaaaatattaaaaaggaaatctgcattaataagatgctcaaccatgagaacgtagtaaagttctacggacataggagagaggggaacatccagtatctgttcctggaatactgctctggaggggagctgtttgatagaatcgagcccgatatcggtatgcctgagccggatgctcagagattctttcaccaactaatggccggagttgtctacttacatgggataggcatcacgcatcgggacattaagcctgagaacctcctgctggacgaacgcgataatctgaaaatatcagactttgggctcgcaacagtttttagatacaacaacagagagcgcctattgaacaaaatgtgcgggacactcccgtacgttgccccagagctgcttaagagacgtgagttccacgcagaaccagttgacgtttggtcctgcggcattgttctcactgccatgcttgccggagaactgccatgggaccagccttccgacagttgccaggaatactccgactggaaagaaaagaagacatatttgaacccatggaaaaagatagacagtgcgcctctggccctgctgcacaagatactggtggaaaacccatccgctcgcatcactattcccgacatcaagaaagatcgatggtacaataaaccgttaaaaaaaggcgctaaaagaccaagagtaacttcagggggagtgtcagagtcgccatctggcttcagcaaacacatccagagcaaccttgacttcagtccagtaaacagtgctagctctgaagagaacgtgaagtattcaagctcccagcctgagccaagaaccggactcagcctgtgggacacatccccgagctatatcgataaactggtgcagggtatttcgttctcccagcccacatgtcccgaccacatgctcctaaattcacagctcttggggacccctgggagctcccaagtgacgattagtacaacagacagacgcaacaacaaacttatctttaaggtaaatttactggagatggacgataagatccttgttgacttccgcctgtcgaagggagacggtttggaatttaagcgtcacttcctgaaaataaaaggtaaattaatcgatattgtcagcagccaaaagatctggctgcccgcaacttag

SEQ ID NO: 27998 - DNA, 1431 bp, synthetic construct
  misc_feature 1..1431: note = Description of Artificial Sequence: Synthetic coding sequence
  source 1..1431: mol_type = other DNA
atggccgtcccattcgtggaggattgggatcttgtccagacgctgggcgaaggagcatacggagaagtccagttggctgtgaacagggttaccgaggaggcagttgctgttaaaatcgtcgacatgaaacgagcagtagattgtcctgagaatataaaaaaggagatatgcatcaataaaatgttgaatcacgagaacgtagtgaaattttatggacacagaagagagggcaatatccagtatctttttctcgaatactgctcaggcggtgaacttttcgataggattgagcctgatatcggaatgccagagcctgatgctcagcgtttctttcatcagcttatggctggggttgtttaccttcacggcattggaattacacatcgggacatcaagcccgaaaatctgcttctggacgaaagggacaacctcaagattagtgacttcggcctggctacagtgttccgctacaataatcgcgaaagacttctgaacaaaatgtgtgggaccctcccttacgtggcccctgagcttctgaagaggagggagttccacgcagaaccagtagacgtgtggtcctgtggaatagtgctcaccgccatgcttgcgggtgaattaccctgggatcagccttccgattcatgtcaggagtattccgactggaaagagaaaaaaacgtatctgaatccctggaagaaaatcgactctgctccactcgccctccttcacaagatactagtggaaaatccttctgctcggatcacaatacccgacatcaaaaaagacaggtggtacaataagccactgaagaaaggtgctaagcgccctcgcgttacctccggcggagtgtcagaaagtcctagcggatttagcaaacacatccagagtaacctagacttctcgccggtaaatagcgcttcctcagaagagaatgtcaagtacagcagctcccaaccagagccgcgtactggactgtcgttatgggatacctctccttcctatatcgataagctggtacaaggcatcagtttctcgcagcctacatgtcctgatcacatgttgttgaactcgcagttactgggaacccccggtagttcacaaaacccgtggcagcggctggttaagcggatgactaggtttttcactaagttggacgcagataaatcataccaatgccttaaagaaacttgcgagaaactgggataccaatggaagaaatcatgtatgaaccaggttacgatctcaacaaccgacaggcgcaacaataaactgattttcaaggtgaatctgctagaaatggacgacaaaatcctcgtcgacttccgcctctccaagggcgacggactggagtttaagcgccacttcctcaagatcaaaggcaagctcatcgacattgtgtcttctcagaagatttggttgccagctacttag

SEQ ID NO: 27999 - DNA, 1431 bp, synthetic construct
  misc_feature 1..1431: note = Description of Artificial Sequence: Synthetic coding sequence
  source 1..1431: mol_type = other DNA
atggcggtgccctttgtggaggattgggatctggtgcagaccctaggagaaggcgcttatggcgaggttcagctggccgtgaacagagtaacggaggaggcggttgccgtgaaaattgtggacatgaaacgtgccgttgactgcccggaaaatatcaaaaaagagatctgcatcaacaaaatgttaaatcatgagaacgttgttaagttctatggccatcgtcgcgagggcaacatccagtacctgtttctggaatactgttccggaggagaactgtttgatagaatcgagccagatataggcatgccggagccagacgcccagagatttttccaccaactaatggcgggagtcgtgtacttgcatggcatcggaatcacacacagagacataaaaccagagaacctgctgttggatgagagagataatctcaagatctcggatttcggcctcgccactgttttcaggtataacaaccgcgagaggctccttaacaaaatgtgcgggactctcccatatgtggctcccgaactcctcaaaaggagagagttccacgccgaacctgtagatgtttggagctgtggaatcgtgttgactgccatgcttgccggagagctgccgtgggatcagccatcagactcctgccaggagtattcggactggaaagaaaagaagacgtacctgaacccatggaaaaaaatagattctgctccactagcccttctgcacaaaattctagtggagaacccttcagctaggatcacaattcctgacatcaagaaggatagatggtataacaagccgttaaaaaagggtgcaaaacgacctagggtcacaagtggcggagtgagtgaatctcctagtggattttctaaacatatacagtctaacctggatttttcccccgtcaactccgcctccagtgaagaaaacgtgaagtacagttcaagtcagcccgagcccagaacgggcctcagtttatgggacacatcaccttcttatatcgataaattggtccagggaatatcattttctcaaccgacctgccctgaccacatgctattgaacagccaactgcttgggacaccgggaagcagtcaaaacccatggcagagactcgtcaagaggatgacaaggttctttacaaagctggatgcagacaagtcatatcagtgcctcaaggaaacctgcgaaaaactaggatatcaatggaaaaagtcttgtatgaatcaagtaaccatttctacaactgatcgcaggaataacaaattgatctttaaagttaatttgctggagatggatgataaaattcttgttgatttccgtttgtccaagggcgacggcctcgaattcaagcgccacttcttaaagataaagggcaagcttattgacatcgtgtcgtctcaaaagatttggttgcccgcaacttag

SEQ ID NO: 28000 - DNA, 1431 bp, synthetic construct
  misc_feature 1..1431: note = Description of Artificial Sequence: Synthetic coding sequence
  source 1..1431: mol_type = other DNA
atggccgtgccttttgtggaggattgggacctggttcaaacactaggagagggcgcatatggtgaggtgcaactggcggtaaaccgggtgacagaagaggccgtggcggtgaagatagtggatatgaagcgcgcagtggactgccctgagaatattaagaaagagatctgtattaacaagatgctgaatcacgaaaatgtggttaagttctacggtcacagaagagagggtaatattcaatatctattcctggagtactgttcgggaggagagctgttcgacagaattgagccggacatcggtatgcctgaacctgacgctcaaaggttcttccatcagttgatggcgggtgtcgtttaccttcacgggattggcataacccaccgagacatcaagcccgaaaatctgctcctggatgaacgagataatctcaagatatccgacttcggcttggccactgtttttagatataacaacagagagagactcctgaacaaaatgtgtggcacactcccttatgttgcccctgagctgctgaagcggcgtgagttccacgcagaacccgtggacgtgtggtcttgcggaatcgttttgacggccatgctcgccggtgagctcccctgggatcaaccttccgacagttgccaggagtactctgactggaaggaaaaaaagacttacctgaatccttggaaaaaaattgactccgctcccttggctctgctgcataagatcttagttgagaacccatcagcgcgaatcactatccccgatatcaaaaaggataggtggtacaacaaacctctgaagaaaggagctaagaggccacgcgttacttccggcggagtatcggagtcgccctcagggttttctaaacacatccagagcaacctagacttcagtcctgttaattctgcttcaagcgaggaaaacgtaaagtattcatcctctcagccagagccgagaaccggactgtctttatgggacacctccccatcttacatcgacaaactggtacaggggatctctttcagccagcctacatgtcctgatcacatgctactgaacagtcagctgttgggcacacctgggtcctctcagaatccctggcaaaggctggttaaaagaatgactaggttcttcaccaaattggatgctgacaaatcctaccagtgtcttaaggaaacttgtgaaaaactggggtaccaatggaaaaagtcatgcatgaatcaggtgacgatatctaccacagaccgccgaaataataagctgatattcaaagtcaatttactggagatggatgataagatcctcgtcgacttccggttgagcaaaggagacggactggagttcaaacggcatttcttgaaaatcaagggcaaactgattgatatagtgagctcccaaaaaatttggctccccgctacatag

SEQ ID NO: 28001 - DNA, 402 bp, synthetic construct
  misc_feature 1..402: note = Description of Artificial Sequence: Synthetic coding sequence
  source 1..402: mol_type = other DNA
atggccgtgccatttgtggaggattgggatctggtgcagaccctgggcgagggggcatatggagaagtgcagttggcagtgaatagggtgacggaggaggcagtagctgtgaagatcgtcgacatgaagcgagctgtggactgccctgagaatataaagaaggagatctgtattaacaagatgctgaatcacgagaacgtcgtgaaattttacggccatagaagggaaggcaatatccagtacctgtttctggaatactgttccgggggagagcttttcgatcgtatagagcccgatattgggatgcctgagccggatgctcagcgctttttccaccaactcatggcgggtgtggtgtatctgcacggcatcggaataacccatagggacatcaaaccatag

SEQ ID NO: 28002 - DNA, 513 bp, synthetic construct
  misc_feature 1..513: note = Description of Artificial Sequence: Synthetic coding sequence
  source 1..513: mol_type = other DNA
atggccgtcccttttgtggaggactgggaccttgtacagacactcggagagggtgcctatggggaggtgcagttggccgtaaaccgcgttactgaagaagccgtggccgtgaaaatagtagacatgaagagggcagtcgattgcccagagaatattaaaaaggagatctgcattaataaaatgctgaatcacgagaacgtcgtgaaattttatggacaccggagagaaggcaatattcagtacctgttcctggaatattgctcaggcggagagctgttcgatcgcatcgagcccgatattggaatgccagaacctgatgcccagaggttttttcatcaactgatggcaggggtggtctacttacacggaatcggaataacccacagggacataaaacccgaaaacttactactggacgagcgcgacaaccttaaaatatccgacttcgggctggcaacagtgttccgatataataatcgggagcggctcctgaataagatgtgtggaacttag

SEQ ID NO: 28003 - DNA, 615 bp, synthetic construct
  misc_feature 1..615: note = Description of Artificial Sequence: Synthetic coding sequence
  source 1..615: mol_type = other DNA
atggcagtgccttttgtagaagactgggacttagtgcaaactctgggcgagggtgcctatggagaggtacaattggccgttaaccgagtgacggaggaggctgtggcagtcaaaatcgtggatatgaagagggccgtggactgtcccgagaacattaagaaggagatctgcattaacaagatgctgaaccatgaaaacgtagtgaaattctatggtcacagaagggagggtaacatccaatatctattcctggagtactgttcgggaggggagcttttcgacagaatcgagcccgacattggcatgcctgagccagatgcccagaggttctttcatcaacttatggccggagtggtgtacctgcatgggattgggatcactcatagggacattaagccagaaaatctgctgttggatgaaagagacaatcttaaaatcagtgacttcgggctggcaactgtgtttagatataataaccgtgagagattgctcaacaagatgtgcggaaccctgccttatgtggcaccggagctgcttaagaggcgcgaattccatgctgagcctgtggatgtctggagctgcggaatcgtactgaccgcgatgctggcgggttag

SEQ ID NO: 28004 - DNA, 129 bp, synthetic construct
  misc_feature 1..129: note = Description of Artificial Sequence: Synthetic coding sequence
  source 1..129: mol_type = other DNA
atggcggttcccttcgttgaggactgggatctagttcagacgctgggagaaggggcttacggcgaggtacagctggcagtgaaccgcgtcacggaagaggccgtagccgtaaaaattgttgacatgtag

SEQ ID NO: 28005 - DNA, 1431 bp, synthetic construct
  misc_feature 1..1431: note = Description of Artificial Sequence: Synthetic coding sequence
  source 1..1431: mol_type = other DNA
atggccgtcccttttgtggaagactgggatctagtccagaccctgggtgaaggcgcatacggtgaggtgcagctcgcggtcaaccgggtgactgaagaggccgtcgcggtcaaaattgtagacatgaagagggctgttgactgccccgaaaatattaagaaagagatttgtatcaataaaatgttgaatcacgaaaacgttgttaagttctatgggcatcggagggagggcaatattcagtatctcttcctcgagtactgttctggtggggagttattcgatcgcattgaacctgatattgggatgcctgagcctgatgctcagcgttttttccaccagttgatggccggagtcgtctatcttcatggcataggcatcacacaccgggatataaaacccgagaacttgctgttagatgagcgagataacctgaagatctctgacttcgggctggctacagtctttcgctataataaccgcgagaggctgctgaacaaaatgtgcgggaccctcccatacgtagctcctgagttgttgaagcggagagagtttcacgccgaaccagtggacgtgtggagctgtgggattgtgcttacagccatgctggccggtgaactcccgtgggatcagccaagcgacagctgtcaggagtattccgactggaaagagaaaaagacctacctgaatccgtggaaaaaaatcgatagtgcgccactggccctcctccacaaaattctcgtcgagaatcccagcgctcgtataaccatcccagacattaagaaggatcggtggtacaacaagcccctcaagaaaggggcaaaaaggccacgcgtcaccagcggcggtgtgtccgagtctccctctggtttttcgaagcacatccagtcgaatctggatttctccccggttaactctgcctcttccgaagagaacgtaaaatatagttcaagccagcccgagccgagaacaggcctaagcctttgggacacctccccttcctacattgacaagctcgtgcagggaatttcttttagccagccaacatgccctgatcatatgttattgaacagccagttgcttgggacgcccggatcaagccagaatccctggcagcgcctggtgaaacgcatgaccagatttttcactaagttagacgccgacaaatcctatcagtgtttaaaggagacctgtgaaaaactgggctatcagtggaagaagtcctgtatgaatcaggtgaccatctcaactaccgatcgcaggaacaacaagctgatttttaaagtgaatctgctcgaaatggacgacaagatcctggtagatttcaggctgtcaaaaggcgacggcctggagtttaaaagacactttctcaagatcaaagggaaactgatcgatattgtgtctagccagaagatttggttacctgcaacgtag

SEQ ID NO: 28006 - DNA, 384 bp, synthetic construct
  misc_feature 1..384: note = Description of Artificial Sequence: Synthetic coding sequence
  source 1..384: mol_type = other DNA
atggctgttcctttcgtggaggattgggacctggtgcagactctgggcgagggggcatacggagaggttcaactggccgtgaatcgtgttaccgaggaagctgtggccgtgaaaattgtggacatgaagagggctgttgactgcccagagaacatcaagaaagagatatgcatcaacaaaatgctgaatcatgaaaacgtcgtcaagttttacgggcataggagggagggcaatatccagtacctgttcctcgaatactgcagcgggggagagctttttgaccgcattgaaccagacatcggtatgccggagcccgatgcccagagattctttcatcaactgatggccggtgtggtgtacctgcacggtataggtatcacttag

SEQ ID NO: 28007 - DNA, 1329 bp, synthetic construct
  misc_feature 1..1329: note = Description of Artificial Sequence: Synthetic coding sequence
  source 1..1329: mol_type = other DNA
atggctgtacccttcgtcgaagactgggatttagtgcaaactctgggagagggcgcttacggggaggtacagttggctgtgaaccgggtgacagaagaggccgtggctgtcaagatcgtcgacatgaagagggccgtggattgtcctgaaaacattaaaaaggagatttgtattaacaagatgttaaatcatgaaaacgtcgtgaagttctacgggcaccgcagggagggaaatatccagtaccttttcctggaatactgcagcggcggtgagctgttcgatcgcattgaaccagatatcggaatgcctgagccagatgctcagagatttttccatcagttaatggcgggagtggtttacctgcatggaattggtattacccatcgggacatcaagcctgaaaatctgcttctagatgagcgggataatttaaagattagcgattttgggctcgctaccgtcttccgctataacaaccgggaacgcctgctcaataaaatgtgtggcacactgccatatgtggcccctgagttactcaagagacgggaattccatgcagagcctgttgacgtctggagttgcgggatcgtgctgactgccatgcttgcaggcgagctgccctgggaccagccatctgatagttgccaggagtactccgactggaaggaaaagaaaacgtaccttaatccctggaaaaaaattgatagcgccccactggcactccttcataaaattttggtggagaacccctccgcacggattacgatcccagacatcaaaaaagataggtggtataataaacctctaaagaaaggggcaaagcgccctcgagtgacgtctggcggagtaagtgaaagtccatccggcttcagcaagcacattcaatcgaacttggacttttctcccgttaacagcgcaagctccgaagagaatgtaaaatactcttcatcccagcccgagcctcggacaggtcttagcctttgggatacgtctccatcctatattgacaaactcgtccagggcatttcatttagccaaccaacgtgtcctgaccatatgttgctaaacagccagctgctcgggacaccaggaagctctcaaaatccatggcagcgcttggtcaaacgaatgacaaggttttttaccaagctggatgcagacaagtcctaccagtgcctcaaagagacctgtgaaaagctcggctaccaatggaagaaaagctgtatgaaccaaggtgatggcctggagttcaagaggcacttcctgaaaattaaaggcaagttgatcgacatagtgagcagccaaaagatctggctgcctgctacctag

SEQ ID NO: 28008 - DNA, 1632 bp, synthetic construct
  misc_feature 1..1632: note = Description of Artificial Sequence: Synthetic coding sequence
  source 1..1632: mol_type = other DNA
atgagccgcgaatcagatgttgaagcacaacaatcccacggcagctctgcatgcagccagccacacggctcagtgacccagagtcaggggtccagcagtcagtctcagggtatctcgtcctccagcacaagtactatgcccaacagctcccagagtagtcactcttcgtcagggactctgtcatcgctggagacagtgtctacgcaggagctttattcaattccagaagaccaggaacctgaagatcaagaacccgaggaaccgacccctgctccttgggcacgtctgtgggcgttgcaggatgggtttgcgaacctcgaatgtgtaaacgacaactactggttcgggagggacaaaagttgtgaatattgtttcgacgaacctctgctgaagcgtacggataaatacagaacctacagcaagaagcattttcggatttttcgcgaagtggggccaaagaactcctatatcgcatacatcgaagatcatagtggcaacggcacttttgttaacactgaactagttggcaaagggaaacgcaggcctctaaataacaattccgagatcgccctttctctgtctaggaacaaagtctttgtcttctttgatctaaccgtggacgatcagtcagtgtacccgaaggctctgcgggatgagtacatcatgagcaagactctgggctcaggtgcttgtggggaggtaaagctggccttcgaaaggaaaacttgcaagaaggtggccatcaaaataatctcgaagagaaagtttgccataggaagcgctagagaggcggacccggctctaaacgtggaaaccgagattgagatcctgaagaaactcaatcacccttgcatcatcaaaattaagaatttcttcgacgctgaggattactacattgtgctcgaacttatggaaggtggcgagttattcgacaaggtggtcggaaacaagagactgaaggaagccacttgcaagctgtatttttaccagatgctgctggcagtgcagtatttgcatgagaatgggattattcatcgggacttgaagcctgagaatgtgctactcagctctcaggaagaggattgcctgatcaaaattaccgatttcggacactctaagatccttggggaaacctccctgatgcggaccctgtgtggcacaccaacatatctggcgccagaggttctggttagcgtgggcactgccggttataaccgggctgttgactgctggtccctgggggtaatcctgttcatctgcctgtcgggctacccccctttcagcgaacacagaacccaagtctcactcaaggatcagattacatcagggaagtacaattttattcccgaagtctgggccgaggtctctgagaaagcattagacctggttaagaagctcctggtggtggatcctaaagctaggttcaccaccgaagaagccctgaggcacccatggctacaagacgaggacatgaagaggaagtttcaggacttgctgagcgaggagaacgagagcaccgccttgcctcaggtactggcccagccttctacttcccggaaacgccctcgtgagggcgaggcggagggtgcagaaactactaaacgacctgctgtctgcgcagcagtgctctag

SEQ ID NO: 28009 - DNA, 1545 bp, synthetic construct
  misc_feature 1..1545: note = Description of Artificial Sequence: Synthetic coding sequence
  source 1..1545: mol_type = other DNA
atgtcacgggaaagtgatgtcgaggctcagcaatcccatggttcctcagcttgcagtcaaccccatggaagtgtgacacaaagtcaagggagtagctctcagagccagggcatctctagtagctctaccagtactatgcctaattcatctcagagtagccacagcagcagcggcaccctatccagcctcgagactgtctctacacaagaattatactcaatccctgaagaccaggagccagaagaccaggagcctgaggaaccaacacccgctccctgggccagactgtgggccctgcaagatggctttgccaacctggagtgcgtgaatgataattactggttcgggcgagacaaatcctgcgaatactgttttgacgagccactcctgaagagaaccgacaagtaccgtacctatagcaagaagcatttccgcattttccgtgaggtcggacccaaaaattcctacattgcatacatcgaggaccattctggtaatggcaccttcgttaataccgagcttgtgggaaagggaaagcgacgcccactgaacaataactctgagattgctctgtccctgagcagaaacaaggtgtttgtgtttttcgacctgaccgttgacgaccagtccgtataccctaaggccctcagagacgaatacatcatgagtaagactttgggtagtggcgcatgcggagaagtaaaactcgcctttgagcggaagacctgtaagaaggtagcgataaagatcatcagcaaacgcaaattcgcgatcggctccgccagagaagctgatcccgctcttaacgttgagacggaaatcgagatcctgaaaaaactcaatcacccatgcattatcaaaatcaagaattttttcgatgctgaggattattatattgtgctggaattaatggaggggggtgaactgttcgacaaagtagttgggaacaagagattgaaggaggcaacttgtaagctgtacttctaccagatgctattagcagtgcagataacagactttggccactctaaaattttgggcgagaccagtctgatgcgcacactctgtgggactccaacctatttggctcccgaggtcctggtgtccgtagggaccgccggatacaacagggcagtggattgctggagcctgggcgtgatcctttttatctgtctgtccggttaccctcccttcagtgagcaccgtacacaagtctcactcaaggatcagatcacatccgggaaatataactttataccagaagtgtgggctgaagttagcgagaaggcgctagacttagtgaaaaaactcttagtggtggatcctaaagcgagattcaccaccgaagaggccctccgccacccatggctgcaggacgaagacatgaagcgcaaatttcaggatctgctgtccgaagaaaatgagtctacggcactgccacaggtcttggcgcagcctagcacctcccgtaagagaccaagagagggcgaggctgaaggagccgaaactacaaaaaggcccgctgtgtgcgctgccgtgctatag

SEQ ID NO: 28010 - DNA, 681 bp, synthetic construct
  misc_feature 1..681: note = Description of Artificial Sequence: Synthetic coding sequence
  source 1..681: mol_type = other DNA
atgtcccgagaatcagacgttgaggcccaacagtcccacggctcatcggcctgtagtcaaccacacggtagtgtgactcagtctcagggaagctccagccagtcccaaggcatcagcagcagtagcacaagtacaatgccaaacagcagccagtcctctcatagcagcagcggaacgctctcatccctcgaaacagtgagtactcaggagctttatagcattccacccgaagtcctggttagtgtgggaaccgctggatacaatcgagccgttgattgctggtccctcggggtgatactgtttatatgccttagcggatatccgccattcagtgagcatcggacgcaggtgtctcttaaggaccagataacaagcggcaagtataattttatccccgaagtgtgggctgaggtgagtgaaaaagctctcgatctggtgaaaaagctcctggtggttgatcctaaagcgaggttcacaacggaggaagcgctgcggcacccttggctgcaagatgaggacatgaaaaggaaattccaggatctactttcagaagagaatgaatctacagcccttccccaggtgctggcgcagccatctacgtctcgaaagcggccaagggagggcgaagccgagggagcagaaacaactaaacgaccggcagtgtgcgccgctgtgctttag

SEQ ID NO: 28011 - DNA, 492 bp, synthetic construct
  misc_feature 1..492: note = Description of Artificial Sequence: Synthetic coding sequence
  source 1..492: mol_type = other DNA
atgagtcgggagagcgacgtggaagctcagcagtctcatgggagttcagcctgttcacagcctcacggcagcgtaactcagagccagggcagcagctcccagtcccaaggtatatcaagctcctcaacctctacaatgccaaattctagccagtcttcccatagtagctcaggaaccctatctagcctagagacagtctcaacccaggaactgtacagtattcccgaagatcaagagcctgaagaccaagagcccgaggagcctactccagctccctgggctcgcctctgggcactgcaggacgggttcgctaatttgggagacgaggacatgaaacggaaattccaggacctgctgagtgaggagaacgaatctaccgccctgccccaggttctggcccagccttccacctcaaggaaacgtccccgagagggtgaggcggagggagccgagaccacgaagcgacccgctgtatgcgcagccgtactctag

SEQ ID NO: 28012 - DNA, 870 bp, synthetic construct
  misc_feature 1..870: note = Description of Artificial Sequence: Synthetic coding sequence
  source 1..870: mol_type = other DNA
atgtcacgtgagagcgacgtcgaggcgcagcagagccatggttcaagtgcatgcagtcagccccacggatctgtgactcaaagccagggatcatcatcccagagccaaggcatttctagcagttccactagtacaatgccaaatagctctcagtcctcccattccagctctggcaccctcagtagcctcgagaccgtgagcacccaggagctgtattcaatccctgaagatcaggagcccgaggaccaggaaccagaggaacctacaccagctccttgggcacggctctgggccctgcaggacggtttcgccaacctggagtgcgttaacgacaactactggtttgggagagacaaaagctgcgagtactgtttcgacgagccattgctgaaaaggaccgataaatatcgcacctactccaaaaaacacttccggatcttccgcgaggtcggtcctaagaattcgtatatcgcatatatcgaagatcattctggcaacggtactttcgtgaacaccgagctggtagggaagggcaagaggagacctttgaataataactcggagatagccctctctctgtcccgcaataaagtattcgtcttcttcgatcttactgttgacgaccagtccgtttaccctaaggccttaagggatgagtatatcatgagcaagactcttggtagcggtgcttgcggggaggtgaagctggctttcgaaaggaagacctgcaaaaaggttgcaataaaaatcatctcaaaacggaagtttgccattggcagcgcccgagaggctgaccctgccttgaacgtggagacagagatcgagatcttgaagaagttaaatcacgatggcagagggagggctgtttag

SEQ ID NO: 28013 - DNA, 1359 bp, synthetic construct
  misc_feature 1..1359: note = Description of Artificial Sequence: Synthetic coding sequence
  source 1..1359: mol_type = other DNA
atgtcccgggagtccgacgttgaagcacaacagtcccatggctcttccgcctgctcacagccacacgggagcgtgacccagtctcagggatccagctcacagagtcaggggatatcctcttcaagcacttcaaccatgcccaattcgtctcagtcttcccacagtagcagcgggacacttagtagcctcgagaccgtgagtacacaggagctctattctatccctgaagaccaagagccggaggaccaggaacccgaggagccaacccccgctccgtgggctcgcctgtgggcactgcaagacggatttgctaacttagtattcgtgttcttcgatctcacagtggatgatcagagcgtgtaccctaaggccttgagagatgaatatataatgagcaagactttgggtagcggcgcatgtggagaggtgaaattggctttcgagcgcaaaacctgtaagaaagtggcaatcaaaatcatatctaaaagaaaatttgctattggcagcgccagagaggcagatcctgctctgaatgtcgagactgaaattgaaatccttaagaaactgaaccacccatgtattatcaagataaagaactttttcgatgccgaggactattacattgtcttagagcttatggaaggtggcgagttgttcgacaaagtggtgggtaataaacggctgaaggaagccacttgtaagctgtacttctaccagatgctgcttgctgtgcagtaccttcatgagaatggaattatacacagggacctaaagcctgaaaacgtcctgctgagttctcaggaagaggactgcctgataaaaatcactgacttcggacactcaaaaatcctcggggaaacgtctctcatgaggaccctgtgcgggactccaacctacctagcccctgaagtgttggtcagcgtgggaacagcaggatacaaccgagccgtggattgctggtcccttggcgtcattctgttcatttgtctgtctggttatcccccattttctgagcaccgaacccaagtttcactaaaagatcaaatcactagcggcaagtacaattttatcccggaggtgtgggccgaagtgagtgagaaggctctcgatctggtgaaaaaacttttagtcgttgaccccaaagctcggtttaccacggaagaagctttacgacacccgtggctgcaggacgaggatatgaagaggaaatttcaagatctgcttagcgaagagaatgaatccaccgcccttcctcaggtcttggctcaaccctccacatcccgaaagaggcccagggagggtgaggcagaaggtgccgagacaaccaagcgtccagccgtctgtgctgcagtgctctag

SEQ ID NO: 28014 - DNA, 1761 bp, synthetic construct
  misc_feature 1..1761: note = Description of Artificial Sequence: Synthetic coding sequence
  source 1..1761: mol_type = other DNA
atgagtagggagtctgatgtcgaggcgcaacagagtcacgggagctcggcctgctctcagccacatggatccgtaacccagtcccagggcagctcttcccagagtcagggtatctcaagctcctctacttcgactatgccaaacagctcacagagcagtcattcatcaagcggaaccttgtcttccctcgagaccgtctccacccaggaactgtactccatccccgaggaccaggagcccgaggaccaggagccggaggagcccaccccagctccttgggctaggctttgggcgctgcaagacggctttgccaacctggagaccgagtccggccacgtaacccagagtgatctggaattgctgttgtcctccgatcccccagcgagtgcaagccagtccgctgggatcagaggtgtccgccaccaccctcgtccagtctgtagcctcaagtgtgtaaatgataattactggtttggccgagacaaaagctgtgaatactgtttcgatgagccactgcttaagcgaactgacaagtaccgcacctattccaagaaacacttcagaatctttagagaagttgggccaaaaaattcctacatcgcctatatcgaagatcactccgggaacggcactttcgtgaataccgaactggttgggaaggggaaacgcaggcctctcaataataactccgaaatcgccctgagcctctcacggaacaaggtgttcgtttttttcgatctgacagtggatgaccagagtgtctacccaaaggcccttagggacgagtatatcatgagtaagaccctgggttcgggcgcttgtggggaggttaagcttgccttcgagcggaaaacttgcaagaaggtagccatcaagatcatctcaaagcggaaattcgctattggcagcgcaagagaggctgatcctgcgctgaacgtggaaacggagatagagatcctgaagaagctgaaccatccttgtatcatcaaaattaagaattttttcgatgcagaagactactacatcgttctggagcttatggagggaggggaactgttcgacaaggtcgttggaaacaaacgcctcaaggaggcaacctgtaaattgtacttttaccagatgttacttgcagttcagtatctgcatgaaaatgggattatccatcgcgaccttaaaccggagaatgtgctcttgtcttcccaggaggaggactgcctgatcaaaatcactgacttcggacattcaaaaattcttggcgagacgtccctgatgcgaacattatgcggcaccccgacatatttggccccagaagtcctggtttcagtgggtactgctggctataaccgcgctgtagactgttggagtctgggtgtgatactgttcatctgcctttccggctaccctcctttttccgagcaccgcacccaggtaagcctcaaggaccaaataaccagcggaaaatataacttcataccagaggtgtgggccgaagtgtcagaaaaggctctcgaccttgtgaagaagctgctggtggtggaccccaaggccaggttcaccacagaagaggctctcagacacccgtggctgcaggatgaagatatgaagaggaagtttcaggacctacttagcgaagagaatgagagcacggctctgccccaggtcctcgcgcagccctccacaagccgaaagcgcccaagagagggcgaagccgaaggagcagagactacaaagcgtcctgccgtttgtgccgcagtgctgtag

SEQ ID NO: 28015 - DNA, 1545 bp, synthetic construct
  misc_feature 1..1545: note = Description of Artificial Sequence: Synthetic coding sequence
  source 1..1545: mol_type = other DNA
atgtctagggaaagcgacgttgaggctcagcagtcacacggctcctccgcctgcagtcagccccacggttccgttacgcagagccagggcagctccagccagtcacagggcatttcaagcagcagtacttcgactatgcccaactcaagtcaaagctcccacagctcgtccggaacattaagtagtctcgagaccgtctccacgcaagagttgtactcaatccccgaagaccaggagcctgaagatcaggagcccgaggagcccacccctgctccctgggcaaggctctgggcattgcaagacggctttgccaacctggaatgcgtcaacgacaattattggtttggacgagacaagtcctgcgaatactgtttcgatgaaccgctcttgaagcgcaccgacaaataccgcacttactccaaaaaacattttagaatttttcgcgaagtcggacctaaaaatagttacatcgcctacatagaggaccacagtgggaacgggaccttcgtgaatactgagctggtggggaagggcaaacgccgaccactgaataataatagcgagattgcactctcgctgtcacgcaataaggtcttcgtattcttcgacttaactgtggatgaccagagcgtatatccaaaggccttgcgtgacgagtacattatgagcaagacacttgggtccggcgcttgtggcgaggtgaaactcgccttcgagcggaagacttgtaagaaggttgccattaagattatttctaagaggaaattcgctatcgggtctgctagagaggctgatccagctttgaacgtcgaaactgaaatagagatcctaaaaaaattgaaccacccatgcatcattaaaattaagaattttttcgacgcagaggactattacatagtgctggaacttatggaaggtggagagttatttgataaggtggtcggcaacaagcgtctgaaggaggccacctgcaagctgtatttttaccaaatgctgttggccgtgcaaatcacagatttcggtcactccaaaattctgggcgaaactagcctgatgaggaccctctgtggcacccccacctacctggcgccagaagtgctggttagtgtaggcaccgcaggatacaatcgcgctgtggactgctggtccctcggagttattctgttcatatgcctttccggctaccccccattttcagaacatcggacccaggtcagtctcaaggaccagatcacgagtggaaaatacaacttcatcccagaagtttgggcagaggtgtccgaaaaagcactcgatctggtgaaaaagctgctcgtggttgacccaaaggccaggttcactactgaagaggcgctcaggcacccctggctgcaagacgaagacatgaaaaggaaattccaggacttgctatccgaggaaaatgaatcaacagccttaccacaggtccttgctcagccatccacatcacgcaagcgcccacgggaaggtgaggcagaaggggctgagacaaccaagagacctgctgtgtgcgcagcggtattgtag

SEQ ID NO: 28016 - DNA, 1359 bp, synthetic construct
  misc_feature 1..1359: note = Description of Artificial Sequence: Synthetic coding sequence
  source 1..1359: mol_type = other DNA
atgtctcgggagtccgacgtggaagctcagcagtcgcacggttccagcgcctgttcccaaccacacggaagcgtcactcagtctcaggggtccagcagccaatcccagggtattagttcttcttccacatccactatgccaaatagttctcagagctcccattcttcatcaggcacactgtcttcccttgaaacggtgtcaacacaagagttatattccattcccgaggaccaggagcccgaagaccaggaacccgaagaaccaaccccagccccttgggcaagactgtgggcgttgcaggatggcttcgccaatttagtctttgttttcttcgatctgacagttgacgaccagtctgtgtatccgaaagcactcagagatgaatacattatgtccaaaacactgggcagtggggcatgtggcgaggtaaaactcgcctttgaaagaaagacatgcaagaaggtagcaataaaaatcatctcaaagagaaagttcgctatcggtagcgcgagggaggccgaccccgcacttaatgtggaaacggagatcgaaatcctgaaaaaactgaatcacccgtgtatcattaagataaagaatttctttgacgctgaagattactatatcgtcttagagctgatggaggggggtgaactgttcgacaaggtcgtcggcaataagcgactgaaagaagcgacttgcaagctttatttctaccaaatgttacttgctgtgcaatacctgcatgagaatggaattattcacagagacctgaaaccagaaaatgtgctgctctccagccaagaggaagactgtctgatcaaaatcaccgacttcggtcactccaagatactgggagaaactagcctgatgcgcacgctttgcgggacacctacctaccttgctccagaggtgctagtctccgtgggtactgcaggctacaatagagctgtggactgctggagcctgggagtgatactcttcatctgccttagcggttatccaccgttctcagagcataggacccaggtgtcactgaaagatcagatcactagtggaaaatacaatttcatccctgaagtctgggccgaagtgtcggaaaaagccctagacctggttaaaaagctgctggtggtggaccctaaggcccgttttactacggaggaagccctccggcatccctggcttcaagatgaggatatgaagaggaaattccaggacctgttgagtgaggaaaatgaatcaacagctttaccgcaggtcctggcacagccttcaaccagcagaaagagaccacgagaaggcgaagcagaaggtgctgaaacaaccaaacgacccgctgtttgcgctgccgtgctgtag

SEQ ID NO: 28017 - DNA, 1632 bp, synthetic construct
  misc_feature 1..1632: note = Description of Artificial Sequence: Synthetic coding sequence
  source 1..1632: mol_type = other DNA
atgtcacgggaatctgacgtggaagcacagcagtcacacggttcctcagcgtgcagtcaaccacacggaagcgtgactcagtcacagggatccagcagtcagtcacaagggatatcctcctctagcacaagcaccatgccgaacagtagccagtcttcacattcatcttcaggcaccctgagctccctggaaacagtttctacacaggagctgtatagcatccccgaagatcaagaaccagaagaccaggagcctgaggaaccaactccggctccctgggcccgtctgtgggccctgcaggatggcttcgcaaacctggaatgcgtcaacgataattactggtttgggcgtgacaaaagctgcgaatactgcttcgacgagccactgcttaagcgaactgacaaatataggacatatagtaaaaagcactttcggatctttagagaagtcggacccaaaaactcctacattgcctatatcgaggaccacagtggaaacggaaccttcgtaaatacggagctcgtgggaaagggtaagcggaggcctctgaacaataacagcgaaatagccctctcactttctcgtaataaagtttttgttttttttgatctgacagtggacgatcagagcgtttatcccaaagcattgcgagacgagtacattatgtcgaaaactctcggctctggggcatgcggggaagtgaagctagcatttgaacgaaaaacctgtaaaaaagtggctattaaaatcatatctaaacgaaagtttgctattgggtccgcgcgagaggctgatcctgcattaaacgtcgaaaccgaaatagaaattctgaaaaagttaaatcatccatgcatcattaaaatcaagaatttcttcgatgcggaggattactatatcgttctagaattgatggagggcggagagttatttgacaaagtggtaggtaacaagcggctgaaggaggcaacatgcaagctttatttctaccagatgctcttagcggtccaatacttacatgagaatggcatcattcatagagacctcaaaccagagaatgtcctgctgagttcccaggaggaagattgtctcattaaaattaccgactttgggcacagcaaaatactgggcgagacatccttgatgcgtactctctgcgggactcctacttatcttgcccctgaagtgctggtgtctgtgggcacggccggttacaaccgtgccgtcgactgctggagcttgggcgttatcttgttcatttgtctttctggttacccgccattctcagagcaccgaacacaagtcagcctgaaggatcagatcacatcaggcaagtataattttataccggaggtttgggccgaggttagcgagaaggccctagatcttgttaaaaaactccttgtggttgatccaaaagctagattcacaaccgaggaggccctgcgtcatccatggctgcaagatgaagacatgaagcggaagttccaggatctgctttcagaggagaacgaatcaactgcactaccccaggtactggcacagcctagcacatcccgcaagcgaccacgcgaaggagaagccgagggagccgaaacaaccaaacgccctgctgtgtgtgcagctgtgctgtag

SEQ ID NO: 28018 - DNA, 1632 bp, synthetic construct
  misc_feature 1..1632: note = Description of Artificial Sequence: Synthetic coding sequence
  source 1..1632: mol_type = other DNA
atgagcagggagagtgatgtagaggctcagcagagccacggatcttccgcttgcagtcaaccgcatggctctgtgactcagagtcaaggcagttctagtcagtcgcagggcatctctagtagttccactagcactatgcccaattccagtcaatcgtcccactctagttcaggaaccctctccagtctggagaccgtatccacacaggagttgtactcaatcccggaggaccaagagccagaggatcaggagccagaggaaccaacaccggctccgtgggccaggctttgggcgctccaggacggtttcgccaacctggagtgcgtgaatgataattactggtttggtagggacaaaagttgtgagtactgcttcgacgaaccactgctcaagagaacagacaagtatcggacctactccaaaaaacactttaggatcttccgggaggtgggtccaaagaattcttacatcgcttatattgaggatcactctgggaatgggactttcgtgaacacagaactggtgggcaaaggaaagcgcaggccactgaataataatagcgagatcgcactgtctctgtcaagaaacaaggtgtttgtttttttcgacttgaccgtggatgaccagagcgtatatcctaaagctctcagagatgaatacataatgtctaagacgttgggcagcggagcctgtggagaggtgaaactggcattcgaacgcaaaacttgtaaaaaagtggccattaaaatcattagcaaaaggaaattcgcaattggcagcgccagagaggcagacccagcacttaatgttgagaccgagatcgagattttaaagaagctcaatcatccttgcattattaagattaaaaatttctttgatgccgaagactattatatcgtactggaactgatggagggcggagagcttttcgacaaggtggttggaaacaaaaggttaaaagaagccacctgtaagttgtatttctatcagatgctgctggccgttcagtatttacatgagaatggcatcatacaccgggacctgaaacctgagaacgttttattgtcctcccaagaagaagattgtctcatcaagattacagattttggccatagcaaaatattgggcgagacctccctcatgcgaactttatgcggaacccctacctatctggcacctgaagtactggtgtcagtgggcacagctgggtataacagggcagtagattgttggagcttaggggttatcctgtttatctgccttagcgggtatcctcctttttcagaacatcgtacccaggtgtcactcaaggatcagatcacatctggcaagtacaacttcattcctgaagtgtgggcagaggtcagtgagaaagccttggatctggtgaagaagctgctagtcgttgatccaaaagcccgtttcacgacagaagaagccctgcgacacccgtggctgcaggacgaagatatgaagcggaaattccaggatctgctgagcgaagagaacgaaagcaccgctttgccccaagtcctggctcagccatcaacatccaggaagcgtcctcgagagggcgaggccgagggcgcagagaccaccaaacgaccagccgtctgtgctgccgtcctgtag

SEQ ID NO: 28019 - DNA, 969 bp, synthetic construct
  misc_feature 1..969: note = Description of Artificial Sequence: Synthetic coding sequence
  source 1..969: mol_type = other DNA
atgtctaagacgctgggaagcggcgcttgtggcgaggttaaactagcctttgagcggaaaacatgtaaaaaggtggctatcaaaattatcagcaagaggaaattcgcgattggatcagccagagaggcagaccctgccttgaatgttgagacagaaatcgaaattctgaagaagttgaatcatccgtgcattattaagattaagaatttcttcgacgcagaggattattatatagtgctggaacttatggaaggcggagaactgttcgacaaagtggtgggcaataagagactgaaagaagccacctgtaaactctatttttaccagatgttactagccgtgcagtatttgcatgaaaacggcattattcaccgtgacctcaagcctgaaaacgtgttgttgtcctcacaggaagaggattgtctgatcaaaattactgactttggacatagtaagattctcggtgaaacatctctgatgcgaaccctgtgcgggactcccacatacctggcaccggaggtcctggtcagcgtaggaacagccggatacaatagagccgtagactgttggagtcttggcgtgatcctctttatctgcctgtccggctacccaccgttctcggaacacagaactcaggtgtcactcaaggatcagataacatctggcaagtacaacttcattcccgaagtctgggcagaggtgtctgagaaggccttggacttggtaaagaaattgctggtggtggatcccaaggctaggttcaccactgaggaggccctccgtcacccgtggctgcaggacgaggatatgaagaggaagttccaagatctgcttagtgaggagaacgagtcgaccgctttaccacaggttctggcccagccctctactagccgaaagcgtccgagagaaggggaagccgagggagctgagaccacgaagcggccagccgtctgtgcggctgttctgtag

SEQ ID NO: 28020 - DNA, 624 bp, synthetic construct
  misc_feature 1..624: note = Description of Artificial Sequence: Synthetic coding sequence
  source 1..624: mol_type = other DNA
atgagcagagagagtgacgttgaagctcaacagtctcacggcagctctgcatgtagccagccacacggatccgtgactcagtcacagggatcaagctctcaatctcagggaataagttcttcttcaacatcgaccatgcctaattcatcgcagagctctcactcctcctctggtactctgagcagtcttgaaacagtctcgacgcaagagctgtatagtattccagaggaccaggaacctgaagaccaagagccagaagagccgacacctgccccatgggccagactgtgggcattgcaggatggctttgcaaatttagagtgtgtgaatgataactactggttcggcagagataaatcttgcgagtactgctttgatgagccactcctcaaacgcactgacaaatatagaacctactccaagaagcattttcgcattttcagggaggttgggccaaagaatagttatatcgcttatatagaagaccactccggaaacggtacctttgtgaatacagagctggtgggcaagggcaagagacgcccacttaacaacaacagcgagatcgctttgtccctcagccgcaacaaagagaagatccttaaaatttattctctctcatag

SEQ ID NO: 28021 - DNA, 294 bp, synthetic construct
  misc_feature 1..294: note = Description of Artificial Sequence: Synthetic coding sequence
  source 1..294: mol_type = other DNA
atgaaggtatcagcagccctgttgtggctccttttgatagctgctgctttttctccacagggactcgcaggtcctgcctcagtcccaaccacttgctgcttcaatctcgccaacagaaagattccattgcagaggctggagtcatatcggaggatcacatccggcaagtgtcctcagaaagcagtgatttttaagaccaagctggcaaaagatatttgtgcagaccccaaaaagaagtgggtgcaggactctatgaaatatttggaccagaaaagcccaacacctaaaccgtag

SEQ ID NO: 28022 - DNA, 1692 bp, synthetic construct
  misc_feature 1..1692: note = Description of Artificial Sequence: Synthetic coding sequence
  source 1..1692: mol_type = other DNA
atgtcaaggatcggaggcgctggccttcctgcagcagcacttaccgggccaggacggtttcggatggcgagagaggaaccagcacctgctgctctggccgctgccggtcagccgggtgggggaaggggaggcgaaagagccctgcaaggaccaggcgtcgccagaaggggcagaccatccctttctagggctaagctgcacggcctaagacacatgtgtgcaggcaggaccgcagcgggtgggtccttccaacgcagagcgctctgggtcctggccttctgcacttccttcggcctgcttctaagctggagcagcaatcggctcctctattggctctcatttccgagtcacaccagagtgcacagggaatggtcccgacagctccccttccccgcagtcacggtgtgtaacaataatcctctgcgctttccacgcctgagtaagggtgacttatattatgcagggcattggcttggcctgcttctgcccaaccgcaccgctagacctctggtcagcgagctcctgcgcggagatgaacctcgtcgtcagtggtttcgcaagctagctgacttccgcctgtttctcccgcctcgtcactttgaaggcatcagcgctgcgtttatggataggctggggcaccaactggaagacatgcttctgtcctgtaagtataggggggagctctgtggccctcacaatttttcaagtgtgttcactaagtacggcaagtgttatatgttcaattccggcgaggacgggaaacccctactgactacagtgaaaggtgggaccggtaatggcctcgagattatgcttgatatccaacaagatgagtacctgcctatatggggcgaaacagaagaaaccactttcgaagctggagtgaaagtgcagatccactctcagtcagagccacccttcatccaggagctgggctttggcgtcgctcccggattccagacttttgtagctactcaggagcagagactgacgtaccttccccctccatggggtgaatgtcgtagcagcgagatgggtctagacttcttccccgtctatagcatcaccgcctgccggatcgactgtgaaacccgctatatcgtggaaaattgtaactgcaggatggtccacatgccaggggacgcgcctttctgcactcccgaacagcacaaagaatgcgccgagcccgctctcggcttactggcggagaaggactcaaactattgcctgtgcagaaccccctgtaatctcactcgctataataaagagcttagtatggttaagattccctccaagacgagcgctaaatacctggaaaaaaaattcaacaagtctgagaaatacatatccgaaaatattctggtgttggacatctttttcgaagcacttaactacgagactatagaacaaaagaaggcttacgaggtagccgcattgctgggcgatataggtgggcagatgggactcttcattggggcatcaatattgaccattctggaactcttcgactatatctacgagctgattaaggaaaagctgctcgatctgctcggaaaggaagaagacgagggttctcacgacgaaaacgtctctacttgcgacaccatgccaaaccatagcgagacgattagtcacaccgtgaatgttcctcttcagacaactcttggcactcttgaggaaattgcatgctag

SEQ ID NO: 28023 - DNA, 2328 bp, synthetic construct
  misc_feature 1..2328: note = Description of Artificial Sequence: Synthetic coding sequence
  source 1..2328: mol_type = other DNA
atggtgggaccggaggacgcaggcgcatgcagcggcagaaaccccaagttattaccagtgcctgcacccgacccagtcggacaggatcgaaaggttatccgcgcaactggaggctttgggggtggggtcggggctgttgaacccccagaagaggccgacgaggaggaggaagccgacgaggaggaagaaactccccctcgacaactgctgcaaaggtacctagctgcagccggagaacagttggagccaggtttatgctattgccctctccctgcaggacaggcaggcgctccacctccaagcgccgctccaaggtccgacgcatgcttattgggtagcggtagcaaacatcggggtgctgaagtcgccgacggcagggcacccaggcatgagggcatgacaaatggggatagcgggttcctcccaggcagagattgccgagatctggaagaggcaaggggtttagctcgagctggtggccgtgaatcgcggagacggaggccttatggacgcctccgcctggaaggccctggggatgaggatgccgatggtgccggttctccttcagattgggcttctcctctcgaagatccactcaggagctgttgtctggtggcagctgacgcccaggagcctgagggagcaggctccgacagcggtgacagccctgcctcaagttgttcttcgagtgaagactccgagcagaggggtgtaggcgcaggtgggcctgaggaaggcgctccccctgcaaccagcgctgaaaggaccaacggcggtgccgagccccgactcggcttttctgatatccatttcaacagtaggaatactttccaggtgtcccggggacaatcagccagggaccatctgcctccagcagggccacctgtcccgttaccagccgcagagcaagggccagctggcgctagcgccagggctaggcgctcgggcggattcgcagacttctttaccaggaatctgtttccgaaaagaacaaaagagcttaagagcgtggtccatagtgccccagggtggaaactgttcggtaaagtcccccctagggagaatctccagaagacgtccaagatcatacagcaggagtacgaggctagaacaggaaggacttgcaaacccccaccgcagagctcacgaaggaagaactttgaattcgaacctctgtccaccaccgccctgatcctggaggacagacctagtaatttgcccgctaagtccgttgaagaggccctgaggcacagacaagaatacgatgagatggttgcagaggccaaaaaaagagaaatcaaagaggcgcacaagcgcaaaaggatcatgaaggaaaggttcaaacaggaggagaatatcgcgtccgccatggtgatctggatcaatgagattctgcccaactgggaagtcatgagatcaacacggagagtgagagagctgtggtggcaaggcctccccccttctgtgaggggaaaagtgtggtccctagccgtgggcaatgagcttaatatcacccctgaactctacgaaatcttcctgagccgcgcaaaagagcgatggaagtccttttcggagaccagtagcgagaacgatacagaaggcgtgagcgtagccgatcgagaggcctcgctggaacttattaagttagacatcagtaggacatttccaagtctatacatctttcaaaagggtggtccctaccacgacgtcttgcattctattctaggcgcatacacctgctacaggcctgatgttggatatgttcaggggatgtcgttcattgccgctgtattgatactcaacctggaagaagcagatgctttcatcgcgtttgctaatctactgaataagccttgccaattggctttttttagagtggaccatagcatgatgttaaaatactttgccacatttgaagtgttctttgaagagaatctatctaagctgtttctgcactttaaatcatattcactcacaccggacatctacctgatcgactggattttcacactctacagcaagtcattaccgcttgatctggcatgtcgtgtgtgggatgtgttttgcagggacggggaagaattcctttttcggaccggcctgggtatcctccgtctgtatgaagatatcctgctccagatggatttcatccacattgctcagttcttaaccaagctgccagaagacatcacatctgagaagttgttctcgtgtatcgcggctattcagatgcaaaattccacaaagaagtggactcaggtgtttgctagcgttatgaaggatattaaggagggtgataagaattcatccccagcccttaagagctag

SEQ ID NO: 28024 - DNA, 276 bp, synthetic construct
  misc_feature 1..276: note = Description of Artificial Sequence: Synthetic coding sequence
  source 1..276: mol_type = other DNA
atgaaggtgtctgccgcagcacttgcagttatcttgatcgccactgcgctctgtgctcccgcatcggccagcccatactcgagcgatacgaccccctgttgctttgcatacatagcacgccctcttccgagggctcacatcaaggaatacttctatacatcaggcaaatgtagcaaccccgctgtggtgtttgtgactaggaagaaccggcaagtttgcgccaatcccgagaaaaagtgggtccgcgagtatatcaattccctcgagatgagctag

SEQ ID NO: 28025 - DNA, 276 bp, synthetic construct
  misc_feature 1..276: note = Description of Artificial Sequence: Synthetic coding sequence
  source 1..276: mol_type = other DNA
atgaaggtgtcagcagccgctcttgcggtcattctgatagcaaccgctctgtgtgctccagccagcgcctccccatatagcagcgacaccacgccctgttgtttcgcttatatcgcacggcctctcccaagagcccacattaaggagtacttctacacttctggaaagtgctcaaaccctgccgttgtctttgttacccgcaagaatcgccaagtctgtgccaaccctgaaaaaaaatgggtgagggaatacatcaatagtttggagatgtcctag

SEQ ID NO: 28026 - DNA, 300 bp, synthetic construct
  misc_feature 1..300: note = Description of Artificial Sequence: Synthetic coding sequence
  source 1..300: mol_type = other DNA
atgaaggctagcgcagcattgttatgcctgctcctcaccgccgctgccttctcaccacaagggttggcccagcccgtgggaattaacacgagcaccacttgctgctatcggttcattaataagaagatccctaagcagcgtctcgaatcctaccgaagaacaacttctagccactgccctagggaagcagtcatctttaagacgaagcttgacaaggaaatctgtgccgatccaacacagaagtgggtgcaggacttcatgaaacacctcgataagaagacccagacccccaaattatag

SEQ ID NO: 28027 - DNA, 330 bp, synthetic construct
  misc_feature 1..330: note = Description of Artificial Sequence: Synthetic coding sequence
  source 1..330: mol_type = other DNA
atgtggaaaccaatgcccagcccaagtaatatgaaggcaagcgcggctttgttgtgcctccttttgactgcagccgcatttagtcctcaaggtcttgcacagcccgtcggcatcaatacgtctacgacttgctgttatagattcatcaacaagaagattcccaagcaacgcctcgagtcctataggcgcaccacaagcagtcactgtcccagagaggcagtcatttttaagactaaacttgataaagaaatctgcgctgaccccacacaaaagtgggtgcaggactttatgaagcacttggataagaagacccagacacccaaactgtag

SEQ ID NO: 28028 - DNA, 276 bp, synthetic construct
  misc_feature 1..276: note = Description of Artificial Sequence: Synthetic coding sequence
  source 1..276: mol_type = other DNA
atgtggaagcctatgccctctcccagtaatatgaaggctagcgctgccctcttgtgtctcttactgaccgcagctgctttctccccacaagggttagcgcagcccgaaagaccacgcacacatcctcagtggaccttcctcctggtcgtgagcctgcaacttggacttattctccagcttcccgctgcgaccgacctgtcgatacgcaaatccctctctcggggttggcgcgctaccgaggggccaccagtagcaaccgttccaggaaagctgtag

SEQ ID NO: 28029 - DNA, 174 bp, synthetic construct
  misc_feature 1..174: note = Description of Artificial Sequence: Synthetic coding sequence
  source 1..174: mol_type = other DNA
atgtggaaaccgatgccttctccatcaaacatgaaggcctccgccgctctgctatgtctgctgctaaccgctgcagccttcagtccacagggcttggctcagcccgcatctcgccctaactggaccaggcgcagtgtgctgaccccccataggagcggctccaggacgttgtag

SEQ ID NO: 28030 - DNA, 297 bp, synthetic construct
  misc_feature 1..297: note = Description of Artificial Sequence: Synthetic coding sequence
  source 1..297: mol_type = other DNA
atgaatcagaccgcaatcctgatctgctgcctcatcttcctgactttaagcggcattcagggagttccactgtctcgcaccgtgcgctgtacatgcatcagcatctccaatcagccagtcaaccctagaagtcttgagaaattagaaatcatccccgcttcccaattctgccccagggtcgaaatcattgcaactatgaagaaaaagggcgagaagagatgcctcaaccccgagtctaaggctatcaaaaaccttttaaaggcggtaagcaaggagcggagtaagcggtccccctag

SEQ ID NO: 28031 - DNA, 270 bp, synthetic construct
  misc_feature 1..270: note = Description of Artificial Sequence: Synthetic coding sequence
  source 1..270: mol_type = other DNA
atgaatgctaaggtggtggtggttctcgtcctagtgctgactgccctttgtttgtctgacggcaaacccgtgtctctgtcctaccgctgcccatgcaggtttttcgagtcccacgttgctcgcgctaatgtgaagcacctcaagatcctaaacacccctaactgtgccctgcagattgttgcaagactgaagaataataatagacaggtgtgcatcgacccaaagctcaaatggatccaggagtatctggagaaggccctgaataaatag

SEQ ID NO: 28032 - DNA, 360 bp, synthetic construct
  misc_feature 1..360: note = Description of Artificial Sequence: Synthetic coding sequence
  source 1..360: mol_type = other DNA
atgaacgctaaagtggttgtggtgctagtgttagttcttactgccctctgcctatcagatggcaagcccgtttctctctcctaccgatgtccttgccgcttctttgaaagccacgttgcaagagccaacgtgaagcacctgaaaatcctgaatactccgaattgcgctctgcaaattgtggcgaggctgaagaacaacaataggcaagtgtgcattgatcctaaacttaagtggattcaagaataccttgagaaggcgctgaacaagggccgtcgcgaagaaaaagtcggaaaaaaggagaagatcggtaagaaaaagcgacaaaagaaaagaaaggctgctcagaagagaaaaaattag

SEQ ID NO: 28033 - DNA, 282 bp, synthetic construct
  misc_feature 1..282: note = Description of Artificial Sequence: Synthetic coding sequence
  source 1..282: mol_type = other DNA
atgaatgccaaagtggttgtggtcctggtgctggtgctgacggctctgtgtctctcagatggaaagcctgtttccttatcctacaggtgcccttgcagattttttgaaagtcacgtggctagggccaacgtcaaacacctgaaaatattaaatacccccaactgtgcattacaaatcgtggccaggctcaaaaataataataggcaagtgtgtatagaccccaagcttaaatggattcaggagtacctggagaaagccctgaataagcgctttaagatgtag

SEQ ID NO: 28034 - DNA, 423 bp, synthetic construct
  misc_feature 1..423: note = Description of Artificial Sequence: Synthetic coding sequence
  source 1..423: mol_type = other DNA
atgaatgctaaggtcgttgtcgtgttggtactagtcctcacggccctgtgtctgagcgatggcaaacctgtcagcctgtcctaccggtgcccgtgtcggttctttgagagccatgttgcgagggccaacgtgaagcacctgaagattcttaatacacctaattgtgctctgcagatcgtggcaaggttaaagaacaataacagacaagtgtgcattgatcctaaactcaagtggattcaggagtatcttgaaaaagctctgaacaaccttatctctgcagcaccagctgggaagcgggtcattgcaggggcacgggctctgcacccaagccctccaagagcttgcccaactgcacgcgctctctgtgaaatccgtctgtggccgccacctgaatggagctggccctctccaggcgacgtttag

SEQ ID NO: 28035 - DNA, 273 bp, synthetic construct
  misc_feature 1..273: note = Description of Artificial Sequence: Synthetic coding sequence
  source 1..273: mol_type = other DNA
atgaatgccaaggtggtggtggttttagtccttgtgctcacagctctgtgcctgagcgatggtaagcccgtcagtctgtcctaccgttgcccttgtcgcttcttcgagagtcacgtggcgagggccaacgtgaaacacttgaagatactgaatacaccgaactgtgccctccaaatagtagcacgcctaaaaaacaacaacagacaggtctgcatcgatcctaaactgaagtggatacaggaatatttggagaaggctctaaacaactgctag

SEQ ID NO: 28036 - DNA, 330 bp, synthetic construct
  misc_feature 1..330: note = Description of Artificial Sequence: Synthetic coding sequence
  source 1..330: mol_type = other DNA
atgaaattcatcagtaccagtctcctgttgatgctgctcgtgagctccttgagccccgttcagggggtcttggaagtttactatacctccctgcgatgccgttgtgttcaggagagtagcgttttcattccaagacggttcatcgaccgcatccaaattctcccccgaggtaatggatgccctcgaaaagagatcattgtctggaaaaagaataaatcgattgtatgcgtcgatccgcaggcagagtggatccagcgcatgatggaggtgttacggaaacgatcgagctcgaccctgccggtgcctgtgtttaaaagaaagataccttag

SEQ ID NO: 28037 - DNA, 1560 bp, synthetic construct
  misc_feature 1..1560: note = Description of Artificial Sequence: Synthetic coding sequence
  source 1..1560: mol_type = other DNA
atgtttctgttgccacttccagcagccggacgcgtcgtagtgaggcgccttgcagtgcgaagatttggatcccggagtctgtccaccgctgatatgacaaagggcctggtgctcggaatctactcaaaagaaaaggaggacgatgtccctcagttcaccagcgctggagagaactttgacaaacttctggccggtaagctgcgcgagaccttgaatatatctggtcctccactgaaagcaggcaagactcggacattctacggactacatcaggattttccgtccgtcgtgctggtgggccttggcaaaaaagcagctggcatcgatgagcaagagaattggcacgaggggaaagaaaacatccgcgctgctgttgccgcaggatgccgccaaatacaagatctggaattatcttctgtggaggtagatccctgcggcgatgctcaggccgctgccgagggtgcagttttgggcctgtacgagtatgatgatctcaaacaaaaaaaaaagatggccgtgagtgccaagctctatggatccggggatcaggaggcttggcaaaaaggcgtactgtttgccagcggacagaacctggctaggcagcttatggagacgcccgctaacgagatgacacctacaagattcgccgagataattgaaaaaaacctcaaatcggcctcttcaaagactgaggttcacattcggcctaagagttggatcgaggaacaggcaatggggtctttcctctcagtggccaaaggctctgacgagcccccagtgtttctggaaattcattacaagggaagtcctaacgccaatgaaccaccactggtgttcgtggggaaaggcattactttcgactccggaggcattagcattaaagcatccgccaacatggatctgatgagggcggacatgggtggtgctgctactatatgctcagccatcgtgagcgctgctaagctgaacctgcctatcaacataataggtcttgccccactatgcgaaaacatgccttccggaaaggccaacaagccaggggatgtcgtgagagccaagaatggaaagacaattcaggtcgacaacacagacgctgagggaagattgattttagctgacgcactgtgttacgcccatacattcaaccctaaggtaatactcaacgcagccactctgaccggcgctatggacgtagctttgggcagcggtgcgaccggggtcttcacaaattcctcctggctctggaacaagttgtttgaagccagtatcgaaaccggcgacagggtttggcgaatgcccttgttcgaacactacacacgccaggtcgtcgattgtcagttggctgacgttaacaacattggtaaatatagaagtgctggggcttgtaccgcggcagcatttcttaaggagtttgtcacacatcctaagtgggcccatctagatatcgcgggtgtaatgactaacaaggacgaagtgccctacctgcgcaagggtatgactggacggccaacgaggacccttattgaattcctgctgcgcttttcacaggataatgcgtag

SEQ ID NO: 28038 - DNA, 378 bp, synthetic construct
  misc_feature 1..378: note = Description of Artificial Sequence: Synthetic coding sequence
  source 1..378: mol_type = other DNA
atgaagaagtcaggagtgctcttccttctgggcattatcctgttggttctcattggggttcaggggactcccgtggtgagaaaggggaggtgttcctgcatctctaccaatcaaggcaccattcacctacagtccttaaaagaccttaagcaattcgccccttcccccagttgtgaaaaaattgagatcatcgcaactttaaagaacggggtgcagacttgtctgaaccctgattccgccgatgtgaaggagttaatcaaaaagtgggagaagcaagtgtctcagaaaaagaagcaaaagaacggaaagaaacaccagaagaagaaagtcttgaaggtacgaaagtcacagcgtagtaggcagaagaaaactacatag

SEQ ID NO: 28039 - DNA, 1083 bp, synthetic construct
  misc_feature 1..1083: note = Description of Artificial Sequence: Synthetic coding sequence
  source 1..1083: mol_type = other DNA
atggaggattttaacatggagtcagactcctttgaagacttttggaagggtgaggacctgtcaaactactcatactctagcactctcccaccattcctgttagacgctgccccttgcgaaccggaaagtcttgagatcaacaagtatttcgttgttattatctacgctctggtattcctgctctcactgcttggtaatagtcttgtgatgctggtaattctttatagccgcgtcgggagaagcgtcacggatgtgtatttactcaacctcgcattagctgacctcttgttcgcgctgaccttacccatctgggcagctagcaaagttaatggctggattttcggcactttcttatgcaaggtcgtgagcctgttaaaagaggtgaacttctactctggtattttgctgttagcttgcatttcagtggacaggtacctggcaatcgtgcacgctactaggactcttacacagaagaggtatctagtgaaatttatttgtcttagtatctggggactctcattgctactcgcgctgcccgtactgctgtttaggagaaccgtgtactcctcgaatgtgagtcctgcgtgctacgaagatatgggcaacaataccgctaattggcggatgttgctgcgcattctaccacagagctttgggttcatcgtaccactactgataatgttgttctgttacggatttaccctgcgaacactctttaaggcacatatgggtcagaaacatagagctatgcgcgtaatcttcgccgtcgtgctgattttcttgctctgctggttgccatataacttggtcctgctcgccgacactctcatgcgcacccaggttatacaagagacctgcgagagaaggaatcatatcgatcgcgctttggatgcaacagagatattgggcatcctgcacagttgcctcaaccccctgatttatgcttttattgggcaaaagttccggcatggtctgttgaagatcctggcgatccacggccttatctccaaggacagcctccccaaggacagtagaccctctttcgtgggatcaagttccggtcacacgtccactacactctag

SEQ ID NO: 28040 - DNA, 417 bp, synthetic construct
  misc_feature 1..417: note = Description of Artificial Sequence: Synthetic coding sequence
  source 1..417: mol_type = other DNA
atggaggatttcaacatggaatctgattcctttgaggatttttggaagggggaagacttatctaattatagttatagtagcacattgccaccctttcttctggacgcagcaccctgcgaacctgagagcctcgagataaacaaatactttgttgtaatcatctacgcgctggtttttctgctgagtctgctggggaattcactagttatgcttgtgattttatactctcgcgtgggccgaagcgtgaccgatgtctatctcttaaatctggccctggccgaccttttattcgcactgacactgcccatctgggccgcttcaaaagtgaatggctggatattcggcacttttctgtgtaaagtggtctcactactcaaagaggtgaatttctattccggcatcctgctgctggcctag

SEQ ID NO: 28041 - DNA, 48 bp, synthetic construct
  misc_feature 1..48: note = Description of Artificial Sequence: Synthetic coding sequence
  source 1..48: mol_type = other DNA
atggaagattttaacatggaaagcgacagctttgaggacttctggtag

SEQ ID NO: 28042 - DNA, 519 bp, synthetic construct
  misc_feature 1..519: note = Description of Artificial Sequence: Synthetic coding sequence
  source 1..519: mol_type = other DNA
atggaagatttcaatatggagtcagattcattcgaagacttctggaagggcgaggacttaagtaactacagttattcatcgaccctccccccttttttgctagacgccgctccgtgtgaaccggaatcactggagatcaataaatattttgtagttattatttacgccttggtattcttactctctctgctgggtaactcactcgtgatgctcgtgattctgtactcccgcgtgggaaggtccgtcactgacgtgtacctgctcaatcttgccctcgccgatttattgttcgctctcaccttgcccatctgggcagcatctaaggtgaatgggtggattttcggaacattcctgtgtaaagtcgtgagcctgttaaaggaggtcaatttttacagcggcatcttgctgttggcctgcatttccgttgataggtacctcgctatcgttcacgccactagaacacttactcagaaacggtacctcgttaagtttatctgcttgagcatctggggcctgtag

SEQ ID NO: 28043 - DNA, 48 bp, synthetic construct
  misc_feature 1..48: note = Description of Artificial Sequence: Synthetic coding sequence
  source 1..48: mol_type = other DNA
atggaagattttaacatggaaagcgattcatttgaggacttctggtag

SEQ ID NO: 28044 - DNA, 606 bp, synthetic construct
  misc_feature 1..606: note = Description of Artificial Sequence: Synthetic coding sequence
  source 1..606: mol_type = other DNA
atggaggattttaatatggagagtgactccttcgaagacttctggaagggggaagatctctcaaattattcctactctagcacactgccaccattcctgcttgacgctgcaccttgcgaacctgaatccctggagatcaataaatatttcgtggttattatctacgccttggtctttttactcagtttactaggaaattctttggtgatgttagtgattctgtacagtagggtaggccgtagcgtcactgacgtgtacctcttaaacctggctctggccgacctgctgttcgcacttaccctgcctatctgggccgcatctaaagtgaatggctggattttcggtaccttcctgtgtaaggtcgtcagcctcctgaaagaagtgaatttctacagtggaatcttacttttggcctgcataagcgtggaccgctatctggcaatcgtgcatgctacccgcacgttgacccagaaaagatatttggtgaaattcatctgcctaagcatatggggactatcgttgcttctggctctgcctgtcctgcttttcaggagaacagtgtacagttccaatgttagccccgcttgctacgaggacatggggtag

SEQ ID NO: 28045 - DNA, 411 bp, synthetic construct
  misc_feature 1..411: note = Description of Artificial Sequence: Synthetic coding sequence
  source 1..411: mol_type = other DNA
atggaggattttaacatggagtcagactcctttgaagatttttggaaaggcgaagacctcagcaactattcctatagcagtactttacctccttttcttctcgacgccgctccatgtgagccggagagccttgaaattaacaaatacttcgttgtgattatttacgcgcttgttttcctcctgagcctgctcgggaattccctggtgatgctggtgatcctgtactctagggttggcagatccgtcaccgatgtttatctgcttaacctggcattagcagacctgctttttgcgctaacactacctatctgggccgcatcaaaggtgaacggttggatcttcgggactttcctgtgtaaagtggtaagcctcctcaaagaggtaaatttctactccggaatattgttatag

SEQ ID NO: 28046 - DNA, 1059 bp, synthetic construct
  misc_feature 1..1059: note = Description of Artificial Sequence: Synthetic coding sequence
  source 1..1059: mol_type = other DNA
atggaaggcatctctatatacaccagcgacaactatactgaagagatgggttctggcgactatgatagtatgaaagagccttgctttagagaagaaaatgctaacttcaacaagatcttcctgcctacaatctattcaattatttttctaacaggaattgtgggcaatggcctggtgatccttgtgatggggtatcaaaagaaattgcggtctatgactgacaaatatcgactgcacttgtcggtagccgaccttctttttgtcataacgctgcccttctgggctgtagacgcggtggctaactggtattttggaaactttctgtgtaaggccgtgcacgtcatctacacagttaatctctactctagtgtcctaatacttgcttttatctctcttgatagatacctagcaattgttcatgcgacaaattcccagaggcctagaaagctccttgccgagaaagttgtttacgtgggagtctggatccccgctcttctgttgacaatccctgatttcatctttgcgaatgtttccgaagcggatgatagatatatctgcgacagattttatcccaatgatctctgggtggtggtcttccagtttcagcacatcatggtcgggctaatcctgcctggcattgtcatactgtcttgctactgcatcatcattagcaagttaagtcactcaaaggggcatcaaaagagaaaagctttgaagactactgtgatccttatcctcgctttctttgcatgttggttaccatattacatcggaatctcaatcgactctttcattttgttggaaataattaagcaagggtgtgagtttgagaataccgtgcataaatggatttccataacggaggccctcgcattcttccactgctgtctgaatcccatactttatgcattcctcggagccaaatttaaaacatcagctcagcacgcgcttacttcagttagtagaggcagtagccttaagatactctcaaagggcaagcgcggtggccactcttctgtgtctacagaatctgaatccagctcattccattcatcttag

SEQ ID NO: 28047 - DNA, 1071 bp, synthetic construct
  misc_feature 1..1071: note = Description of Artificial Sequence: Synthetic coding sequence
  source 1..1071: mol_type = other DNA
atgtccattccactgccattgctgcagatttatacaagtgacaattataccgaggagatgggcagtggcgattatgattccatgaaggagccctgttttagggaggagaacgctaacttcaacaaaattttcctgccaaccatatactctatcatcttccttaccggcatcgtggggaacggtctcgtgattctagtgatgggctatcagaaaaagctaaggtcgatgactgataaatatcgcctccacctgagcgttgccgatctgcttttcgttataacactgcccttttgggccgtcgacgccgtagcaaactggtactttggtaattttctctgcaaagccgtgcatgtcatttacacagtgaatctttattcgagcgtcctgatcttggcttttattagccttgaccggtatttggccattgttcacgcgacgaactctcagagaccaagaaagctgctggcagaaaaggtcgtgtatgtaggagtctggattcccgcactgctgctcaccattcctgatttcatttttgccaatgttagcgaggccgatgaccgatatatctgtgacaggttttaccccaacgatctgtgggtagtggtattccaatttcaacatattatggtcggactaatcctgcccggaatcgtgatcctttcctgttattgtattattatatccaagctgtctcactccaagggccaccagaaacgcaaggcgctgaaaactacggttatccttattctagcctttttcgcctgctggttgccttactatatcgggatatctattgattctttcatcttgctcgaaatcataaagcaggggtgcgagtttgagaatacggttcacaagtggatcagtataacagaggctctcgctttctttcactgctgcctcaaccccatactctacgcattcctcggtgctaagtttaagacatctgcccagcatgctcttacaagcgtgagtagggggtccagcctgaagattctgagtaagggtaagcgcggtgggcattcgagtgtgtccaccgagtctgaatcatctagctttcacagcagttag

SEQ ID NO: 28048 - DNA, 669 bp, synthetic construct
  misc_feature 1..669: note = Description of Artificial Sequence: Synthetic coding sequence
  source 1..669: mol_type = other DNA
atgccttggcagaccggaaccctaggcacttcatacgctcgacagtccatgtcttctactcagtccacgtctaccgccgtgagttcatcatggatcccagccctgttactgaccatccccgacttcatattcgccaacgtgagcgaagccgacgataggtacatctgtgatcggttctatcctaacgacctgtgggttgtggtgttccagtttcaacacataatggtaggtcttatactgccaggcatcgtgatactctcctgttactgcataattatctccaagctgagtcattcaaaggggcaccagaagaggaaagccctgaagacgaccgttattctgatcttggctttttttgcatgttggctgccatattacatcggcatctcaatagacagttttatactgctcgaaattatcaaacagggatgcgagttcgagaacactgtgcataagtggattagtataactgaggccttggcgttttttcattgctgtctcaatcctattttatatgctttcttgggggctaagttcaaaacttctgcacagcacgccctgaccagtgtttccagaggcagctcattgaagatcctaagtaagggaaaacgcggaggacatagtagcgtgtccactgaatctgagtcatctagctttcacagctcttag

SEQ ID NO: 28049 - DNA, 2832 bp, synthetic construct
  misc_feature 1..2832: note = Description of Artificial Sequence: Synthetic coding sequence
  source 1..2832: mol_type = other DNA
atgactcagcgcagcattgccggacctatatgcaacctcaagttcgtaaccctgctggtcgcgctgagcagcgagctgcccttccttggggcaggggtacaactgcaggataatggatacaacggccttttgattgcgattaaccctcaggttcccgagaaccagaacctaatttcaaatattaaagaaatgattactgaagcttcattctatctgttcaatgcaaccaagagacgtgttttctttaggaatatcaaaatcctgattcctgccacatggaaggctaacaataattccaagatcaagcaggagagctacgaaaaagcaaacgtgattgtgaccgattggtacggagcccacggggacgatccctacaccctgcagtatcgagggtgcggaaaggagggcaaatatatccatttcacccccaattttttgttgaacgacaacctgaccgccggttatgggagtcgcggaagagtgtttgtacatgaatgggcacatctgagatggggcgtcttcgacgagtataataatgataaacccttctacattaacggacagaatcaaatcaaagtcacacggtgcagtagcgacatcacaggcatctttgtttgcgagaagggtccatgccctcaggagaactgtatcatcagcaaactgttcaaagaaggttgtacctttatttacaatagtacacagaacgccacagccagcattatgtttatgcagagcttgtcatccgtagtggagttctgtaacgctagcactcacaaccaggaggcccctaaccttcagaaccagatgtgctccctcaggtccgcctgggacgtaatcacagatagtgcagatttccatcactccttccccatgaacggcacagaactacccccacccccaacctttagcttagtccaagcaggtgataaggtggtatgtttggtgctggatgtaagtagtaaaatggccgaggcagaccggctcctacagttgcaacaagccgctgagttctatctgatgcaaatcgtggagatacatacattcgtgggcattgcaagttttgactcgaagggagaaattagagcccagttgcaccagatcaactccaatgacgacagaaaactccttgtgagttacctccctaccaccgtttctgcaaaaacagatatcagtatttgttccggcctgaaaaagggtttcgaagttgtcgagaagctgaacggcaaggcatacggttcagtgatgattttggtgaccagtggggacgataagctcctggggaattgtttgccaacagtgttaagctccggcagtaccatccattctatcgcccttgggagcagtgccgcaccgaacctggaagaactcagtcggttaacggggggacttaagttttttgtgcctgacatttccaattcaaattccatgattgatgccttctctagaatcagctcaggaacaggggatatattccaacagcatatccaactggaaagcaccggcgagaacgtcaagccacaccaccagcttaaaaacaccgtaactgtcgataacactgtgggcaacgatactatgttcctggttacttggcaggcatcggggccacctgagattattctgttcgacccagatggacggaaatattacacgaacaatttcatcactaatctgacttttaggacggcctctctatggatccctggaaccgctaaaccaggacactggacatatactctgaacaatacgcatcattctctacaggctctgaaggtaactgtgacatccagagcatccaattctgccgtcccgcctgctacggtcgaagcattcgttgaacgagacagcttgcacttccctcacccagtgatgatttatgcaaatgttaagcaaggcttttaccctatcctaaacgccactgtcactgccaccgtcgaacctgagactggggacccagtcaccctgagattactggacgatggagcaggcgctgatgtcattaaaaacgacgggatctatagccgctattttttctcttttgcagccaacgggaggtactcactcaaggtgcatgtgaaccatagcccctccatctccactcctgcccacagcattccagggtcacacgcgatgtacgtgcctggctacactgccaacggcaatatccagatgaatgcaccacggaagtccgtgggcagaaacgaagaggagcgtaagtggggcttcagcagggtgtcttccggcggatcatttagcgtcctgggtgtccccgctggcccacaccccgatgtgttccctccttgtaaaataatagacctggaggcagttaaggtcgaggaagaactaactctgtcctggaccgcccctggagaggacttcgatcaaggacaggctacgagctacgagatccgcatgtctaagtcactccagaacatccaggatgattttaataatgcgatactggtaaacacttcaaagagaaacccccaacaagcaggaattcgcgagatctttaccttcagcccccagatctcaactaacggtccggaacaccaacccaacggcgaaacccacgagtcccaccgaatctatgtggccattagagccatggaccgcaattccctgcagtctgccgtgtcgaatatagctcaggcaccactgttcatcccgccaaattctgatcctgttccggcaagggattacctgatcctcaagggagtcctcactgcgatgggtcttattggcatcatatgcctcattatagtcgttacccatcataccctgtcgcgcaagaaaagggcagataagaaggagaacggcactaaactcttatag

SEQ ID NO: 28050 - DNA, 423 bp, synthetic construct
  misc_feature 1..423: note = Description of Artificial Sequence: Synthetic coding sequence
  source 1..423: mol_type = other DNA
atgacacagcggagtattgcagggcctatttgcaacctaaagtttgtcactttgctggtggccctcagttccgaactgccttttctgggggctggagtgcaactgcaggacaacggatacaacggattattgattgccataaacccccaagtgccagaaaatcagaatcttattagcaacataaaggagatgatcacagaggcttcattttatttgttcaatgctaccaagcgcagggtcttctttaggaacattaaaattttaatcccagctacatggaaggcgaataataatagtaagattaaacaggaatcctacgagaaagccaatgtcattgttaccgattggtacggagcacacggggacgatcaaggcgtggaaaagcgggagaatacctttatttcacacctgatctcatattag

SEQ ID NO: 28051 - DNA, 1233 bp, synthetic construct
  misc_feature 1..1233: note = Description of Artificial Sequence: Synthetic coding sequence
  source 1..1233: mol_type = other DNA
atgaacgacgaagattactcaaccatctacgatactatacaaaacgaacgcacctacgaggttccagatcagcccgaggagaatgaatccccacactatgacgatgtccacgagtatctgagacccgagaatgatctatacgccacacaactgaacactcatgagtacgacttcgtgagcgtctacacaatcaaaggcgaagagacttctctcgcctcagtacaaagtgaggaccggggatatttgctgcctgatgaaatctactccgagctccaagaggcccaccctggagagccacaggaagatcgcggtatctccatggaaggcttatatagtagcacacaggatcaacagctgtgcgcagcggagcttcaggagaacggatcagtgatgaaagaggatttaccatcacctagttcttttaccattcagcacagcaaggcttttagcacaaccaagtactcctgttacagcgatgctgagggcctggaagagaaggaaggggctcacatgaatccagaaatctacctgttcgttaaggccggaatcgatggtgaatccatcggtaactgcccattcagccagagattgttcatgatcttgtggttaaagggggtggtgtttaatgtgacgactgtggacctgaaacgcaagccagcagaccttcacaacctggccccaggtacacatcctccctttcttaccttcaatggcgacgtcaaaaccgatgtgaacaagattgaagaattcctggaagagactctcactcctgaaaaatacccaaagctggccgctaagcacagagaatctaatacagcgggtattgacatattttctaagttttctgcttatatcaagaacaccaaacaacaaaacaatgccgcattagaacggggacttacaaaggctctgaagaaattagacgattatctaaacacaccgctgcctgaagagatcgacgccaacacatgcggggaagacaaggggtctcggcgtaagtttctcgatggagatgagctgaccttagcagactgtaatctgcttccgaagcttcacgtggttaagattgtagctaagaagtaccgcaactacgatattcctgccgagatgaccggtctgtggcgatatctgaagaatgcctacgcccgtgatgagttcaccaacacatgcgccgcagactccgaaatcgaactggcttatgctgatgtggcaaagcggctgagcaggagctag

SEQ ID NO: 28052 - DNA, 756 bp, synthetic construct
  misc_feature 1..756: note = Description of Artificial Sequence: Synthetic coding sequence
  source 1..756: mol_type = other DNA
atgactgactccgctactgccaatggtgatgatagggatcccgaaatcgagctatttgtgaaagctggtattgacggtgagtccattggcaattgccctttttcacaacgccttttcatgatcctgtggctgaaaggcgtcgtgtttaatgtgaccacagtggatttaaaaaggaagccagctgatctgcacaacttagcacccggaacgcatcctcccttcctaaccttcaatggcgatgtgaagaccgacgtcaacaaaattgaggaattcttagaggagacactcacacctgaaaagtatccaaagcttgcagcaaagcatcgggagagcaatacagcagggattgacatcttctctaagttttccgcctatataaagaacacaaaacagcaaaacaatgccgctctggagaggggcctgacaaaagcactcaaaaagctggacgattacctgaatacccccttgccagaggagattgatgcaaacacctgtggcgaggataagggatcacgacgaaagtttttggacggagatgagctaaccttggccgactgtaatcttcttccaaaactacatgttgtcaaaatcgtggccaagaagtacagaaactatgacataccagccgaaatgaccggcctctggcgttacctcaaaaacgcttacgcacgcgatgaattcaccaatacgtgtgccgctgactctgagatagagctggcatacgccgatgttgccaaaaggctctcccgaagctag

SEQ ID NO: 28053 - DNA, 618 bp, synthetic construct
  misc_feature 1..618: note = Description of Artificial Sequence: Synthetic coding sequence
  source 1..618: mol_type = other DNA
atgacggactcggctacagccaatggggacgaccgcgaccctgagatcgaactgtttgtaaaagcagggatagatggcgaatcaatcggcaactgtccattctcccaaagacttttcatgattctttggctcaaaggcgtcgtgttcaacgtgactaccgttgatctcaagagaaagcccgctgacttgcacaacctcgctcccggaacacatcctccgtttcttaccttcaacggagatgtgaaaaccgacgtcaacaagattgaagagttcctcgaagaaactctgacccctgagaagtacccaaaactggcggctaaacaccgtgagtcaaacaccgctggtatagacattttctcaaaattcagcgcctacattaaaaatactaagcaacaaaacaacgcagctttggagcgcggactgaccaaggcgctcaaaaagcttgatgattatctaaatacccccctccctgaggagatcgacgcaaatacatgtggcgaggacaaagggtcccgtagaaagtttctcgacggggacgagctgacactcgcggattgcaatcttctcccaaaactccacgttgtgaaagagcaggtgccactcaaaggaatgatttag

SEQ ID NO: 28054 - DNA, 5822 bp, synthetic construct
  misc_feature 1..5822: note = Description of Artificial Sequence: Synthetic coding sequence
  source 1..5822: mol_type = other DNA
atggccagtgggttaggatcacctagcccatgttccgcaggatccgaggaggaagatatggatgctctgctgaataactccctgcctccaccacatccggaaaacgaagaggatcccgaagaagacctctccgagacagagacccccaagctaaagaagaagaaaaaacccaaaaagcctagggacccgaaaattccgaagtctaagcggcagaagaaagagcgaatgctcctctgcaggcagctcggggattcatctggcgaaggtccggaattcgtcgaggaagaggaggaggtggccctacgtagtgattctgagggctctgattacacacccggaaaaaaaaagaagaaaaagttaggccctaagaaggaaaagaagtccaaaagcaagcgtaaggaagaggaggaggaagaggatgatgatgacgattcaaaagaaccaaagtcttctgctcagctactggaagactgggggatggaagatatcgaccacgtcttctctgaggaagactatcggaccttaacgaactataaggctttttctcagtttgtgcgcccactcattgcagccaagaaccctaagattgccgtttcaaaaatgatgatggtccttggtgccaagtggcgggagtttagtactaacaacccatttaaagggtcttctggggctagcgttgccgctgccgcagccgcagcggtggccgttgttgaatctatggtcacggccacagaagttgcaccccctccccctcccgtggaagtgccaataaggaaggccaagacaaaagagggaaagggaccaaatgcccgaagaaagccaaaaggaagtcctagggtcccagatgccaagaagccaaaacccaagaaggtcgcccctctgaaaataaaactcggcggatttggttccaagagaaagagaagttcctctgaagacgacgacctggacgtggaatccgacttcgatgatgcatcaatcaactcatattcagtctctgacgggagcacatccagatcaagtaggtcacgcaagaaactgaggacaaccaagaaaaagaaaaagggggaggaagaagtgaccgcggttgatggctacgagactgaccatcaggactattgcgaagtctgtcaacaaggaggtgaaattatattgtgtgacacgtgccctagagcataccatatggtttgcttggatcctgacatggagaaggcgcctgaagggaaatggtcttgcccacattgtgagaaggagggcatccagtgggaggctaaagaagacaactccgagggggaagaaatactagaggaggtgggcggagatcttgaggaggaggacgaccatcatatggaattttgtcgcgtttgcaaggatggtggcgaattgctgtgttgtgacacatgcccttcgtcataccacattcactgtctcaacccccctttaccagagattccaaatggagagtggctgtgccctaggtgcacttgcccagctctgaagggtaaggtgcagaagatccttatctggaagtggggccagccccctagccccaccccagtgccacgcccacccgacgccgatcccaatacaccatcgccgaagccccttgaaggccgaccagagagacaattttttgtaaagtggcaaggtatgtcttactggcactgcagctgggtttctgagctccagctagagttgcactgtcaggtcatgtttcgaaattatcagcgtaaaaacgatatggacgagcccccatccggagactttggtggcgatgaggagaagagcagaaagcgcaagaataaagacccaaagtttgctgaaatggaggagagattctaccgctatgggattaaaccggagtggatgatgattcacaggattctgaaccacagcgtggacaagaaaggacacgtgcactatcttatcaaatggcgcgatctgccttacgaccaagccagctgggaaagcgaggacgtcgagatccaggattatgacctgttcaagcaatcatattggaatcatcgagagttaatgcgcggtgaagaagggcgaccaggaaagaaactgaaaaaggtgaaactgcggaagttagaacgccctccagaaactccaacggtggatccgacagtgaagtatgaaaggcagcccgaatacctggacgctacaggcggaacactgcacccataccagatggagggacttaattggttgcgtttctcatgggctcagggcacagacacgattctggccgacgaaatggggttggggaagaccgtgcagacagccgtgtttctgtatagtctctacaaagagggccacagcaaaggccctttcctggtaagcgccccactcagtacaatcatcaactgggaaagagaattcgagatgtgggctcccgacatgtacgttgtgacctacgtaggcgataaggacagtcgcgcaatcatcagggagaacgaattttccttcgaagataacgcaattcggggtggcaagaaggccagcagaatgaagaaggaagcctccgttaaatttcatgttctactaacttcttacgaactgatcacaattgacatggctatcctcggaagcatcgattgggcctgtctaattgtggatgaggcccataggctgaaaaacaaccagtccaagtttttcagagtgcttaacggatattcactgcagcacaaactccttctgacaggcacccctcttcaaaataatctggaggagctgtttcatcttcttaacttcctaacacccgagagatttcataacctggaaggctttctggaagaatttgcagatatcgccaaggaggaccaaatcaagaagttgcacgacatgttaggtccccatatgctgcgtcgactcaaagccgatgtctttaaaaacatgccatcgaagaccgagctgattgtgagggtggagttaagcccgatgcagaaaaagtattataagtacattctgacgagaaatttcgaagcactgaatgctaggggtggaggaaaccaagtgtctctgctgaatgttgttatggacctaaaaaagtgctgcaaccacccctacctgttccccgtagctgccatggaggcccctaaaatgcctaacggcatgtacgatggaagcgctctcatccgcgctagtggaaaactgttgctcctgcagaaaatgttgaagaacttgaaggaaggtggacatcgcgttctgattttctcccagatgacgaagatgctggatctgcttgaggactttctcgaacatgagggttacaaatacgaacgtatcgatggaggtattactggtaacatgaggcaggaggctatcgacagatttaatgcacctggggcacagcaattctgcttcctgcttagcacccgcgcagggggactgggtatcaacctcgctacggctgacacagtgattatctatgacagtgattggaatcctcacaacgacatccaggcattcagtcgggcacatcggataggccagaataagaaggtgatgatctatagattcgtgacacgagcttcggttgaagagcggatcactcaggtggctaagaagaagatgatgctgacccacttggtggtcaggccagggcttgggtccaaaacaggcagtatgtccaagcaggaactggacgacatcctaaagtttgggactgaggaactgttcaaagatgaagctactgacgggggtggcgacaacaaggagggcgaagattcatccgtgatccactacgatgataaagcaatagagcgcctcttagacagaaatcaggacgagaccgaagatacggagctacaggggatgaatgaatatttaagctcattcaaagttgctcagtatgtagtgcgtgaggaagaaatgggagaagaagaggaggttgagagggagattatcaaacaagaggaaagtgttgatccagactactgggagaaactcctgagacatcactatgagcaacagcaggaagatcttgcacgtaatttgggcaagggtaaacgcattcgcaagcaagtgaattataacgatggctcacaggaggatagaggcgtttgtggtcgaccaagaccacctcctatgggaagatccactcgcgcagtgggcccagctcacttgccctccctgccccctgattggcaagatgatcagagcgacaatcagagcgattattcagtagcctctgaggaaggtgacgaagatttcgacgaaagaagtgaagctccccgacgaccgagccgcaaagggctgcgcaacgataaggacaaaccactgcctcctctactggctagagtcggagggaacatagaggtccttggttttaatgccaggcagcggaaggcttttcttaatgccattatgcgttatggtatgccgccacaggatgcttttacaacccaatggttagttcgcgacctaagaggaaaaagtgaaaaagaatttaaggcctatgtctctctctttatgcggcacctttgtgaaccgggagcagacggcgctgagaccttcgcggacggagttccgcgtgaaggcctgagcaggcagcatgtgcttactaggattggcgttatgtccctgatccgcaaaaaagtccaggagtttgagcacgtcaacggcagatggtcgatgcccgagctggctgaagtggaggagaacaagaagatgtcccagcccggtagccccagtccaaaaacccctaccccctcgactcccggtgatactcagcctaacaccccagccccagtcccaccagcagaggacgggataaagatagaggagaactccctgaaagaggaagagtcaatcgagggtgagaaagaagtgaaaagtactgctcctgaaacagctatcgagtgtacacaagcacccgctccagcctccgaggacgagaaagtggtggtggaacctccggagggggaggaaaaagtggagaaagccgaggtcaaagagagaaccgaggaaccaatggagaccgaaccaaaaggggcagccgatgttgaaaaggtcgaagagaaatccgcaatcgatctgacacctattgttgtggaggacaaagaagagaaaaaggaggaggaagagaagaaggaagtcatgcttcagaacggagaaactccaaaagatcttaatgatgaaaaacaaaaaaagaacattaaacaacggttcatgtttaacatagccgacggaggcttcacagaacttcacagtctgtggcagaacgaggaacgagcagcaacagtgacaaagaaaacttacgagatctggcatagaaggcatgactactggctgctggcaggtattatcaatcacggctacgccagatggcaggatattcaaaacgaccctcggtacgctatcctcaatgagcctttcaagggagaaatgaaccggggtaacttcttagaaatcaaaaacaagttcctcgcgaggcggtttaagcttctcgaacaggccctggtgatcgaggaacaactgcggagagccgcttatctgaatatgtctgaagatccgagccacccctcaatggctctcaacactcgctttgcagaagtcgagtgcttggcagaatctcaccagcatttgagtaaagaatctatggccggaaacaaaccagccaatgctgtcttgcataaggtgttgaagcaattggaagaactattatccgacatgaaggcagacgtgacacgcttgcctgcaaccatcgctaggatccccccagtcgccgtgcgactccaaatgtccgaaaggaatatcttgtcccgactggctaatcgagcccctgagcctacgccgcagcaggtcgcgcagcagcaata

SEQ ID NO: 28055 - DNA, 5738 bp, synthetic construct
  misc_feature 1..5738: note = Description of Artificial Sequence: Synthetic coding sequence
  source 1..5738: mol_type = other DNA
atggcatcgggactgggtagtcccagcccctgcagcgccggatcagaagaggaggatatggatgccttgcttaataactctctccctcctcctcaccccgaaaatgaggaggatccagaagaggacctttccgaaacggagaccccaaagttaaaaaaaaagaagaagccaaaaaagccccgagacccaaagatcccgaaaagtaaacgacagaagaaagaacgaatgctgctgtgtcggcagttgggtgatagctcaggagagggacctgaattcgtcgaggaagaagaagaggttgccctccgctccgactcggagggctctgactatacacctggcaaaaagaaaaagaaaaagctggggcctaagaaagagaaaaaaagcaagtcaaagcgcaaggaggaagaagaagaggaggatgacgacgatgacagcaaagagcccaaatcctccgcgcagctgctcgaggattggggcatggaggacatcgatcatgtgttttccgaagaggattatcgcacgctaaccaattataaagcattctcacagttcgtccgcccactcattgctgccaaaaatcctaaaatcgctgtgtcaaagatgatgatggtcctgggcgcaaagtggagagagtttagcaccaacaatcctttcaaggggtcaagcggcgcttctgtggctgccgctgcagccgcagccgtcgcagtagtcgaatcaatggtgacagctaccgaagtggctccgccaccccctcccgttgaagttccgattaggaaagctaaaaccaaagaaggcaaaggccctaatgctagacggaagcccaaaggtagccccagagtacctgatgcaaagaagcctaagccaaaaaaggtcgcccctttgaaaattaagctggggggattcggctccaaacggaagcggtctagcagtgaagacgatgatctggacgtggagagcgacttcgatgatgcttcgataaactcctactccgtgtccgacggctcaacttcaagatccagccgcagccgtaagaagttgagaaccacaaaaaaaaagaaaaaaggcgaggaagaagtgacagctgtagacggatatgaaacagaccatcaagattattgtgaagtctgtcagcaggggggagagattatcctgtgcgatacatgccctcgggcttaccatatggtgtgcttggatcccgacatggagaaagcccctgaaggtaagtggtcttgcccacattgcgaaaaggaagggattcagtgggaagcaaaggaggacaattccgagggggaagagatcctggaagaggtaggcggagacctcgaagaggaagacgaccaccacatggagttctgccgcgtatgcaaagacggtggagaacttctttgctgcgacacatgcccttcatcctaccacattcactgcctcaacccgccacttcctgaaattcctaacggtgaatggttgtgtcctcggtgtacatgtccagcacttaaagggaaagtgcagaagatcctgatctggaaatggggccagcctccctctcccacacctgtcccaagacccccagatgccgaccctaatactcctagccccaagcccctcgagggcagacccgaaagacagttcttcgtgaagtggcaggggatgagctactggcattgttcctgggtgtcagagctccaactggagctgcactgccaggtgatgttcagaaattaccagaggaagaatgatatggatgaaccgccttccggggacttcggaggcgatgaggaaaaatctaggaagcgaaaaaataaagatccaaaatttgccgaaatggaagaacggttttatagatatgggatcaagcctgaatggatgatgatccaccggatcttgaaccactcggtggacaagaagggccatgtgcactaccttatcaaatggagggacctgccatatgatcaagcatcgtgggagtcggaggatgttgaaattcaggactacgatctattcaagcagtcatattggaatcatcgcgaactcatgaggggcgaggagggtcgtccgggaaaaaaactcaaaaaggtcaaacttcgtaaattggaacgcccaccagagacccccaccgtcgatccaacagtgaaatatgagaggcagcccgagtacctagacgctaccggcggaaccctccatccctatcagatggagggactaaactggctacgcttctcctgggcccaggggaccgatactatcttggcagacgagatgggactcgggaaaacggtgcagacagccgtctttctttatagtctgtataaagaaggccactcaaaaggaccgtttctggtaagcgctcctcttagtactataatcaattgggaaagagagttcgaaatgtgggccccagatatgtatgtggttacctatgtcggcgataaagactcgcgtgccatcatccgagagaatgaattctcatttgaggacaacgcaattagagggggtaagaaagcctcaaggatgaaaaaggaggcctctgtcaaatttcacgtcctcctgacaagctacgagttgatcactatcgacatggctattctcgggtccattgactgggcctgtctgatagtcgatgaggcccaccggctcaagaataaccagagtaagtttttcagagtgctgaacgggtattccctgcaacacaaactgctgttgactggaacgcccctgcagaataacttagaagagctcttccacctcttgaatttcctgaccccagaacggttccataacttggaggggttcctcgaagaatttgcagacattgctaaagaagaccagataaaaaagctccatgacatgttggggccacatatgctgcgcaggctgaaagccgacgttttcaaaaatatgccctctaaaacagaactgattgtgagagtcgagcttagccctatgcaaaagaagtactataagtacatactgacaaggaatttcgaggccctgaatgctcgtgggggaggtaaccaagtgtcactactgaacgttgttatggacctcaagaaatgctgcaatcacccatatttgttccccgtggcagccatggaagctccaaaaatgcctaacgggatgtacgacgggtcagctttgatccgtgcttctggcaagcttttgttgttacagaagatgcttaagaacttgaaggaaggagggcatagagtcctgattttctcgcagatgacaaaaatgctggatctcctggaggactttttggaacacgaaggttacaagtatgaaaggatcgatgggggaatcacaggaaatatgcggcaggaagccattgacagatttaacgctccaggtgcccagcagttctgttttctcctgagtactcgcgcaggtggcctaggcattaatctggccactgcagacaccgttatcatttacgactctgactggaatccccacaacgacattcaggccttctccagagcacatcgcatcggccagaataagaaggtgatgatttacagattcgtaacacgggcttctgtggaagagcggataacccaagtggctaagaagaaaatgatgctgacccacttagtggtgcgtccaggcctgggctcaaagacaggttccatgtctaaacaggagctcgacgatattcttaaattcggaacagaagagttgttcaaggacgaggcaactgatggagggggtgacaataaagaaggagaagattcttccgtcatacattacgacgacaaggccatagagaggctgttggatagaaatcaggatgagactgaggacacagagctgcaggggatgaacgagtacctgtcttcttttaaagtggcacagtacgttgtgcgcgaggaagagatgggtgaggaggaagaggttgagagggaaatcataaaacaggaagagtctgtggaccccgattactgggagaaactgttaaggcatcactatgagcagcagcaggaagatcttgctcgaaacttgggcaagggcaagcgcatacggaagcaggtaaactacaacgatgggtcgcaggaagatagggattggcaggacgatcagagcgacaaccagtcggactatagtgtggcttccgaggagggtgatgaagacttcgacgagagatccgaggccccacgacgcccatcacggaagggactgaggaatgataaggataaaccactgcctcctctgctggcaagagtgggaggaaatattgaggttctggggttcaacgccaggcagcggaaggcttttcttaacgctattatgaggtacggcatgcctcctcaggatgcatttacaactcagtggctagtcagagatcttcggggaaagagtgaaaaagaattcaaggcctacgtgagcttgtttatgaggcatctttgtgagcctggggcagacggggctgagacgtttgccgacggagtccctcgcgagggacttagccgacaacacgttctgactaggattggcgttatgtcccttatcagaaagaaggtgcaggagttcgagcacgttaatggacgctggtccatgccagaactggctgaggtagaagagaacaaaaaaatgtcccagcctggctctccgtccccgaaaacccccacacctagcaccccgggtgacacgcagcccaataccccagcccctgtgccccctgccgaggatggaattaagatcgaggagaacagcctgaaagaagaagagtcaattgagggggaaaaggaggttaagtccactgcgcctgagaccgctatcgaatgtacccaagcacccgctccagcttctgaggacgaaaaagtagtcgtggagcccccagagggggaggaaaaggtcgaaaaggccgaagtgaaagagcggacagaggagcctatggagaccgagcctaagggagccgctgatgtggagaaagtggaggagaagagtgctatagatttgacccctattgtggttgaggacaaggaggagaagaaggaagaagaagagaagaaggaggtaatgctgcagaatggcgaaaccccaaaggatcttaacgacgaaaaacagaaaaagaacattaaacaacgttttatgttcaacattgctgacggcggatttacagaactacatagcttatggcagaacgaagaaagagctgcgactgtgactaagaagacttacgaaatctggcaccgtaggcatgactattggttgctcgccggaattattaatcacggctacgcaagatggcaggacatccagaacgatcctcgctacgctattttgaatgagcccttcaagggcgaaatgaacagagggaatttcttggagattaaaaacaaattcctggcaaggcggtttaagctgctggaacaggccctggtgatcgaagagcagctacggcgtgcagcctaccttaatatgagcgaagacccttcacaccctagcatggctctaaatacgcggtttgcggaggtggagtgcctggccgagtcccatcagcaccttagcaaggagagtatggcagggaataagcccgcaaatgctgttctgcacaaagtcctgaaacagctcgaagaacttctgtcagatatgaaagcagacgtaacgcgtctaccagcaacaatagccagaatccctccagtggctgtgcggcttcagatgagcgagcgcaatatcctgagcagactcgccaatagggctcccgagccaacgcctcaacaggtagctcagcagcaata

SEQ ID NO: 28056 - DNA, 5660 bp, synthetic construct
  misc_feature 1..5660: note = Description of Artificial Sequence: Synthetic coding sequence
  source 1..5660: mol_type = other DNA
atggacgcacttctgaacaatagtctaccacccccacatcctgagaatgaggaggaccccgaggaagacctcagcgaaaccgagacaccaaagctgaaaaaaaaaaagaagcctaaaaaacccagagacccaaagattccaaaatctaagcggcagaagaaagagctcggcgactcttcaggggaggggcctgagtttgtggaagaagaggaggaagtagctctacgaagtgattcggaggggtctgactatacgcccggtaagaagaagaagaagaagctggggccaaagaaggaaaaaaagagcaagtccaaacggaaagaggaagaagaggaggaggacgatgatgacgattcaaaggaacctaagtcctctgcacagctactggaggactggggcatggaggatatagaccatgttttctcagaggaggattaccgtacactgaccaattacaaggcattctctcagtttgtccggccacttatagcagccaaaaacccgaaaattgctgtgagcaagatgatgatggtcctgggggcaaagtggagggagtttagcaccaacaatcccttcaaagggtctagcggagcgagcgtagccgcagcagccgctgccgctgtcgccgtggtggagtccatggtgaccgctactgaggttgctccaccacccccacccgtggaggtccccatcaggaaagccaaaacaaaggaaggaaagggccctaatgctagacggaagccaaaggggtcccccagggtgcctgatgccaaaaaaccaaaacctaaaaaagtcgcccctcttaaaattaagctcggcggattcggatctaagaggaagagaagcagctccgaggacgacgacctggatgtcgagagtgattttgacgatgcctccatcaacagctattccgtgtctgatggcagcacgagtcgttcaagtaggtctaggaagaagctgcgaaccaccaaaaagaaaaagaagggtgaggaagaagtcaccgcagttgatgggtacgagaccgaccaccaggattactgtgaggtttgtcagcagggaggtgagatcattctctgcgatacctgtcctcgagcttaccatatggtgtgtctcgatcccgatatggagaaagcacccgagggaaagtggtcctgtcctcattgcgagaaggaaggaatccagtgggaagcaaaagaagataactccgagggtgaggagattctggaagaggtggggggtgacctggaggaggaggacgatcatcacatggagttctgcagggtttgtaaggacgggggagagctgttgtgctgtgacacctgcccttcttcctaccacatccattgcctgaatcctcctttgccagaaattccaaatggagaatggttgtgcccgaggtgtacatgcccagcgttgaagggtaaggttcaaaagatcctcatttggaaatggggacaaccaccctctcccacccccgtacccaggccgcctgatgcagacccaaacactccaagtccgaagcctctcgagggacgtcccgagcggcagttttttgtgaaatggcaggggatgtcttactggcactgttcttgggtctcagaacttcagctcgagctgcattgtcaggtcatgtttcgtaactatcaacgtaagaacgatatggacgagccaccctccggcgattttggcggagatgaagagaagtccagaaaacggaaaaataaggatccgaaatttgcagaaatggaggagcgtttttatcgctatgggatcaaacctgaatggatgatgattcacagaatcctgaaccattccgtggacaagaagggccatgtgcactatctcattaagtggagagatttgccatatgaccaggcctcttgggagtccgaagatgtggagatacaagattacgatctatttaaacagtcctactggaatcaccgggagctcatgaggggggaggaggggagaccaggaaagaagctgaagaaagtcaagttgagaaaattagagcgtccacccgagactccaacagttgaccctaccgtgaagtacgagcgccagcccgagtatcttgacgccaccggagggaccctccacccttaccagatggaaggactaaattggctgcggtttagttgggcacagggtactgatacgattctagcagatgaaatgggcttgggcaagactgtgcagactgctgttttcttatacagtctctacaaggagggtcactcaaaagggcctttccttgtgtcggccccactttcgaccatcataaattgggagagggagttcgaaatgtgggcccctgacatgtatgtggtgacttacgtgggcgataaagacagtagagctataattcgagagaatgagttttcctttgaagataatgctatcaggggaggaaagaaggcctctcgaatgaagaaagaggcaagtgtgaaatttcatgttttgctgaccagctacgagcttattacaatcgatatggctattttgggcagcattgattgggcttgtctgattgtggatgaggctcatcgtttgaagaacaaccagagcaaattttttcgggtgcttaatgggtatagccttcagcataaactgttacttaccgggacaccgctgcagaacaacttggaggagctgtttcatctgctgaactttctgacaccagagagattccataacttagaaggattcctggaagaattcgcagatattgccaaggaggatcagataaaaaaactccatgatatgctaggcccacacatgctgagaagactcaaggctgacgtgtttaagaacatgccatctaaaaccgagctgatcgtaagggttgaactgtcccccatgcaaaaaaaatactacaagtatattttgactagaaacttcgaggctctcaacgcacgcggaggtggaaaccaagtgagcttgctgaacgtggtgatggacctgaaaaaatgctgtaaccacccctatctgtttcccgtggccgcaatggaggccccaaagatgcctaacgggatgtacgacggctctgcgctcattcgcgcttcaggtaaacttctcctgttgcaaaagatgctcaaaaatctgaaggaaggaggccacagggtgctcatttttagccagatgactaagatgctggacctgctagaggattttttggaacacgaagggtataagtacgagcggatcgatggcggaattacagggaatatgagacaggaggcaatcgatcgctttaatgcgccaggcgctcagcagttttgtttccttctgtccactcgggcagggggactcggaattaacctcgccacagccgatacggtgatcatttatgacagcgactggaacccccataatgacatccaggctttctcccgggcacatcgtatcggacagaacaagaaggtgatgatctaccggttcgtgacgcgcgcatctgtggaagaacgaattacacaggttgctaaaaaaaaaatgatgctgactcatttagttgtgaggccaggtctaggaagtaagactggctccatgtcaaaacaggagttggatgacatactgaagttcggcacagaagaactgtttaaggatgaggctactgatgggggaggagacaacaaagagggcgaagatagttctgttatccattacgacgacaaagcaattgaaagactgctggacagaaaccaggatgagacggaggacaccgaactccagggaatgaacgaatatttgtcgagtttcaaagtagctcaatacgtggtgagggaggaggaaatgggggaggaagaggaggtcgagagggagataattaagcaggaggagagtgtggatcctgactattgggagaaactccttagacaccactacgaacagcaacaggaagatcttgcaaggaatctaggaaagggcaaaagaatccgcaagcaggtcaactacaatgacggctcccaggaagaccgcgactggcaggacgaccagtccgataaccagtcggattatagtgtagcttcagaggaaggggatgaggattttgacgagagaagcgaagcccctcggagaccttctaggaagggcctgcgtaatgataaggacaaacccctcccacctttgctagcacgggtcgggggtaacatcgaggtgctgggcttcaatgctcgacaaaggaaagccttcctgaatgccatcatgcggtacggaatgccacctcaggacgcattcacaacgcagtggcttgtcagggacctgcgaggtaaatcagaaaaggaattcaaagcctatgtgtcacttttcatgcggcatctgtgcgagcctggcgcagacggcgcagagacttttgctgatggtgttcccagggagggtctcagccgtcaacatgtcctgactcggatcggcgtgatgtcactcattagaaaaaaagtacaggagtttgagcatgtgaacggccgatggagcatgcccgaactggccgaggttgaagagaacaaaaaaatgtcccagcccggatctccttctccaaaaactcctacccctagcacacctggagatacccagccgaacaccccagcgccagtgcctccagcggaagacggaatcaagatcgaggagaatagtcttaaagaggaagagtctatcgaaggagagaaggaagtcaaaagtacagctcccgagaccgccatcgagtgcactcaggctcctgcccctgcgtccgaagacgagaaagtggtagtcgaaccaccagaaggagaagaaaaagttgaaaaggccgaagtcaaagaacggactgaggaacccatggagacggaacccaagggagcagcagatgtggaaaaggtggaagagaaatcggccattgatctgactccgattgtggtcgaggataaggaggagaagaaggaggaagaagagaagaaggaagtgatgctccagaatggggagacacccaaggatctgaacgacgaaaagcagaagaagaatatcaagcagcgctttatgtttaatattgctgatggtggctttaccgaactgcattccctgtggcagaacgaagaacgtgcggcaactgtcacaaaaaaaacctacgagatatggcatagaaggcatgactattggctgctagctggcatcatcaaccacggctatgcaagatggcaagacatacagaacgatcccagatacgccatcctgaacgaacctttcaaaggcgaaatgaataggggcaatttccttgaaattaaaaataaatttctcgcaagacgcttcaagcttctggaacaggcactggtcattgaagagcagctcaggcgcgctgcctacctcaacatgtctgaagacccctcccatccatccatggccctgaacacacggtttgcggaggtcgagtgtctcgcagaaagccaccagcacctgagcaaggagtctatggcagggaacaaaccagccaacgctgtgctgcataaagttcttaagcagttggaggaactgctgtcagatatgaaggctgacgtaacgagactcccagcaacaatcgcgaggatccctcccgttgccgtgagattgcagatgtcagaacgaaatatactgagccgcttggccaaccgcgcaccagaacccacaccccaacaagtggcgcaacagcaata

SEQ ID NO: 28057 - DNA, 5717 bp, synthetic construct
  misc_feature 1..5717: note = Description of Artificial Sequence: Synthetic coding sequence
  source 1..5717: mol_type = other DNA
atggcgagtggcctggggagcccatccccctgcagtgccggtagcgaggaggaagatatggacgccctcctcaataattccctcccaccgccacaccctgagaacgaggaagaccccgaggaagatcttagtgagaccgaaacgcctaagctgaaaaaaaagaagaaacccaaaaagccaagagaccctaaaataccaaagtccaagaggcagaagaaggagttgggcgactcctcaggtgagggtcctgagttcgtagaggaagaagaggaggtggccctgaggtcagattctgaggggtccgactatacccccggaaaaaagaagaagaaaaagctcggccctaaaaaggaaaagaaatctaagtccaaacgtaaggaagaggaggaagaggaagatgacgacgatgatagcaaagagcccaaatccagcgcccagctgctggaggattgggggatggaagatatcgaccatgttttttcagaggaagattataggacactgactaattacaaggccttttcccagttcgtgagacctcttatcgccgctaaaaacccaaagatcgccgtgagtaagatgatgatggtgctgggggcaaagtggagggagttttctacaaacaacccattcaagggaagctctggggcttcagtagctgcagccgctgccgctgcagtggctgtggtcgagagcatggtgacggccacagaggtagccccaccccctcctcccgttgaagtgcctattcgcaaggccaaaacaaaggaaggaaagggaccaaacgccagacgcaagcctaaagggtccccaagggtgcccgacgcaaagaagccaaaacccaaaaaggtggccccattgaaaatcaagttaggaggatttggctccaagaggaagcggagttcctctgaggacgacgacctcgacgtcgagtccgactttgatgatgcctctattaatagctacagtgtttccgatgggtctacatccagaagctccaggtcacgtaagaagctgaggaccaccaagaagaagaagaagggggaggaggaggtgacagcagtggacggctacgaaacagatcaccaagactactgtgaagtgtgtcagcaagggggagaaataatcctttgcgacacttgtccacgcgcttatcacatggtctgtctcgaccccgacatggaaaaggctcctgagggaaaatggtcatgccctcattgcgagaaggagggcatacaatgggaggcaaaagaagacaattcagagggcgaggagattctggaagaggttgggggtgatttagaagaggaagacgaccatcatatggagttctgtagggtgtgcaaggatggaggggaactgctgtgctgcgacacctgcccctcatcataccatatccattgcctcaatcccccactccctgagatcccgaacggcgaatggctgtgcccgcgttgtacctgtccagcacttaagggtaaggtgcagaaaattttgatatggaagtgggggcagcctccgtccccaacacccgtgcctagacccccagatgccgacccaaataccccttctcctaagccacttgagggcaggcccgagcgccaattctttgtaaagtggcagggtatgtcttactggcattgctcgtgggtgtctgaactccagctcgagctccactgtcaggtaatgttccggaactaccagagaaagaatgatatggatgagcctccatctggcgacttcgggggtgatgaggaaaagagccgaaagaggaaaaataaggaccctaagtttgcggagatggaggagcgcttttatcggtatggtattaaacctgagtggatgatgatccacagaatccttaaccatagcgtcgataaaaaaggccacgttcattacctgattaagtggagagatttgccttacgatcaggcctcctgggaatctgaagatgtcgagatccaggattatgacctttttaaacagtcctattggaatcatagagaactgatgcgaggcgaagagggcaggcccggtaagaaactgaagaaggttaagctccgcaaattggaacgtccccctgagacaccgactgttgatccgacagtgaaatatgaaaggcagccagagtatttggatgccacaggcggaacactccatccttaccaaatggagggactgaactggctgagattttcgtgggcacaggggactgacaccatcttggcggacgagatgggactgggcaagactgttcaaaccgccgtcttcttatactccttgtacaaagagggtcatagtaagggacccttccttgtgtctgcccctctcagtaccattattaattgggaacgcgagttcgaaatgtgggccccagacatgtacgtggtcacttatgtgggcgataaggatagccgcgctattatccgcgaaaacgaatttagttttgaggataacgccattcggggaggaaaaaaggccagtaggatgaaaaaagaggcaagtgtgaagtttcacgtgctccttacatcatacgagttgattacaattgatatggctatcctcggtagcattgactgggcttgtctcatcgtcgacgaagcgcatcgcttaaaaaacaatcagtctaaattcttccgagtgctcaatggatacagtcttcaacacaaactcctgctcacaggaacgccactccagaacaacttggaggagctcttccatcttctgaatttcttgacacccgaaagattccataatctggaggggtttttagaggagttcgcagatatagcgaaggaggatcaaataaagaaactgcatgacatgctcggtcctcacatgttacggaggctcaaggctgacgttttcaagaacatgcctagtaaaaccgaacttatcgtgagagttgaacttagccctatgcagaagaagtattacaaatacattttgacacgcaacttcgaggcccttaatgcccgaggaggtggcaatcaggtttcgctgctgaatgtcgtgatggaccttaaaaagtgctgcaaccatccttatttgtttcccgtagccgctatggaagccccaaaaatgcctaatggcatgtatgacggatccgcgctgattcgcgcttccggtaagctactgctcctgcagaagatgctgaaaaacctcaaagagggcggtcaccgagtcctgatttttagtcagatgacaaaaatgctggacctgctcgaggatttccttgagcacgaaggttacaaatacgaaagaattgacgggggaataacaggtaacatgcggcaagaggccatcgaccgctttaacgctcccggtgcacagcagttttgttttctgctgtctacccgagctggagggttgggcattaacctagcgaccgccgacactgttatcatttacgactcggactggaacccacataatgacattcaggcattttccagagcccaccgcatcgggcaaaataagaaggtgatgatttatcgttttgttacacgcgcttctgtcgaggaaagaattacacaggtcgccaagaaaaagatgatgttaacccatctagtggtgcgtccaggccttggctccaaaactgggtcaatgtctaagcaggaactcgatgatatactgaaatttggtactgaagagctcttcaaagacgaagccaccgacggcggaggcgacaataaggaaggagaagactcttccgttatccactacgatgataaagcaattgagagactgctcgatagaaaccaggatgagacagaagatacagagctccagggcatgaatgagtatctgtcctcctttaaggtggcgcagtatgtagtgcgcgaggaggagatgggcgaggaagaagaggtggaacgggagatcatcaaacaggaagagtccgtggatcccgactattgggaaaaactccttcgacatcactacgagcagcagcaggaggatctcgccagaaatttgggtaagggaaaacgcatcaggaaacaggtgaactacaatgatggtagccaagaggatcgcgactggcaggatgaccagagtgacaatcagtcagattatagtgtcgcctctgaggaaggcgacgaggatttcgatgaaagaagcgaagcccctagaaggccgtcgaggaagggcctgaggaatgataaggacaaaccgctgccaccgcttctggcgcgtgtgggaggcaacatcgaggtgttagggtttaatgctagacagaggaaggccttcctgaacgctataatgaggtacggaatgccccctcaggacgcgttcaccactcagtggttggtaagggacttgcgcggaaaatcggagaaggagtttaaggcctatgtctcgttattcatgagacatttgtgtgagccgggtgccgatggtgccgagacgttcgccgacggtgtgccaagggaggggttgagccgtcagcacgtcctcacacggattggcgtcatgtccctgatacgcaaaaaggtacaggagttcgagcacgtcaacggcagatggtcaatgcctgagttagctgaggttgaagaaaataagaagatgtctcagccgggatccccgagccccaagacgcccactccgtcaacccctggcgatacacagcccaatactcccgctccagtcccgccagccgaggacggaattaagatcgaggaaaacagcctgaaggaggaggagtcgatcgaaggggagaaggaggtaaaaagcaccgcgcctgagactgctatcgaatgtactcaggccccagcgccagcctctgaggacgagaaagtggtggtggagcctcccgagggcgaggaaaaagtggagaaagcagaagttaaggagaggacagaggagccgatggagaccgaaccaaaaggagctgcagatgtggaaaaagttgaggagaagagtgccatcgacttgacaccaattgtggtcgaggataaggaggagaaaaaagaagaagaagagaagaaggaagtcatgctgcagaacggcgagacccctaaggatttgaatgatgagaagcagaaaaaaaatatcaaacagagatttatgtttaacattgccgacggtggtttcactgagcttcactctctgtggcagaacgaagagcgagccgcaacagtgacaaagaaaacctatgagatttggcatcggagacatgactactggcttcttgcaggaattatcaaccacggctatgcgagatggcaggacatccaaaacgatcccaggtatgctatcttgaatgagccattcaaaggggagatgaatcggggtaattttcttgagattaagaataagtttctggcaagaagatttaaattactggaacaagcactggttattgaggagcagcttcggagggccgcttatttaaatatgtcggaggacccatcccatcccagcatggcccttaacactcggttcgctgaagtggaatgcctcgcagagagccaccagcatttgtctaaggagtctatggcagggaacaagcctgccaacgcagtgctgcacaaagtcttgaaacagctggaagagttactgtccgacatgaaagcggatgtgacaagactcccagcaacgatagctcgaattccccctgtcgcagttcggttgcagatgtccgaaagaaatatccttagcagactggcaaacagagccccagaacctacgccacaacaggtcgcgcaacagcagta

SEQ ID NO: 28058 - DNA, 5813 bp, synthetic construct
  misc_feature 1..5813: note = Description of Artificial Sequence: Synthetic coding sequence
  source 1..5813: mol_type = other DNA
atggcgtcgggactgggaagcccttcaccctgctccgctggatccgaggaagaagatatggacgctctgctcaacaatagcctgccccctcctcatcctgaggaccccgaagaagatctttccgagaccgagacgccgaaactcaagaagaaaaaaaagcccaagaagcccagggatccaaaaattccgaaatctaagcgccagaaaaaagaacgcatgctgctctgccggcagcttggggactcatctggggaaggacccgagttcgttgaggaagaggaagaagtggctctcagatctgactccgagggctctgattatactcccggtaagaagaagaagaagaagctgggccctaagaaagaaaaaaaatcaaaaagcaaacgaaaagaggaggaagaagaagaggacgacgacgatgattcaaaggagccaaaaagtagtgcacagctgttagaagactggggaatggaagacatcgaccacgttttctccgaggaggactacaggactctgacaaattataaggctttctctcaatttgtcaggcccttgatcgcagctaagaacccaaagattgctgtgagcaagatgatgatggttttaggcgctaagtggcgcgaattctcaaccaataacccttttaaggggtcatccggggcatccgtggctgctgcagctgctgctgctgtggcggtggtggagtccatggtcaccgcaacagaggtagcccctccccctcctccggtggaggtcccgatccgaaaagcaaagactaaagagggtaaaggcccaaacgctcggagaaagcccaagggatctcctcgcgtacccgacgcgaaaaagcctaaacccaagaaagtcgccccattaaaaatcaagctcggcggattcgggtctaagaggaagcgctccagcagtgaagatgatgatttagacgtagagagcgactttgacgatgccagcatcaactcgtactctgtgtccgacggcagcacctcgaggtcatctcgctctcgtaagaagttgcgcacaacgaagaaaaagaaaaagggggaagaagaggtcaccgctgtggatgggtacgagacggaccaccaggattattgcgaggtgtgccaacagggtggtgagattatcctgtgcgacacctgtccccgtgcctaccacatggtgtgtctcgatcctgacatggaaaaagccccagagggcaaatggtcatgtccacactgtgagaaggagggaatccaatgggaagcaaaggaagacaacagcgagggcgaagagatcctggaggaggttggtggggatctggaggaggaagacgatcaccatatggaattctgcagggtgtgtaaagatggaggagagctcctttgttgtgacacctgtcctagctcttaccatatacactgtctgaaccccccactacccgaaatacctaatggcgagtggctgtgcccgaggtgtacttgtcccgcactgaaaggaaaagtccagaaaatcctgatctggaaatggggccagcctccctctccaaccccagtacctcgccctcctgacgctgacccaaatacccctagccctaagcccctcgagggcaggcctgaaagacagttctttgtgaagtggcagggtatgagttattggcattgcagctgggtcagcgagttgcagctggagctgcattgtcaagttatgtttagaaactaccagcgcaaaaatgacatggatgagcctccgtccggagatttcggcggagatgaggagaaatcgcgcaaacggaagaacaaagaccctaaattcgccgaaatggaagaacgcttctaccggtatggtatcaagccagagtggatgatgatacaccggatcctgaaccactcagttgataaaaaaggccatgtacactacctgattaaatggagagatctgccctacgatcaggcctcatgggagtctgaggatgttgagattcaggattacgatctattcaagcagtcttattggaaccacagggaactcatgagaggcgaggagggacggcctggaaaaaaacttaagaaagtcaagctgcggaaattagagcggccacctgagacccccaccgttgatcccacagtgaaatacgaaagacagcccgaatatctcgacgctacagggggtactctccacccatatcagatggagggactgaactggctgcggttctcctgggcccaggggacagacactatactggccgatgaaatgggcttagggaagaccgtacaaaccgctgtgttcctctattctctgtacaaggaaggtcactcgaaagggcctttcctggtcagtgcccctctttccactattataaactgggaacgcgagtttgaaatgtgggcacccgacatgtacgtagtcacatacgttggagacaaagactcccgagcaattatccgggagaatgagttttcttttgaggataatgcaattagaggagggaagaaggcaagtaggatgaaaaaggaagcctcagtgaagttccacgtattgttgaccagctatgaattgatcaccatagacatggcgattctgggctcaatcgactgggcctgtctgatcgtcgacgaggcacacaggctgaagaacaatcagagtaaatttttccgggtgctcaacgggtacagtctgcaacataaactgttattgaccggcaccccgttacagaataatctggaagagctcttccaccttctgaattttcttacccccgaacgctttcacaatcttgaaggattcttagaagaatttgctgacatcgccaaagaagatcagatcaagaagttacacgatatgctaggacctcatatgctacggaggttaaaggcagacgtgttcaagaacatgccgagtaagactgaactgatcgtgcgggtcgagttgagccctatgcagaagaagtattacaagtatatactgactcggaacttcgaagcacttaacgccaggggcggtggaaatcaagtgtctctgctgaatgtggttatggatttaaagaagtgctgtaaccacccctatctgttcccagttgcggcaatggaggcccctaaaatgcctaacggaatgtatgatggaagcgcactgattcgagcctcagggaaactgttactcctgcagaagatgttaaaaaatcttaaagaggggggacatcgggtgctgatcttcagccagatgaccaagatgcttgacctactggaggattttctggagcacgaaggctacaagtacgagaggattgacggtggtatcacaggaaatatgcgccaggaggccatcgatcgattcaacgccccaggggctcagcagttctgctttctgctttccacacgcgcagggggacttgggatcaacctggctactgctgacaccgttattatttatgacagcgactggaatccacataatgacattcaggccttcagtcgggcacatcgaattggacagaataagaaagtgatgatttacaggttcgtcacccgagctagcgtggaagagaggataacacaagtggctaagaagaaaatgatgctgacccacctggtggtcaggcccggtttgggtagcaagactggcagtatgagcaaacaggaactggatgacattttgaagtttggcactgaagaactgttcaaggatgaagctactgatgggggaggcgacaataaagaaggcgaggacagctctgtcatccactatgacgacaaagccattgaacgtttgctggatcggaaccaggacgagactgaggatactgaattacaggggatgaacgagtatctgagctccttcaaagtcgcccaatacgtggtgcgagaggaggaaatgggtgaggaagaggaggttgagagggaaatcatcaagcaggaagagtccgttgacccagactactgggaaaagctgcttcggcatcactacgagcagcagcaggaggatttggctcggaatctgggaaagggcaagcgcatccgtaaacaggtaaattacaacgatggcagtcaggaagataggggcgtgtgcggcagaccgcgtccccctcctatggggaggtccacccgggctgttggtcctgcccatttgccctctctgccacccgactggcaggatgaccagtcagacaaccaaagtgattatagtgtagcgtccgaagagggcgacgaggattttgacgagcggagtgaagctcccaggcgacctagcaggaaaggcctgcgaaacgacaaggacaagccactgccacctctgctggcaagagtaggaggaaacatcgaagtgttgggatttaatgcacgtcaacgaaaagcttttctgaacgctattatgaggtacgggatgcccccacaggatgccttcactacgcagtggctggtgagagacctgcgcggaaagtccgagaaggagtttaaagcttatgtcagcctgtttatgcggcatctgtgcgagcccggtgcagacggggctgaaacttttgcagatggggtgccacgagaggggctttctaggcaacacgtgttgacaagaattggagtaatgtctctaatccgtaaaaaagtccaggagtttgagcatgtgaacggtcgttggtccatgccagaacttgcagaggtggaagagaacaaaaaaatgtcgcagcccggaagcccaagccccaaaaccccaacaccatctacgcccggagacacccagccaaacaccccggctcctgtgccaccagccgaggatggcattaaaatcgaagagaattcactcaaggaggaggaaagtatcgagggagaaaaggaagtaaaatccaccgcacccgagactgcaatcgagtgcactcaggctccagcgccagcttctgaagatgaaaaggtggtggttgaacctcccgaaggcgaagagaaggtggagaaagccgaggttaaagaaagaaccgaggaaccaatggaaaccgaacccaaaggcgcagctgatgtcgaaaaggttgaagagaagtccgccattgatctgactcctatagttgttgaggataaggaggagaaaaaagaggaagaggaaaagaaggaagtgatgctgcagaatggagaaacgcctaaagatctaaacgacgagaaacaaaagaagaatattaagcagaggtttatgttcaatattgcagatggcggatttacagaactgcactcactgtggcagaacgaggaacgggctgccaccgtcaccaaaaaaacatatgagatatggcatagacgccacgactactggttgctggctggtattatcaatcatggttacgctcgctggcaggatatacagaacgacccccgttacgccattctgaatgagccattcaaaggggagatgaaccgaggcaacttcctggagatcaaaaacaagttcctggccagacgctttaaactgctggagcaggcccttgtcatcgaggaacagttaagacgagcggcttatttgaacatgtcagaagacccgagtcacccttccatggctctgaataccagatttgcagaagtggagtgtctcgctgaatctcatcagcatctttccaaagagagcatggcaggtaacaagcccgctaacgccgtgttacacaaagtactgaaacagcttgaggaactgctctctgatatgaaggctgatgtcaccagactgccagccacaatcgctaggatccctcctgtggcagtgcgactgcagatgtccgagcggaacattctcagtcgcctggccaatcgggcacctgaaccgacaccacagcaggtcgcacagcaacaata

SEQ ID NO: 28059 - DNA, 1065 bp, synthetic construct
  misc_feature 1..1065: note = Description of Artificial Sequence: Synthetic coding sequence
  source 1..1065: mol_type = other DNA
atggcctctgggttaggatctccaagtccatgcagcgcaggaagcgaagaggaggatatggatgctctgttaaataacagccttccgccaccccaccccgagaacgaggaagatcctgaggaggatctgtccgagaccgagactcccaagcttaagaaaaaaaagaagccaaaaaaacccagggatccgaaaattcctaagtctaagcgtcaaaagaaagaacgcatgttgttgtgtaggcaactgggagattcatccggggagggccctgagttcgtggaagaagaggaagaggtggcccttaggtctgactcagagggttctgactacaccccgggtaaaaaaaagaagaaaaaactggggccaaagaaagagaaaaagtcaaagtcgaagagaaaagaggaggaggaggaagaagacgatgacgatgacagcaaggagcccaaatctagcgcccagttactggaagactggggaatggaagacatcgaccacgtgttctcagaggaggactacaggacactaacaaactacaaggctttttcgcaatttgttaggccgctcattgccgcaaaaaaccccaagattgctgtttcaaagatgatgatggtactgggcgctaagtggcgcgagttcagtacgaataacccatttaagggatcaagcggcgcttcagtggccgctgccgctgcggctgccgtcgctgtggtggaaagcatggtaaccgctactgaagttgcacctcctccacccccagtggaggtacctatccgcaaggccaaaactaaagaaggaaaggggccaaatgctagacggaagccaaagggatcgccacgcgtgccggacgcgaagaaaccgaagcctaagaaggtagccccattaaaaattaaactgggaggctttggaagtaagaggaagcgttcttcaagcgaagacgatgacttggacgtcgagagcgacttcgacgatgccagcattaactcttattctgtgagcgatggaagcacgtcacgcagcagccgctctaggaaaaagcttcggaccacaaagaagaagaagaagtag

SEQ ID NO: 28060 - DNA, 1065 bp, synthetic construct
  misc_feature 1..1065: note = Description of Artificial Sequence: Synthetic coding sequence
  source 1..1065: mol_type = other DNA
atggcttctggactgggatccccctctccttgctccgcaggcagcgaggaggaggacatggatgctctgttgaacaacagcttgccgcctccccaccccgaaaatgaagaagatccagaagaggacttgagcgaaaccgagacgccaaagctcaagaagaagaaaaaacccaagaagcctcgggacccgaagatccccaagtccaagaggcagaaaaaggagcgtatgctgctctgccggcagcttggggatagctcaggcgagggcccagagtttgtcgaagaagaagaggaggtggcgctcagaagtgactctgaggggtcggactataccccgggaaagaaaaaaaaaaaaaaactcgggccaaagaaggaaaagaaatctaagtctaaacggaaggaagaagaagaggaagaagatgatgatgatgactcaaaggaacccaagagctctgcccagctgcttgaagattgggggatggaagatatcgatcatgtattttccgaagaagattaccgtactctcacaaattataaagccttctcacagttcgttcggccactgatcgcggcaaaaaaccccaagatcgcagtctcaaagatgatgatggtgctgggcgctaaatggcgcgaattctccaccaacaatcctttcaagggatcatccggggcaagtgtggccgctgccgcagctgcagcagttgctgtagtcgagtcaatggttacagcaacagaagttgcgcctcccccaccccctgtcgaagtgccaatcaggaaagccaaaacgaaagaggggaagggcccaaacgcaaggagaaagcccaaagggagcccacgggtgccagacgccaaaaagcctaaaccaaaaaaagtcgcccctcttaagattaagttggggggtttcggctccaaacggaagaggtccagtagtgaggatgatgaccttgacgtggaaagcgatttcgatgacgcttcaataaattcttatagcgttagcgatgggagcacctcgaggtccagtcgcagcagaaagaaattgagaactacgaaaaaaaagaaaaaatag

SEQ ID NO: 28061 - DNA, 2562 bp, synthetic construct
  misc_feature 1..2562: note = Description of Artificial Sequence: Synthetic coding sequence
  source 1..2562: mol_type = other DNA
atgtttctgccacacatgaatcacctgacattggagcagacttttttctcacaggttctccctaaaacagtcaaactcttcgacgacatgatgtacgagctgaccagccaggcgagaggattaagctcacagaacctggagatacaaaccactctgaggaacatcttgcaaacgatggtgcagctgctgggggcactgacaggatgcgtgcagcacatctgtgccactcaggaatctattatcctagaaaatatccagtccttgccttcttctgtgttacatatcataaagtccacttttgtgcactgcaagaattctgagtccgtgtattcaggctgtttacatctggtgtctgatcttttgcaagctctattcaaggaggcctattcactgcagaagcagcttatggagctgcttgacatggtgtgcatggaccctctggtggacgacaacgacgatatactgaacatggtgatcgtaatccattctttattggatatatgttctgtgatctctagcatggatcatgcattccacgccaatacgtggaaatttattatcaagcaatcattgaagcaccagagtatcatcaagtcccaacttaagcataaagatatcatcactagcctgtgcgaagacattctgttttccttccatagctgccttcagttggctgagcagatgactcagagcgatgcacaggacaacgccgattaccggctgttccagaaaactctgaaactgtgtcgcttctttgcgaactcactgctgcactatgctaaagagtttcttccttttctgagcgattcttgctgtaccctccatcagttgtacttgcagattcatagtaagtttcccccatccctgtatgcaacgcgtatttcaaaggcccatcaagaggaaattgctggagcatttctggtgacattagatccactcatttctcagctgttaacctttcagccatttatgcaggtggtgctcgattcgaaattagacctcccatgcgagcttcaattcccacagtgtctactcctagtcgtggtaatggataaattgccgagtcagcccaaagaagttcaaacactgtggtgcaccgactcccaagtaagcgaaacgacaactaggatctcattactcaaagccgtcttctactccttcgaacagtgtagtggtgagctgtccctaccagtgcatcttcagggactcaaatcaaaaggaaaggccgaggtggctgtcacactataccagcacgtttgcgtccacctgtgtaccttcatcacttcgtttcatcctagcctttttgccgagcttgacgcagctctgttgaacgctgttctcagtgcaaatatgattacaagcctcctcgccatggacgcctggtgcttcctcgcccgatacggcacagctgaactttgcgctcaccacgtgacgatcgtggcccacctcatcaagtcctgcccgggagagtgttatcagctgatcaacttgagcattttactgaagcgactgttcttcttcatggccccaccccaccagcttgaatttatacagaagttcagcccgaaagaggcagagaatctgcctttatggcagcacatcagtttccaggcactgccacctgagttacgcgaacagacggtgcacgaagttactactgtaggcacagcagaatgcaggaaatggctgtctcgcagtcggaccctgggagagcttgaatcactcaataccgtgctgagtgcccttctcgcggtctgtaactcagcaggagaagccctggatactgggaaacagacagctattatcgaggtcgtctcgcaactatgggccttcctgaatataaagcaggttgctgaccagccttacgtgcaacagacattttcactgctgctgcccctccttggttttttcattcagaccctagatccaaaactgatactgcaggctgtgacacttcagacttcactgttaaaactcgagctacccgactatgtccggctggctatgttggattttgtgagcagcctaggcaaactcttcattcctgaggccatacaagacaggatccttccaaatcttagctgtatgtttgcactccttctagccgacagaagttggttactggagcaacataccctggaggcttttacccaatttgcagagggaaccaatcacgaggagattgtgcctcagtgtttgtcgtcagaagagaccaaaaataaggtcgtcagctttctggagaaaactggttttgtagacgaaaccgaggccgcaaaagtcgagcgggtcaagcaggagaaaggaatcttctgggaaccgtttgcaaacgtcactgttgaagaggctaagagaagttctttacagccttacgccaaaagggcccgtcaggagttcccctgggaagaggaataccgctcagcattgcatacgatcgctggcgctttggaagcaaccgaatctcttctccagaaggggccagcacccgcttggctttcaatggagatggaggccctacaagaacgcatggataaactcaagcgatacattcatacactgggatag

SEQ ID NO: 28062 - DNA, 2562 bp, synthetic construct
  misc_feature 1..2562: note = Description of Artificial Sequence: Synthetic coding sequence
  source 1..2562: mol_type = other DNA
atgtttctcccacatatgaaccatctcacactggagcaaacctttttttcacaggtcctgcctaaaaccgtcaagcttttcgacgatatgatgtacgaacttaccagccaggctcggggactctccagccagaatcttgagattcagacaaccctgcgcaacatactgcagactatggtccaactcctgggcgctcttacagggtgcgtgcagcacatctgtgcgactcaggagagcatcatccttgaaaacatccaatcactcccaagctcagttctgcatataatcaaaagtacatttgttcactgcaagaattcggaaagcgtgtactcaggctgcctgcatctggttagcgatcttctgcaggccttgttcaaggaagcttattccctgcaaaagcagctgatggagctgctggatatggtttgtatggatccgctggtagacgataacgatgatattctcaatatggtgatcgtgatacatagcctcttggacatctgttctgttatttcttccatggaccacgcatttcacgcaaatacctggaaatttattattaagcagtccctgaaacatcagtctatcatcaagagccaactgaaacataaagacatcataactagtctttgtgaggacattctcttttcgttccacagctgcctgcagctcgctgagcagatgacacagagcgacgctcaggacaacgcagattataggctattccagaaaactttaaagctgtgtcgcttttttgccaattccctactacactacgccaaggagtttcttccctttctgtcggatagctgctgcactttgcaccagttgtatctgcagatacactccaagtttccgccttcactttatgccaccaggatcagcaaagcccatcaggaggaaattgctggggcatttctagtgacattagacccactgatcagccagttgttaacattccagcctttcatgcaggtggtgcttgatagtaagctcgacctcccctgtgaacttcagttccctcaatgtctcctgctcgtggtggtaatggacaagctgccgagccagcctaaagaggtgcagactctgtggtgcacagattcacaggtgagcgaaaccaccacgcgcatcagtttacttaaggctgtgttctactcttttgagcagtgcagtggcgaattgtccctacctgtccacctgcaaggtcttaaaagtaagggtaaagcagaggtagccgtgacactgtaccaacacgtctgtgtccatctttgcactttcatcacaagctttcatccctcactgtttgccgagctggatgccgcactcttgaacgcggtcctatcagcaaacatgatcacaagcctgctggccatggacgcctggtgcttcttggcacgctacggcacggctgaactctgcgcccaccacgtcaccattgtcgcacatctgataaaaagctgcccaggggagtgctaccagctaattaacttatctatcctccttaaaagattgtttttcttcatggcgccacctcaccagctggaatttattcagaagtttagccccaaggaagctgagaacctcccactctggcagcacattagtttccaggccttacctccagaactccgtgaacagaccgtgcatgaggttacaactgtcgggacagcagagtgccggaagtggctgagtcgctctcgcacactgggagaacttgagagcctgaacacagttctgagcgccctcctcgctgtctgcaactcagctggcgaagctctagatacaggcaagcagacagccattattgaggttgttagtcagctgtgggcatttttgaatattaagcaagtagctgaccaaccatacgtgcagcaaactttttcgctcctgctgccgctgcttgggtttttcatccagaccctcgatccgaaactaattctgcaggctgttacgctgcagacctctcttttaaaacttgaattgcccgattatgtgcgactggcgatgctcgattttgtatcttcgctcggtaagctgttcataccggaggctatccaagataggatcctccccaacctgagctgtatgttcgctctgctactcgccgacagatcatggctgttagagcagcataccctcgaggcattcacccaattcgcggaaggcacgaatcatgaagagatcgtaccacaatgtctgagtagtgaagagaccaaaaacaaggtggtatcttttctggagaaaaccgggtttgtcgacgaaacggaagccgcaaaggttgagagggtcaagcaggagaaagggatcttttgggagccattcgccaacgtcacagtcgaagaggcaaagcggagctcgcttcagccttatgccaagagggccaggcaggagtttccttgggaggaagagtacagatctgccttacacaccatcgccggagccctcgaggctacggaaagtcttctccagaaggggcctgctcctgcttggttaagcatggagatggaggctcttcaagaaagaatggataagctgaagcgttacattcacactttggggtag

SEQ ID NO: 28063 - DNA, 993 bp, synthetic construct
  misc_feature 1..993: note = Description of Artificial Sequence: Synthetic coding sequence
  source 1..993: mol_type = other DNA
atgatgtacgaactgacgtcacaggcacgaggactatcctctcaaaacctggagatccaaactaccctgcgcaatattctccagaccatggtacagctgctgggagctctgactggctgtgtgcagcacatctgtgcaacccaggagtcgattatcctggagaacatccagtctctgcccagcagcgtcctgcatatcattaaatctactttcgttcactgcaagaattcggaatccgtgtacagtggatgtctccatttagtgagtgacctgctacaagccctgtttaaagaggcgtactcactccagaagcaactgatggaattactggacatggtgtgtatggatccgctggtggatgacaatgacgatatactcaacatggtcatagtgattcactccctcctggatatctgtagcgtgatcagcagtatggatcatgcttttcatgcaaacacttggaaattcatcatcaaacagtccttgaaacaccagtccatcattaagtctcaacttaagcacaaggacattatcaccagcctgtgcgaggatatcctcttcagttttcatagctgcttgcaactggctgagcagatgacacagagcgacgctcaggacaatgccgactaccgcttattccaaaaaactctgaaactgtgccgcttctttgccaacagcctgctccactacgccaaggagtttttgccattcctctctgacagctgctgcaccctgcatcagctctatttgcagatccacagtaagtttccccctagcttatatgcaacgcggatatcaaaggcccaccaggaggagatcgcgggagcattcctggtgacgctggacccgttgataagccagcttctgacctttcaaccttttatgcaggtggtcctcgatagcaagctgggctacctttactcaaagcccttttcaactgtcctcagctccgtcctggtgaatagtctgtatctcttcatctaccgtgattag

SEQ ID NO: 28064 - DNA, 1047 bp, synthetic construct
  misc_feature 1..1047: note = Description of Artificial Sequence: Synthetic coding sequence
  source 1..1047: mol_type = other DNA
atgtcccaggagggggctgtgccagcctcggcagttccattggaggagctgtccagctggcccgaggagctttgtaggcgcgagctgccatccgtcttaccacggttactgagtctttcacaacactctgactcgtggatcgagcacatccagatcctgaaaattattgtcgagatgttcctcccacatatgaaccatttgactttggagcaaacattctttagtcaggtgctgcctaagacagtgaagctgttcgacgatatgatgtacgagctgacctctcaggcccgaggtctcagttcacaaaacctggagattcagactacactgaggaatattctgcaaaccatggtccagctcctcggtgcccttacaggttgcgttcaacatatatgcgccacccaggaatctattatcctggagaatattcagtccctgccatcgtccgttctccacattataaagtccaccttcgtgcattgtaaaaacagcgaaagcgtctactccgggtgtcttcacttagtcagcgatctcctacaagcactctttaaagaagcttacagcctgcagaaacagttgatggaactcttggacatggtctgcatggaccctctagtcgacgacaatgatgacattttgaatatggtaatagtcatacactctctcctggacatttgctccgtgattagttcaatggaccacgcttttcatgctaacacttggaaatttatcatcaaacagtccctgaagcaccagtcgattataaagtcccagttgaaacacaaagacattattacctcactctgtgaggacattctcttctcgtttcacagctgcctgcagctggccgagcagatgacccagagcgacgcacaggataatgccgactatcgactgttccaaaagacattaaagctctgccgctttttcgcgaatagtctgctgcactacgccaaggaatttctgccatttctcagcgattcctgttgcactctccatcaactctacctgcagatccacagatggagcttcgctctcgctgtctag

SEQ ID NO: 28065 - DNA, 2100 bp, synthetic construct
  misc_feature 1..2100: note = Description of Artificial Sequence: Synthetic coding sequence
  source 1..2100: mol_type = other DNA
atgttgaaactgtcaggcgaggggctgcgggattcttaccatagtcgcagggaccagatcgctttgaagaacctccagagtgatgtgaccgaagccaagagtgactttacaaaagaaacactagccagtcagaatacgaagatgatctcctccattgttatatcacagatgatcgatgagaataaaagccgggagaacagggcaagccttcctcttccctgtgctatcgcccaaagtcgtgcccatcatgcaaagcagagcctggcaaaccggagtggcgttaacatacaccgtgccttcgccctgttgcccggacgactgggcatcccagcgccatcagatgagagaggcccagaagccgagttgccacctaaggaagaaagaccttgtggagggcctcggagaggattcgcctctattactatcaccgccaggcgggtcggcccacccgcacgcgcactggtgtggggtactgcaggtgacagcctgtgtcccaagtgtagagcggaagatacactgtttcaagctcccccagcgctggccaacggtgctcatcctggcagacatcagaggagtttcgcctgtaccgagttttctcgcaactcaagcgtggtcaggttgaaggtgccagaagcccataccgggctttgcgagagacgcaagtactgggttacgcatgccgacgataaggaaacttctttttcacccgacactccactgagtggtaaaagtcctttggtgttcagctcttgcgtacatttaagggtgagtcagcaatgtcccgactccatttattacgtggataaaagccttagtgtaccaatcgagccaccacagatagcctcccccaaaatgcatcgctctgtcctatccctgaatttgaattgctcgtctcaccggctgactgctgatggggtggacggattggtcaacagagagcccattagcgaggcacttaagcaggaacttctggagggggatcaagatttagttgggcagcgttggaatccagggctgcaggagtcccacctgaaggaaacaccttcgcttcggcgagtccacctcgggaccggggcatgcccctggagtggctccttccccttagaaaacacggagctggccaacgttggtgctaaccaggttaccgtgagaaagggtgaaaaggaccatactacccactgtcacgcgagcgaccatgcaaaccagctgagcatccacatacccggatggtcctatagagccgtccacaccaaagtcttcagcggcagttccaagaggcagcaaggcgaagtgtgtatgactgtgtctgcaccccctgttgagcagaaacctacgagacactttctgccaataggcgatagtagcccatcagacgattgtctctcacgggacctctccgagccaacagagagacggcatcagtcctttttaaagcccagaatcctgtttcctggcttcctatgcccactgcaggatgtgtgtgcctcccttcaagaagacaatggcgtgcagatcgagagcaaatttcccaagggggactacacctgctgtgacttggtcgtcaagatcaaggaatgtaagaaatccgaggacccaaccacccctgagcccagccctgccgctccctccccggcaccccgtgatggcgctggtagcccagggttgtccgaagattgctcagaatctcagcaaacccccgctcgaagtctgaccttgcaggaagccctggaggtgcggaaaccacagtttatttcaagaagtcaggaacggctgaaaaaactggaacatatggtgcaacagcgcaaggcacagaggaaggaggatctccggcaaaagcagtcccttcttcccatacgtactagcaaaaagcagttcaccataccacaccccctatccgacaatctctttaagcctaaggagcggtgcatctcagagaaggaaatgcacatgaggagcaagcgcatctacgacaacctgccagaggtgaaaaagaaaaaagaggaacagcggaagcgagttattcttcagtcaaaccgcttgagggccgaagtgttcaagaaacagttgctggaccagctgctgcagcggaatgcagtgtag

SEQ ID NO: 28066 - DNA, 1959 bp, synthetic construct
  misc_feature 1..1959: note = Description of Artificial Sequence: Synthetic coding sequence
  source 1..1959: mol_type = other DNA
atgattagcagtatagtgatctcccagatgatcgacgagaacaaatctcgagaaaacagagcctctctgccgctgccctgcgctattgcccagtcgcgtgcacatcacgccaaacagtccttagcaaatcggtccggcgtaaatatccatcgcgcatttgccctgttgcctgggcgtctcggaatacctgctcccagcgatgagcggggacctgaggcggaactccctccgaaggaggagcgaccatgtgggggacccagacggggtttcgcatcaataactattacagccaggcgggtgggcccaccagctcgtgccctggtgtggggcactgctggcgactcgttatgccccaaatgccgtgccgaagacaccctcttccaagcgcctcccgcattggctaacggggctcaccccggacgccaccagagatcattcgcatgcactgaatttagccgaaacagctccgtggttaggctgaaggtcccagaagcccacactggactgtgcgaacgtaggaaatactgggtgacccatgccgatgataaggaaacaagtttttcgcccgatacacctctgtcagggaagagccctcttgtgtttagctcatgcgttcacctaagggtcagtcagcaatgcccagactcaatctactatgttgataagagcctgtccgtgccaatcgaacctcctcagattgctagtcctaagatgcatcgtagcgtcctgagtctcaacctcaactgctccagccataggctgaccgctgacggggttgacggactggtaaatagggaacccatctcagaagcgcttaaacaggagctcttggaaggcgaccaggatctggtcgggcaaagatggaacccgggattgcaggaatcgcatctcaaagagactccatcattgcgtagagtccacctgggaacaggagcatgcccttggtctggatcctttcctctcgagaacacagagttggccaatgttggcgcaaatcaagttacagttcgtaagggagagaaagatcatactacccactgccacgcctccgatcacgctaaccagttgtctattcatatacctggctggtcttatagagccgtccacaccaaggtgttctccggatcctccaaaagacaacagggagaagtgtgcatgacagtgtcagccccacccgtcgaacagaaacctactcggcattttcttccaattggcgattccagcccgagcgacgactgcctgagccgggaccttagcgaaccaactgagcgcagacatcagagttttctcaagccacgcatcctatttccagggttcctatgtcctcttcaggatgtatgcgcttcacttcaggaggacaatggcgtccagatcgaatctaaatttcccaaaggggattacacatgttgtgatctcgtagtgaagatcaaagagtgtaaaaaatctgaagaccctactacccctgagcctagtccagccgctccctctcctgcccctagggatggggctggctctccaggcttgagcgaagactgttcagagagccaacagactcccgcacgtagccttactctacaagaagcgcttgaagtacgaaaaccgcagtttattagccgatcccaggaaaggctgaaaaaattggagcacatggttcaacagcggaaggcgcagcgaaaggaggatctgagacagaagcagtctttgctgcctatccgtacatctaagaaacagtttaccattccccaccctttatccgataatttgtttaagccaaaggaacgttgcatctcagaaaaagaaatgcacatgcggtcgaagcgaatttacgataacctcccggaggttaaaaagaagaaggaagagcaacgcaagagagtaattcttcagtccaatcgactgagagcagaagtgttcaagaaacagctgctcgatcagctcctgcaaaggaatgccgtatag

SEQ ID NO: 28067 - DNA, 1152 bp, synthetic construct
  misc_feature 1..1152: note = Description of Artificial Sequence: Synthetic coding sequence
  source 1..1152: mol_type = other DNA
atgatttcatccattgtgatctctcagatgatcgatgagaataaatcccgggagaacagggctagcttgcccctcccttgtgccatcgctcagagtagagcacaccacgctaaacagagccttgccaacagatctggagttaacatccacagagcatttgccttgcttcctggcagactgggcattccagcacctagtgatgagcgtggcccagaagcggagctacccccaaaagaggagcgcccttgcggaggccctcgaagaggcttcgccagtataactatcacagccaggagagtgggaccgcctgcacgcgcattggtgtggggaacagctggagactctctttgccctaagtgccgcgcagaagacacccttttccaagctcctcctgccctagcgaatggagctcaccccggaagacatcagaggtcctttgcctgcacagagttctctagaaacagcagcgtggtaagactgaaggtgccagaagcccataccggcctgtgtgagaggcgcaaatactgggtgactcatgcagatgacaaggagaccagcttttctccagatacacccctatcaggtaaatcccctcttgtgttttcctcttgcgtccacttgcgggtgtcacaacagtgtcctgatagtatctactacgtcgataagagcctgtcagtacctattgaacctccacagatcgccagcccaaaaatgcaccgctccgtgctctcgctgaatttgaactgcagcagccacaggctgactgccgacggcgtagacggactggttaatcgggaacctattagcgaggccctaaaacaggagttgctcgaaggggaccaggacttggtgggacagaggtggaaccctgggctccaggagagtcatctgaaggagacgccatctctaaggcgagtccacttaggcactggggcttgtccatggagcggcagttttcctctggagaacaccgagctcgccaacgttggcgcaaatcaggtgaccgtccggaaaggcgagaaggaccacactactcattgtcacgcctcggatcacgctaaccagctctcgatccacattcctggctggagttatagagctgatctgctgcaagagggccaacacaagcaactatctatgttccagcgctag

SEQ ID NO: 28068 - DNA, 1152 bp, synthetic construct
  misc_feature 1..1152: note = Description of Artificial Sequence: Synthetic coding sequence
  source 1..1152: mol_type = other DNA
atgatctcttccattgtcataagccaaatgatcgacgagaataagtccagggaaaatcgcgctagcctccccctaccgtgtgcaatcgcgcaatcacgggctcaccacgctaaacaatcactggccaatcggtccggagtgaacatccaccgcgctttcgctctgctgccaggacgcttaggaatccccgctccatcggatgagcgcggtccagaagcagaactgcctccaaaggaggaaagaccctgcggtggccctagaagaggatttgcctccatcacaatcaccgctcggcgtgtggggcctcctgcaagggcactggtgtgggggacggccggtgatagtttgtgccccaagtgtcgggctgaggacacactattccaagctcctccagccttggcaaacggtgcccaccccggaaggcaccaaaggagctttgcctgcacggagttctcccgcaacagctcggtggtgaggctaaaagtccccgaggcacatactggactgtgcgagaggcgcaagtattgggtcacccacgccgacgacaaggagacatctttttcaccagatactcccttgtccggtaagagcccgctggttttcagctcatgtgtgcacctgcgtgttagccagcaatgcccagacagcatctattacgtggacaaatccttatcggtgcccatcgaaccaccccaaatcgcaagcccgaagatgcatcgatcagtcctcagcctgaacctgaactgcagcagccatcggttgaccgccgacggcgtcgacggtctcgtgaacagggagcctatctccgaggccttgaagcaggagctactggaaggtgaccaggacctcgtggggcagaggtggaacccgggactccaggagtcccacctgaaggagactccctcacttagaagagtgcatcttgggactggggcatgcccctggagtgggtccttccctcttgaaaatacagagctggctaatgttggcgctaatcaagtgaccgtgcgaaaaggagagaaggaccacacgacacactgtcatgctagtgaccacgccaatcagttgagtatccatattcctgggtggtcatacagagcagatctgctacaggagggccagcataagcaactgagcatgttccaacgttag

SEQ ID NO: 28069 - DNA, 729 bp, synthetic construct
  misc_feature 1..729: note = Description of Artificial Sequence: Synthetic coding sequence
  source 1..729: mol_type = other DNA
tagtggtccgggtccttcccactggagaacacggagctggctaacgtaggggctaaccaggtcactgttcggaaaggcgaaaaggaccacactacacactgtcatgccagtgatcacgctaatcagctaagtatacatattcctggctggagttaccgggcaggagattacacctgctgcgacttggtggttaagataaaagagtgcaaaaagagtgaggatccaactactcccgagcccagtccagcggcacctagcccagccccacgggacggggcaggatcacctggactatccgaggactgcagcgagagccagcagaccccggctagatcactgaccctccaggaggctttggaagtgcggaaaccacagttcatcagccgaagccaggaacggctgaagaagttggaacatatggtccaacagcggaaggctcagagaaaagaggatctccgccaaaaacagagcctgctgccaataagaacatccaagaaacagttcaccattccacatcctctgtctgataacctgttcaagccaaaagaaagatgcatcagtgagaaagaaatgcacatgcggagcaaacgcatctatgataacctgccagaagtgaaaaaaaaaaaggaggagcagaggaagcgggtcatcctgcagtccaataggctgcgggcagaagttttcaaaaagcaacttctcgaccagctgctgcagagaaatgcagtgtag

SEQ ID NO: 28070 - DNA, 1989 bp, synthetic construct
  misc_feature 1..1989: note = Description of Artificial Sequence: Synthetic coding sequence
  source 1..1989: mol_type = other DNA
atgttaaaactgagcggggagggcctgagggactcttaccactcacggagggaccagattgcactgaagaatctccagagcgatgtcacagaagctaagtctgacttcactaaggaaaccctcgcctctcagaatacaaaaatgatcagctcaattgttatttctcagatgattgacgagaacaagagtcgggaaaacagggctagcctgcctttgccttgtgctattgcccagtctcgtgcgcaccacgcgaagcagtccctggcaaatcggagtggcgttaatatccatagggcatttgctctactgcctggcaggttggggattcctgctccatccgatgagagagggcctgaagctgagctgccccctaaggaggaacgtccctgtgggggaccccgtagagggttcgcctctattacaatcactgctagaagagtcggccctccagccagagcgttggtttggggtacggccggtgacagtttatgtcccaagtgccgagctgaagacacactgttccaagcccctccggcactcgctaacggcgctcaccccggacgccaccaaaggagcttcgcctgtacagagttcagtagaaattcttccgtcgttagactaaaggtgcctgaggcacacactggcctgtgtgagcgtaggaagtactgggtgactcatgcagatgacaaggagaccagcttttcccctgacacaccactcagtggcaaaagccctctggtgtttagcagctgtgttcacctgcgggtctctcagcagtgtccggactcgatctattacgtagataagtcactcagtgtaccaattgagccacctcagattgccagtcccaagatgcaccgctcagtcttgtccctaaacctgaactgcagctcccacagacttaccgctgacggagtggatggactagtcaatcgcgagcctatttccgaagctctgaagcaggaacttctggaaggcgaccaggacttagtaggtcaacgatggaaccctggactccaagaatctcatctgaaggagaccccttcattgcggagagtccatctgggcaccggcgcttgcccgtggagcggatcatttccattagagaatactgagctggccaacgtaggtgccaatcaggtgaccgttcggaagggcgagaaggatcacaccacccattgtcacgcttcagaccacgccaatcagctgtccatacacatccctggctggtcttaccgggctgtccacactaaggtgtttagcggcagctctaagcgccagcaaggcgaagtttgtatgactgtcagcgcgcctccagtagagcaaaagccaactaggcattttcttcctattggggattcctctccctctgacgattgcttatcccgtgatctgtctgaacctaccgaacgacggcaccagtcttttctgaagcctagaattctgttccctgggtttctgtgtccactccaggatgtgtgcgccagtcttcaggaggataacggagttcagattgaatccaaatttcccaaaggtgactacacatgttgcgacctcgttgtgaaaattaaggagtgtaagaagagcgaggatccaaccactccagaaccttcccccgctgctcccagcccagccccaagggacggtgccggatcccccggactcagcgaggactgctcagagtctcagcagacccccgcaaggtccttgacactgcaggaggccttagaggtgcggaaaccccagtttatctctcgctcacaggaacgattaaagaagctggagcacatggtgcagcaaaggaaagcccagcggaaggaagatctccggcagaagcagagtcttctccccatacgtacttctaagaagcagttcacaatcccacaccccctctccgataatctgtttaagcctaaagagagatgcattagtgaaaaggagatgcacatgcggtccaagagaatttacgacaatcttcctgaagtgtag

SEQ ID NO: 28071 - DNA, 1809 bp, synthetic construct
  misc_feature 1..1809: note = Description of Artificial Sequence: Synthetic coding sequence
  source 1..1809: mol_type = other DNA
atgcttaaactttccggcgaaggtctcagagattcttaccattctaggcgtgaccaaattgcgctgaagaacttgcagagcgatgtaacagaggcgaaatctgactttaccaaagaaaccttagccagtcagaacacaaaaatgatttccagcatcgtgattagccaaatgattgatgagaataaatctagggagaaccgcgcaagcctgcctctgccttgcgccattgcccagtcgagagcgcaccatgcaaagcagtcactggcaaatcgctcaggtgtgaatatccacagagcatttgcgctcctgccagggagactgggcatccccgcaccgtccgacgaaaggggcccagaggcagagctcccgccaaaggaggagcgcccatgtggtggcccacgccgagggtttgcatctatcacgattaccgcgagacgggtcggccctccagctagggcactagtttggggtaccgccggagattccctgtgccccaaatgccgcgcagaggacacgcttttccaagcacctccagctcttgctaacggagcccatcctggtagacaccaacgaagctttgcctgcacggaattctctagaaattcttccgtcgtccggttaaaagttccagaagctcacacgggtctctgtgagcgacgaaagtactgggtgacacacgctgatgacaaggagacatctttctcccccgacacacccttgtcgggtaagagcccccttgtatttagttcctgcgttcacctcagagttagtcaacagtgtccagactcaatttattacgtggacaaaagtttgtctgtgccaatcgaacccccacagattgcgtcgcccaagatgcaccgttccgtcctatccctgaacctgaattgttcatcacatcgcctcactgctgatggggtagatggtctggtcaaccgtgagcctatcagtgaggcgctgaaacaggagctgctggagggggaccaagaccttgtcgggcagaggtggaatccgggactccaggagtctcacctgaaggagactcctagcttacggcgtgtccatctaggtaccggcgcttgtccatggagtgggtctttccccctggagaataccgaactggcaaatgtcggcgcaaatcaggtcacagttaggaaaggagaaaaagaccataccacccattgtcatgcatctgatcatgctaatcagttgagcatccatattcctggctggtcttacagggcaggggattacacttgttgtgacctggtggttaaaatcaaggagtgtaagaagtcggaagatcccaccacgcccgagccatcccccgcagccccaagtccagcgcctcgggatggtgccggaagcccaggcctttcagaagactgctcagaaagccagcagacacccgctcgctcgcttactctgcaggaggctctcgaggtccggaaacctcagttcatctctaggtcacaggaacggctgaagaagcttgagcatatggtgcaacaaagaaaagcgcaaaggaaggaagatctcaggcagaaacagtcgctcctgcccatccggacatcgaaaaaacaattcaccattccccatcccctcagcgacaacttatttaagcctaaagaaagatgcatttccgaaaaggaaatgcacatgaggagcaaacgcatctacgacaacttgcccgaagttaaaaaaaaaaaggaagaacagcgcaaaagagtcatcctgcaatctaacaggctgagagcggaggtctttaaaaagcaattgttggatcagttgcttcaacgcaacgctgtgtag

SEQ ID NO: 28072 - DNA, 2391 bp, synthetic construct
  misc_feature 1..2391: note = Description of Artificial Sequence: Synthetic coding sequence
  source 1..2391: mol_type = other DNA
atgcagcacagtggaattcctactaagacgcatccgcagggttacgcggcaaggtacaccgagaccgccgtccaccggaccttccagattaagactttttccactgagctgaaaaaccacgttatggtgatggatttcgtcaagtccaactggttccctagccaacgaagggccaaagtttgtattattcacatgtgccagggactaaagaccgctgagcagacggccagccggtacgaaattcactcaaggctcttctcgtcacctaaggaccatagcgcttgggagcggaatgagagtctgagtaatgctggcttgagagattcctatcattctcggagagaccagatcgcacttaagaatctgcaaagcgatgtcacagaagcgaagagcgatttcaccaaagagactctcgcctctcagaacaccaaaatgatctcaagcatcgtgataagccaaatgatcgacgagaataagagccgtgaaaatcgggcttctttgcctttaccctgtgcgatcgctcagtccagagctcaccacgccaaacagagtctggctaaccgaagtggcgtcaacatccacagagcctttgcactgctgccaggtaggctcggtattccggcaccctctgacgaacggggaccggaggcagaactgcctcctaaagaggaacgtccttgtggcggacctaggagggggtttgctagcatcacaatcacagccaggcgggtcggccctccagcacgcgctttggtttggggcacagcaggggatagtctgtgtccaaagtgtcgggctgaagacacgctttttcaggcaccaccagccctagccaatggagctcacccaggccgacaccagagaagcttcgcctgcacggaattctcacggaacagctctgtggtgcgtttgaaagtgcccgaggcccacaccggcctatgtgagagaaggaagtactgggtgacccatgcagacgacaaggaaacctccttttctccagatacccccctatctgggaaaagtcctctggtgttttctagctgcgtccacttgagagtgagccaacagtgtccagatagcatctactacgttgataaatcacttagcgtgcccattgagcccccacagatagcctctccaaagatgcatcgatcagtgcttagcctcaacctcaattgttcttctcaccgactaacagcggacggcgtggacgggctcgtaaatcgcgaacccattagcgaagccctcaagcaagagctattggaaggggatcaagaccttgtcggtcagagatggaaccctggtctgcaggaatcccatctgaaagagaccccctctctgcgcagagtccaccttggcaccggggcatgcccatggagcggttccttccctctggaaaacacagagctcgctaatgtcggcgcaaaccaagtgaccgtgcggaaaggtgagaaggaccatacaacgcattgccatgcctcagatcatgcgaatcaattgtctattcacatacccggatggtcttaccgggctgtgcacaccaaagtattctcaggctcgagcaagagacagcagggcgaagtgtgcatgacagtgtctgccccacctgttgagcaaaagccaactcggcactttctgccaattggcgattcatctccatctgacgattgtctcagcagagatcttagcgagcctaccgaaagacgacaccaatccttccttaaacccaggatcctgtttcccggtttcctgtgccccctgcaggacgtgtgcgcatccctgcaggaagacaacggtgtccagatcgagtcaaaatttcctaaaggtgactacacctgctgcgatttggtggtaaagataaaggaatgcaagaaatccgaggatcctaccacccctgaaccgtccccagcagctcctagtccagcccctcgcgacggagccggaagtcccggtttgtctgaggactgtagcgaatcacaacagacgcctgcgcgaagcctgacattacaggaagctctcgaagtgcggaagcctcaattcatttcaaggtcccaggaaagactgaagaaactcgagcacatggttcagcaacgcaaggcacagcgtaaagaagacctcagacagaagcagagtctgttgcccatccggacaagcaagaagcaatttaccatccctcaccccctgtctgacaatctgtttaaaccaaaggagcggtgtataagtgaaaaggaaatgcatatgcgttctaaacgcatttatgataacttacccgaggtgaaaaaaaaaaaggaggaacagaggaagagagtgatcctgcagagtaaccgactgcgcgctgaggtgtttaagaagcagctactggatcagctgctgcagagaaatgctgtctag

SEQ ID NO: 28073 - DNA, 786 bp, synthetic construct
  misc_feature 1..786: note = Description of Artificial Sequence: Synthetic coding sequence
  source 1..786: mol_type = other DNA
atgtctacaactacatgtcaagtcgttgccttcttgctctccatcctcggactggctggttgtattgccgctactggaatggacatgtggagtacccaagacttgtatgacaatccagtgacctcagtcttccagtacgaagggttgtggcggagctgcgtgaggcagagttctggcttcacagagtgccgtccctactttactatactggggctgccagctatgctgcaggcagtccgggcactgatgattgttggaatcgtgctgggggcaatcggcctacttgtttccatctttgctctaaagtgcatccggattggctccatggaagatagtgcgaaggccaacatgaccttgacctcaggtattatgttcattgtctccgggctgtgcgcaatcgctggagtgtcagtttttgcgaatatgctcgtcacgaacttttggatgtccaccgccaacatgtatactggcatggggggtatggtgcagacggtgcagacaaggtatacttttggtgccgcactattcgtagggtgggtcgccggaggcttaacactcattgggggagtgatgatgtgtatcgcttgccgaggactggcccctgaagagacaaattacaaagctgtcagctatcacgcctctggacacagcgttgcatataagccaggaggctttaaggccagtacaggatttggaagtaacacgaaaaataagaagatctacgacgggggtgccagaaccgaagacgaagtccaaagttacccatcaaaacacgactacgtgtag

SEQ ID NO: 28074 - DNA, 786 bp, synthetic construct
  misc_feature 1..786: note = Description of Artificial Sequence: Synthetic coding sequence
  source 1..786: mol_type = other DNA
atggcagtgactgcatgtcaggggttgggtttcgttgtgtccctgatcggcatcgcgggaatcatcgctgccacctgcatggatcagtggtccactcaggacttatacaacaatcccgtcacagcagtcttcaactaccagggcctctggcgttcctgcgttagggagagctccggttttacagagtgcagagggtatttcacactgctagggctgccagcaatgttgcaggccgtgcgcgcactcatgatagtaggcattgtccttggtgctattgggctgcttgtctccatattcgcactcaagtgtattcggattggctcaatggaggactctgctaaggccaatatgacgttgacgtcaggcatcatgtttatcgtgagcgggctgtgtgcaattgctggcgtcagcgtttttgccaacatgctggtgacgaacttttggatgtctaccgctaacatgtacaccgggatgggaggtatggtgcaaaccgttcagacacgttacactttcggcgcagcactgttcgtaggctgggtggcgggtgggctaacccttatcggaggcgttatgatgtgtattgcttgtcgcggactagcaccagaggagacgaactataaagccgtgtcttaccatgcctccggacactctgttgcgtacaagcctggaggttttaaggcaagtacaggttttgggtcgaatactaaaaataagaagatctacgacggcggagctcgcaccgaggatgaggtgcagagttacccctctaaacatgattacgtgtag

SEQ ID NO: 28075 - DNA, 753 bp, synthetic construct
  misc_feature 1..753: note = Description of Artificial Sequence: Synthetic coding sequence
  source 1..753: mol_type = other DNA
atgtccactaccacatgccaggtcgtggccttcctgctcagcattcttggcttggcagggtgcatcgccgcaacaggcatggatatgtggagcacacaggatctgtacgataatcccgtgacaagtgtatttcagtatgagggtttgtggcgaagctgcgtccggcagagctcaggatttacggagtgtaggccctattttactatcttgggactgcctgcaatgctccaagcagtgcgggctttgatgatcgtggcaatctttgcactgaagtgcattcgaattggctctatggaggatagtgctaaggcgaacatgacactcacaagcgggatcatgttcatagtgtccggtctgtgtgcgattgctggagtatctgttttcgccaacatgctggttacgaacttttggatgtctacagcaaacatgtacaccggcatggggggtatggtgcagactgtacagactaggtatacttttggagccgctctgttcgtaggctgggtcgctggtggactcacccttatcgggggagtcatgatgtgtatcgcatgtcggggattggcaccggaggaaaccaactataaagccgtcagttaccatgctagcgggcattcggttgcctataagccaggcggattcaaggctagtactggatttggctccaacacaaagaacaaaaagatctatgacggtggcgcaagaacggaggacgaagtccagagttaccctagcaaacacgattacgtctag

SEQ ID NO: 28076 - DNA, 3000 bp, synthetic construct
  misc_feature 1..3000: note = Description of Artificial Sequence: Synthetic coding sequence
  source 1..3000: mol_type = other DNA
atgggaccggcaccactcccattgctgctgggactgtttttgccagcactgtggcgcagagccattactgaggccagagaggaagccaagccctaccccctgtttcccggtccattcccaggatcccttcagacagatcacaccccccttctctccctgcctcacgcctcggggtaccagccggctctcatgttctcccccacgcagcctggtagacctcataccggaaacgtggcaattcctcaggtgacatcagttgaaagcaagccactgccaccattggcgtttaaacacacagtagggcacatcattctgtcagagcacaagggagttaagtttaactgcagcatctctgttcccaatatatatcaggacactaccattagctggtggaaggacgggaaagaattactcggcgcacaccacgctatcacacaattttaccccgacgacgaggtaacagctattattgcctcattcagtatcacatccgtgcagagaagcgacaacggcagctatatctgtaagatgaagatcaacaacgaggagatcgtctctgatccaatctacattgaggtccagggcctgccccattttacaaagcaacctgaatctatgaatgttaccagaaatacagcattcaacctgacctgtcaggctgttggacctccagagcccgtgaatatcttctgggtgcagaattcctcccgcgttaatgaacagcccgaaaaatctccgtccgtgctgaccgtgcctggactgactgaaatggccgtctttagctgcgaggcacataatgataagggcctcaccgtatccaagggggtgcaaatcaacatcaaagctatcccgtcaccaccgactgaggtttccatacgcaacagcaccgctcactctatacttataagctgggttcccggttttgatgggtattcacctttccgtaattgtagcatacaggtgaaggaagctgaccccctatccaacggaagcgtgatgatcttcaacacttccgcactcccacatctgtaccagatcaagcagctccaagctctggccaattatagtattggtgtcagttgcatgaatgagataggctggtccgccgtcagcccgtggatcctggctagtaccaccgagggtgccccatctgtggcgccattgaatgtgacggtcttcctgaacgaatcaagtgacaacgttgatatacgctggatgaaaccacctaccaagcagcaggacggtgaactcgtggggtacagaatctcacatgtctggcagtctgctgggatttcaaaggagctgctggaggaggtggggcagaacggatcacgagcccgaatctcagtgcaggtgcataacgcgacctgcaccgtgagaatcgcagccgtaacacggggaggggtgggcccattttccgatcccgtcaagatttttattccagcccacggctgggtggactatgcacccagttcaactcctgctcctggcaacgccgaccccgtgttgatcatttttgggtgtttctgcggtttcatcctgatcggtctgatcctgtacattagcctggccattcgcaagagggtccaggaaactaagtttgggaatgcatttacagaggaggatagtgaactcgtggttaattacatcgcaaaaaaaagcttctgccggagagcaattgagctcacattacactccctgggtgtttcggaggagctccagaataagctggaagacgttgttattgacaggaacctcctcatactgggcaaaatcctgggggagggtgaattcggctctgtaatggaaggcaatttaaagcaggaggatggcacaagcttgaaagtcgcagtgaagacaatgaagcttgataactcctctcagcgagaaattgaagagttcctcagcgaagccgcttgcatgaaggatttttctcaccccaacgtgatccggctgctcggagtatgtattgaaatgtcaagtcaagggataccaaagccgatggttatcctgccctttatgaagtatggcgacctccacacctaccttctgtattcgcgacttgagacaggcccaaagcatatccctttgcaaaccctgctgaagttcatggtggacattgcgttggggatggagtacctgagcaatcgcaattttttacatcgcgatctagcagctcggaattgcatgttgcgagatgatatgacggtctgtgtcgccgattttgggctcagtaagaaaatttactcaggagattattacaggcaagggagaatcgccaagatgcccgtcaagtggatcgcgattgagtccctggccgatcgcgtgtacacctctaaatcagacgtttgggctttcggtgtgacaatgtgggagattgcaacgagaggtatgactccttaccccggagtccagaatcacgagatgtacgactacctgctgcatggacaccggctcaagcagccagaagactgcctcgacgagttgtacgagattatgtacagctgctggcgaaccgaccccctcgaccggcctaccttttctgtgctgcgactgcagctggaaaagttgctggagtctctcccagatgttcggaaccaggctgatgtcatctacgttaatactcagctgttagagagcagtgaagggcttgctcagggttccactttggcacctctggacctgaacatcgaccccgatagcattatcgcctcctgcacacccagggcagccatatctgtcgttacagccgaagtacacgactccaaacctcacgaaggtaggtatatcctaaacggaggttctgaagagtgggaagacctgacttcagcaccttcggcggcagtcacagcagaaaagaattctgtccttcccggagagagactggttcgtaacggggttagttggtcacattcttccatgctgcccctgggctcatctctaccagacgagctgctgtttgccgacgactctagcgaaggatcggaagttctgatgtag

SEQ ID NO: 28077 - DNA, 1671 bp, synthetic construct
  misc_feature 1..1671: note = Description of Artificial Sequence: Synthetic coding sequence
  source 1..1671: mol_type = other DNA
atgaagccaccaacaaaacagcaagatggcgagctggtggggtacagaatttcgcacgtctggcaaagcgctgggatctccaaggaactcctagaggaggtagggcagaacggcagcagggccaggatctccgtgcaagtccacaatgccacttgtactgtcaggatcgccgctgttacccgcggaggggttggcccattctctgatcccgtcaagatcttcatacctgcacacggagaatcatacacacatgcccagattgccaggaatctgcataaagtgagaccggcatacatctcccttaccatatgtagcagcttgttacaggcatctgtgtctcacatattccagacgatgaccggcctcttagtctctaccaggcttgggagactgtgcccactgtttaactccggcgcttggcagaggcgatcctgcgcgcaccacttgtggctgctgctgtggatcttaatcggactgatcctatatatttctctggctatcagaaaaagagtccaggaaaccaagtttggcaatgcttttacggaggaggatagcgaactggttgtgaattacatcgcaaaaaaatctttttgtcgacgcgcaatagaattaacgctacactccctgggggtgtcggaagaactccagaataagctggaggatgtggtaattgataggaatcttctaatcttaggaaagattctcggtgagggagaatttggcagtgtgatggaggggaacctcaagcaggaggatggcacgtccctgaaggtcgccgttaagacaatgaagctggataactctagtcagagggagatagaggaattcctaagcgaggcggcttgtatgaaggacttctctcaccctaacgtgattaggctactcggaacttccgagaaatgtaggtgggttgccaagcgggctctgctgatctgttcagtccccaaggagaaaatcagcggcgtggataaaaactgcctacagatccacatccctctccagaccctccttaagtttatggtggatattgccctggggatggagtatctcagtaaccgcaatttccttcacagggatcttgctgcgcgaaactgtatgcttcgggatgatatgactgtttgcgtggcagatttcggacttagtaaaaaaatttactccggagattattaccgacaaggtaggatagcaaaaatgccagtcaaatggattgccattgagtcactggcggatcgcgtgtatacctctaagtcggacgtatgggctttcggcgtcaccatgtgggagatcgcaacccgcggtatgactccatatccaggcgtgcagaatcatgaaatgtacgactacctgctccacggccacaggttgaagcagcccactgcctggatgaactgtgatcaggttggaatgtgccggggagtggagccaaccgacacccccgctcaggaacccttccttatgtgggaaattgtctacgagtgtactctcgccggagagccaattcctgaccgcccaacattctccgttctgcgcttacaactggaaaagcttcttgaaagcctgcctgatgtgcgcaatcaggctgatgtgatctatgtaaatacccagctcctggagtcttctgaggggcttgcgctccatccttgctccacagggttggaacatcgcccatag

SEQ ID NO: 28078 - DNA, 2472 bp, synthetic construct
  misc_feature 1..2472: note = Description of Artificial Sequence: Synthetic coding sequence
  source 1..2472: mol_type = other DNA
atgaagataaacaacgaagaaatagtttccgatcccatatacatcgaagttcagggccttcctcactttacaaagcagcccgagagcatgaacgtgacaagaaacaccgcattcaatctgacttgtcaagcagttggtccacctgaacctgttaatattttctgggtgcagaactcatccagagtgaacgaacaaccggaaaaaagtccaagtgtgctcactgtacctggattaacagagatggcagtctttagctgtgaggctcacaatgacaaagggttaacggtgagcaagggagtgcagatcaacataaaggcgattcccagtcctcccactgaggtgagcattcggaacagtaccgcgcacagtatccttatctcctgggtccctggttttgacggctattccccgttccggaactgttcaatacaggttaaagaggccgatcccctgagcaatggctcagtgatgattttcaacactagcgcgctgcctcacctgtatcaaatcaaacagttgcaggcccttgccaattattccataggcgtaagctgcatgaatgagattggatggtccgccgtaagtccgtggattctggctagtacgaccgagggggctccctctgtcgccccactcaatgtcactgtgtttctgaatgaatcatctgacaatgtggacattcgatggatgaaaccacccacaaaacagcaggatggggagcttgttggatacaggattagtcacgtgtggcagagcgcaggtatcagcaaggaactgctggaggaggtgggccaaaacgggagtcgggcacgtatatcggtccaagtgcataacgcaacatgtaccgtgagaattgccgctgtgacccggggtggcgtaggccctttcagcgaccccgtaaaaatctttatccccgctcatggctgggtcgattatgcgccaagttcgaccccagcgccaggcaatgctgaccccgttctgatcatattcggctgcttttgcggtttcatcctcataggattgattttgtacatcagtctggctattcgcaaaagggtgcaggaaaccaagtttggcaatgcgttcaccgaagaagatagtgaacttgtggtgaactatatagccaagaaaagcttttgtaggcgcgctatcgagctcaccctccacagcctcggagtgagcgaggagttacagaacaagctggaagacgttgtaatcgataggaatctcctgatcctgggcaagattctgggggagggcgaatttgggtctgttatggagggaaacctgaagcaggaggacggcacttcactaaaggtggccgtcaagaccatgaaactggataactcctcacagcgggagattgaggagttcttaagcgaagcagcttgcatgaaagacttttcccaccctaatgtcatacgtctgctgggcgtctgcatcgagatgtcctcccagggaattcccaaacccatggttatcctgcctttcatgaagtacggagacctccacacatatctgctgtactctaggctggaaactgggccaaagcacattccactgcagacattgctgaagttcatggtcgacattgctttagggatggagtacctaagcaaccggaactttttacatcgcgacctggctgcccgaaactgtatgctgagggatgacatgacagtgtgcgttgcagattttggactgtctaagaaaatttacagcggagactattatcgccagggacgcattgctaaaatgcctgtgaagtggattgcaatagaatcccttgccgatagggtatatacatccaaaagcgatgtctgggcgttcggtgtgactatgtgggaaatcgcgactagaggaatgactccgtatcctggggttcagaaccacgagatgtatgactacctgttgcatggacatagattaaagcagcccgaggattgtctggacgaactgtacgagattatgtactcatgctggagaacagacccactcgaccggcctacatttagtgtcctgcggttgcaactcgaaaaactgctcgaatctcttcccgacgtacggaatcaagcagatgtgatatacgtgaacacacagctcctggagtcgtccgaaggtcttgcacagggctccaccttggccccactcgatctgaacattgatccggacagtattatcgcttcttgtactcctagggccgcaatctctgtggtaaccgccgaagtgcacgatagtaaaccccacgagggcaggtacattttgaacggcggatctgaggaatgggaagatttgactagtgctccatccgccgcagttaccgctgagaagaactccgtgttacctggcgagcggctggttaggaatggcgtaagctggagccacagttccatgctccctctcggctcgagcctgcccgacgagctccttttcgcagacgattctagcgagggtagcgaagtgttaatgtag

SEQ ID NO: 28079 - DNA, 3000 bp, synthetic construct
  misc_feature 1..3000: note = Description of Artificial Sequence: Synthetic coding sequence
  source 1..3000: mol_type = other DNA
atgggccctgccccattgccactattgctgggactcttcctgcccgcactgtggagaagagccatcaccgaggccagagaagaggccaagccttatcctctgttccccggtccatttcccggatcgcttcaaaccgaccacacacccttactttccctgccccatgccagtgggtaccagcctgccctgatgttttctccgactcagccaggcaggccccacactggcaacgtggcaatcccacaggttacctcagttgaatctaaacctcttcctccactggctttcaagcacactgtggggcacataattctctctgaacataagggtgtgaagttcaattgctctattagtgtacccaatatttaccaggacacgaccatcagctggtggaaagatggaaaggagctcctcggagcccatcacgctattacccaattctacccggatgatgaggtgacggccattattgctagtttctccattacaagtgttcagcggtccgataatggaagctatatatgcaaaatgaagattaataatgaggagatagtcagcgaccctatttatatagaagtgcagggcctcccacatttcactaaacaacctgaaagcatgaacgtgactcggaacaccgcctttaaccttacttgccaggcagtcgggcctcccgaaccagtgaatatcttttgggtccagaattctagtcgagtgaatgagcagcctgagaagagccctagcgttctgacagtgccgggattgacagagatggctgtctttagctgcgaagcgcataacgataagggccttacagtcagcaaaggggtccagataaacatcaaggccatcccaagtccgccaacagaagtgtccatacggaacagtacagcccattccattctgattagttgggtgccagggtttgatggctactctcccttcaggaactgctcaatccaggttaaggaggcagatcctctgagtaatggctcagttatgatctttaatacctccgctttgccccatctatatcagataaaacaactgcaggctctcgcaaattactcaattggggttagctgcatgaatgaaattgggtggtcggcagtcagcccatggatccttgcctcgactactgaaggtgcaccgagtgtcgcacccctgaacgtgaccgtgttcctgaatgagtcatccgacaatgtcgacattcggtggatgaagccgcctacaaaacagcaggacggagaattggtgggataccggatctcccacgtctggcagtcggccggtatctccaaggaactactggaggaggtgggccagaatggctcccgcgcacgcatcagtgtccaggtacacaatgctacttgtaccgttaggatcgccgctgttacgaggggaggcgttggccctttctcggatcccgttaaaatcttcattccagcccacggttgggtggactatgctcccagtagtacaccggcacctggcaacgccgatcctgtgctgattatttttggatgcttctgtgggtttatattaatcggcctgatcctgtacatctcattagcgatcagaaagcgcgtacaggagaccaaattcggcaatgcctttactgaggaggattctgagctggttgtcaattacatcgcgaagaagtcgttttgtcggcgagcaatcgaattgacactccacagcctgggagtgtctgaggagctgcaaaataagctggaagacgtcgtgattgacaggaatctactaattttgggaaaaatcctcggcgaaggggagtttgggtctgtaatggagggaaatctgaaacaggaagatggtacctccctgaaagttgcagtcaagacgatgaaactggacaactcgtcacagcgtgaaatcgaagagtttctgtcggaagccgcatgtatgaaagatttttcccaccccaacgtgattaggctgctcggagtttgcatagagatgtcctcacaaggcatccctaaaccaatggtgattcttccttttatgaagtatggggatctgcacacataccttttgtactcacggttggaaaccggacccaaacacatcccgttgcagaccctgctcaaattcatggtggatatcgcgcttggtatggaatacctgagtaaccggaattttctgcatagagatctcgccgcacgaaattgtatgctgcgagacgacatgacagtctgcgtcgccgactttggactgtctaagaaaatctattctggagattactatcggcagggaagaatagctaaaatgcccgttaagtggatcgccattgagtccctagctgatagggtttacaccagcaagtccgatgtgtgggcctttggagtgaccatgtgggaaattgcaacaaggggaatgaccccctatccaggtgtccagaaccatgaaatgtacgattatttgctacacggccatcgcttaaagcaacccgaggattgtctcgacgagctctatgaaatcatgtattcctgctggcgcactgatcccctagataggccaacctttagcgtactgaggcttcagctcgagaagcttctggagtctcttcccgacgtgcgaaatcaagcagacgtgatatatgttaacacccagctgctagaaagctccgagggcttggcccagggctccactctagccccactggacctgaacatagaccccgacagtattattgcttcctgcacacccagagctgctatctctgttgttaccgctgaggtgcacgactccaagccacacgaggggcgttatatcctgaacggcggatccgaagagtgggaagatctgacatccgccccatcagccgctgttaccgctgagaagaattcggtcctacccggagagcgcctggtgcgtaacggcgtgtcgtggagtcactcttctatgctcccactaggatcgtcactccctgacgaacttctgtttgcagacgacagctccgaaggctcggaggtgcttatgtag

SEQ ID NO: 28080 - DNA, 501 bp, synthetic construct
  misc_feature 1..501: note = Description of Artificial Sequence: Synthetic coding sequence
  source 1..501: mol_type = other DNA
atggccagcggagtggccgtatccgacggagtgattaaggtgttcaacgacatgaaggtgcggaaatcctcaactccagaggaagtgaagaaaagaaaaaaggccgtgctgttttgcctgagtgaagacaaaaaaaacatcatcttagaagagggcaaggagatactggtgggagatgtgggccagaccgtcgacgatccttatgccactttcgtgaagatgctccccgacaaagattgtcggtatgctctgtacgatgcgacatatgagaccaaagagtccaagaaggaggacctcgtattcatattttgggcccctgaaagtgcccctctcaagagcaaaatgatctatgcctctagcaaggacgctatcaagaagaagttaacaggaattaagcacgaactgcaagctaactgctacgaggaggtgaaggatcggtgcaccttggccgaaaaactagggggaagcgccgtgataagcttggagggaaaaccactgtag

SEQ ID NO: 28081 - DNA, 501 bp, synthetic construct
  misc_feature 1..501: note = Description of Artificial Sequence: Synthetic coding sequence
  source 1..501: mol_type = other DNA
atggccagtggtgttgccgtctccgacggcgttatcaaggtgtttaacgatatgaaggtgaggaaatccagtaccccagaggaggtaaaaaagcggaagaaagctgtacttttttgtctttcagaagacaagaaaaacattatcctggaggaagggaaggagatcctggttggggatgtgggccagaccgtcgacgacccctacgctaccttcgtgaagatgctacccgataaggactgtaggtatgctctctatgatgcgacctacgaaacaaaggagagtaaaaaagaagatttggtgtttattttttgggccccagagagtgctccactgaagtccaaaatgatttacgcctcctcgaaagacgccatcaaaaagaaactcacaggaataaagcatgagctgcaggctaattgctacgaggaggtgaaggataggtgcacactcgcagaaaagctcggcggtagtgcagtgatctcactcgaggggaaacccctatag

SEQ ID NO: 28082 - DNA, 276 bp, synthetic construct
  misc_feature 1..276: note = Description of Artificial Sequence: Synthetic coding sequence
  source 1..276: mol_type = other DNA
atggcctccggggtggcggtgtccgacggcgtgattaaagtgttcaacgacatgaaagtgcgaaaaagcagcacccctgaggaagtgaaaaaacgaaagaaagcagtgcttttttgcttgtctgaggataagaaaaacatcatcctggaagagggcaaggaaattctcgtcggggacgtgggtcaaacggtcgacgatccctatgccaccttcgtgaaaatgttaccagataaggactgccggtacgccctatatgacgcgacctatgagacctag

SEQ ID NO: 28083 - DNA, 4101 bp, synthetic construct
  misc_feature 1..4101: note = Description of Artificial Sequence: Synthetic coding sequence
  source 1..4101: mol_type = other DNA
atgctctccttcgtggacacacgaacgctgctgctgctcgccgttactctgtgtcttgcgacctgccaaagtttacaggaggagacagtccggaaaggtcccgctggcgatcgtggccctcgcggagagcgcggtcccccagggcctcccggtcgcgatggggaggatgggccaactggcccaccgggaccacctggacctccaggcccaccgggactcgggggaaactttgcggctcaatacgatggtaagggggtggggttaggccctgggccaatgggactgatggggccacggggtcctcccggagctgctggagcgccaggtccccagggctttcaggggccagctggggagccgggagagcctggtcagacaggcccagcaggagctcgaggccctgcaggcccacccggaaaggctggggaggatggacatcccggaaaacccggaaggcctggcgagagaggggtggttggaccccagggcgcaagaggattccctggaacccccggactgccgggattcaaaggtatccgtggacacaatggcctggacggattgaagggacagcccggagccccaggggtgaaaggggagcccggagctccgggagagaacggcaccccgggacaaaccggcgctaggggcctacctggtgagcgtgggagagtaggggcacctggtcccgcaggggcaagaggttcggatggctccgtgggcccagtgggccctgcaggccctattgggtctgctggtccccctggctttccaggagctcctggaccaaagggtgaaattggagctgtggggaatgccggacctgcaggacccgcaggcccaagaggggaggtggggctgcccggtctttccggtccagtgggaccaccaggtaatccaggcgcaaacggcctgaccggagcaaagggggcagcgggactcccaggggtcgcgggagctcccggtctgcctggacctcggggaattcccggacccgtcggggcagctggcgcaactggcgcacgcggactggtgggtgagccaggccctgcgggttccaaaggggaaagcggcaacaaaggcgagcctgggtcggctggaccacagggccctccagggccatccggggaagaggggaaacgtggacctaacggggaagctggctccgccggaccccctggtcccccaggcctgagaggtagccctggctctagggggctgcccggtgctgacggccgtgccggtgtcatgggacctcctggatctagaggcgcttctggacctgccggagtgagagggccaaatggcgacgcaggccgacccggagaacctggcctgatgggacccagggggctgccaggttcccccggaaacatcggaccagcagggaaggaagggccagtcggtctccccggaattgatgggcgacctgggcctattggccctgctggcgctaggggcgagcctgggaatattggcttcccaggcccaaagggccctaccggggatcccggaaagaacggcgataaagggcacgcagggcttgctggcgctcggggagcccctggacctgatgggaataatggagcacagggccctcctggacctcagggagtccagggcggaaagggcgagcagggaccccctggtcccccaggattccagggccttccagggccttccgggccagctggagaggtgggtaagcccggagagagaggccttcacggcgaatttgggctgccaggacctgccggacctcggggtgaacgcggaccccctggcgagagcggcgcagcgggacctacaggacctattgggtctcgagggcctagcggccctccaggacccgatgggaacaagggggagcctggagtcgtgggcgcagttggaactgcaggcccatccgggccatctggtctgcctggcgaacgcggtgcggcagggattcccggtggcaagggcgaaaagggcgagccaggcttgagaggcgagatcggaaatccgggaagggatggggctcgaggtgctccaggtgccgtaggagcccctgggccagccggtgccacaggagacaggggggaagcgggagctgcgggaccagctggccctgccggacctagaggatctcctggcgagcgcggagaggtgggtcctgccggtcccaatggttttgccggacccgcaggtgctgcgggtcaaccgggtgctaaaggagagaggggcgctaaggggccaaagggagagaatggtgtggtcgggcctacagggcctgttggagcagccggtcctgccggacccaatggcccaccaggccctgctgggtcgcgaggagatggcggtccccctggaatgacgggcttccctggggctgcgggtaggacggggcctccgggaccatccggcatttctgggcctcccggtcctccaggcccagcaggtaaggagggtctcagagggccacgaggcgaccaaggcccagtgggccgtacaggcgaggtgggcgctgtgggccctccgggtttcgcaggcgagaaaggaccgagtggagaggccggtacagccggacctcccggtacccccggaccacagggactgctgggtgcacctggaatcctaggcctccctgggtctcgtggagagagagggttgccaggcgttgcaggcgctgtaggagaacctggaccgttgggcattgctggccctccaggcgctagagggcctccaggagcggtgggctccccgggagtcaacggggcaccaggagaggccggtcgagacgggaacccaggtaatgacggcccacctggcagagacggccagcctggacacaagggcgagcgtggttaccctggcaatatcgggccagtgggcgctgcaggagcacccggacctcatggacccgttggcccagctggaaagcacgggaacaggggggagactgggccaagcgggcctgtcggtcccgcaggagctgtgggaccaagaggaccatcaggaccccaggggatcaggggggacaaaggcgagccaggcgaaaaaggacccaggggactacctggccttaagggtcacaatgggctgcaagggctccctgggatagccggacatcacggcgaccagggggcacctggttctgtgggtccagctgggccaaggggcccagccggtccttccgggcctgccggtaaagacgggcgtacgggccaccccggaacggtagggcctgcaggcatcagagggccacagggccaccaaggacctgctggtcccccaggaccgcctggccctcctggtcctccgggagtgagcgggggtgggtacgactttgggtatgacggtgacttctatcgggcagaccagccacggtcagctccatctctgcgccctaaggattatgaggtggatgctactctcaagtcactgaataaccagatagagaccctgctgacacccgaaggcagccgtaaaaatccagccaggacctgtcgggacttacggctttcacacccagaatggagcagcggctactattggatcgatccgaatcaaggatgtacaatggatgcaataaaagtctactgcgattttagcaccggcgagacttgtattcgagctcagccagagaatatccctgccaaaaattggtaccgtagcagcaaagacaaaaagcatgtatggctgggggagactattaacgctggaagtcagttcgagtacaacgtcgagggcgttacctccaaggagatggctactcagctggcttttatgagactgctggccaattacgcctcccagaacataacctatcattgtaaaaactccattgcgtatatggacgaggaaaccggcaatctcaaaaaagctgtgatcctacaaggctcaaacgacgtggagcttgtggccgaaggtaacagtcggtttacttacacagttctggtggatggctgcagcaaaaaaactaacgagtgggggaaaactataatcgaatacaaaactaataaaccttcccggctcccgttcctggacattgcacccctggatatcggaggcgctgaccaagaattttttgtggacattggcccagtctgtttcaagtag

SEQ ID NO: 28084 - DNA, 4104 bp, synthetic construct
  misc_feature 1..4104: note = Description of Artificial Sequence: Synthetic coding sequence
  source 1..4104: mol_type = other DNA
atgctttctttcgtggacacccgtactctgttgctccttgccgtcaccctttgtctggccacctgtcagtgcacgcttgggggacagaccctgtctaaattcccaccttatctccatattgagcggagcgagcaaggacctcctggacccccaggccgtgatggagaagacggacctacaggacccccaggcccaccaggccctcccggaccccctggactgggcggaaatttcgccgcacagtatgacggcaagggcgtgggcctgggacctgggccaatggggctcatgggccctcgtggaccacctggggctgccggtgctcctggtccgcaggggttccagggcccagccggtgagcccggagagccaggtcagaccggcccagcaggagccaggggaccggcaggccctcccggtaaagcaggtgaggacggccacccagggaagcctggccgaccaggagagaggggggtggtggggcctcagggggcacggggattccctggaacaccgggactcccgggatttaaaggcattagaggacataatggactggacgggctgaagggccagcctggcgctccaggcgtaaaaggagagcctggcgctccgggtgagaatggcactcccggtcaaaccggggcaaggggacttcccggagagcgcggtagggtgggtgcgcctggaccagccggagccagaggctcagatggatcggtggggcctgtggggccagctggtcctatcggcagcgcaggacctccagggttccctggtgcaccgggaccaaagggagagataggggcagtggggaacgccggaccagccggacctgcaggtcctcggggtgaggtaggtctccccggactgtctggcccagtcggaccaccgggaaaccccggagcaaacggacttactggcgctaagggagcagccggactgccaggggtggctggagcccctggcctgcccggtcctcgcggtatccctggcccagtcggggcagcaggtgccaccggcgcaagaggcttggtgggggagcctggtcctgctggttccaagggcgaatctggaaataagggcgaaccagggagcgccggaccacaggggccacccggaccctccggcgaggaagggaagaggggccctaatggggaagccggttcggcagggccacccggaccaccgggtcttaggggttctcccggatcacggggattacccggagccgacggtagagccggtgtgatggggccaccaggtagtagaggcgcttcaggccctgccggtgtgcggggaccaaacggcgacgctggaaggccaggtgagccaggcctcatggggcctcgaggtctgcccggaagcccaggtaatattggtccggctggcaaagaggggcctgtgggcctccccggaatcgacggcaggccgggtccaattgggccagctggtgctcgcggtgaaccgggtaacattggcttccccggaccgaagggtcccacaggggatcccggaaagaatggcgataaaggtcacgcaggcttggctggtgctaggggcgctcccggtccagacgggaacaatggtgctcagggcccaccgggaccccagggtgtgcagggcggtaagggcgaacaagggccaccgggtcctccaggatttcagggactgccaggcccaagcggcccagcaggtgaggtcgggaaacctggcgagcggggactccacggagagtttggccttcctggccctgctgggccacgcggtgaaagaggcccaccgggtgagagcggtgctgctggaccaaccggtccaattgggtctcgcggtccaagcggtccacccggacccgatgggaacaaaggggaaccaggtgtggtgggggctgttgggaccgcaggcccatccggaccgtcaggcttacccggagagagaggggctgccggtattccaggcggtaagggtgagaagggtgaacccggactgcgcggtgaaatcggaaaccctggtcgcgacggcgcacgaggtgcgccaggcgctgtgggggctcctggacctgctggcgctaccggcgaccgcggagaggcaggcgctgccggacccgctggccctgccggtccacggggatctcccggagagcggggagaggttggacctgctggcccaaacggttttgccggacctgcaggggctgcgggtcaaccaggagcgaagggagagcggggagcgaaggggcctaagggagagaatggggtagtcggccctactggtcccgttggagccgctggacctgccggacctaacgggcctcccggtcccgctggcagtcgaggggacggcggacctcccggaatgaccgggtttcctggtgcagcaggccgaactggaccacctgggccaagtggaatctccgggccacctggacccccaggtcccgctggtaaggagggactgcgcggaccccgtggagatcagggccctgtcgggagaacgggagaggttggtgcggtgggaccaccgggtttcgccggtgagaaaggcccttccggcgaagccggaaccgctgggccacccggaactccagggcctcaggggctcctcggtgctcccggaatactgggtctcccaggctcgcgcggtgaacgcggtttgcccggtgtggctggcgctgtgggagaacccggtccactggggatcgcaggccctcccggagccaggggaccacccggtgcagtgggctcccctggagtgaatggtgccccaggcgaggctggcagggacggtaacccgggaaatgacgggccacctgggagggacggtcagcctgggcataagggcgagcgcggatacccaggaaatatcgggccagtcggggcagcaggagcccctggcccacatggaccagtggggccagcagggaagcatggaaatagaggcgagaccggcccttccggacccgtaggccctgctggggctgtgggacctagggggccatcaggtccccagggcattagaggcgataagggagagccaggtgaaaagggccctagagggcttcctgggctgaagggacataatggtctccagggattgccgggtatcgcagggcatcatggcgatcagggggctccgggtagcgttggcccagccggacctcggggacccgcaggaccatccggaccagcagggaaggatgggcgaaccggccatccaggtacagtcggaccagccggaattcgtggccctcaagggcatcagggacccgcaggaccccctgggccacccggtcccccaggtccccctggcgtgtcaggcggaggatacgacttcggctacgatggcgatttctaccgcgctgatcagcctcggtctgccccatctctccgacctaaagattatgaggttgacgcaacgctgaagtcgctgaacaaccaaattgagactttactcacccccgaaggcagccggaagaatcctgccaggacttgtagggacctacgccttagtcatccagagtggtcatcaggatactattggattgatccaaaccagggatgcaccatggacgcaatcaaggtgtattgcgatttttccaccggtgaaacctgtattcgagcccagccggaaaatatcccagccaaaaactggtaccgcagcagcaaggacaaaaagcacgtgtggctgggggaaacaattaatgctggcagccaatttgagtacaacgtcgagggagtgacatctaaagaaatggcaacccaactggcctttatgcgacttctggcaaattatgccagtcaaaatattacataccattgcaagaatagtattgcgtacatggacgaagaaacagggaatctgaagaaagcagtcattctccaagggagcaatgatgtggagctggtggctgagggtaatagcaggttcacttacactgtgctagttgatggctgttcaaagaaaacaaatgagtgggggaagacaattattgaatataaaacaaacaagccctctcgattaccatttctcgacattgccccacttgatatcggaggcgctgatcaggagttttttgtggatataggtccagtgtgtttcaagtag

SEQ ID NO: 28085 - DNA, 4401 bp, synthetic construct
  misc_feature 1..4401: note = Description of Artificial Sequence: Synthetic coding sequence
  source 1..4401: mol_type = other DNA
atgatgagtttcgtacagaaaggctcatggcttctgttagcgctactccacccaactataatcctcgctcagcaagaggccgtggaaggcggttgctcccatctaggtcaaagttatgccgatagagatgtctggaagcctgaaccgtgtcagatttgcgtgtgtgattcaggctcagtgctgtgtgacgacataatctgtgacgaccaggaacttgactgccccaacccagaaattccttttggggagtgttgtgccgtgtgcccccagccccctaccgcccctactagaccaccaaatggacagggaccccagggaccaaagggcgaccctgggcctccaggcatccctggacgcaacggagatccaggcattccagggcaacccggtagccccggatctcctggccctcccggaatatgcgagagttgtcctaccggtcctcagaactattcaccccaatatgactcttacgatgtcaagagtggtgttgcggtaggtggattggccggatacccaggcccagccggtccccctggcccacctggaccacccggtacctcagggcacccaggcagcccaggctcacccggttaccagggccctcccggtgagccaggccaagccggaccatctggtccccctggccctccaggagcaataggccctagcggacctgctggaaaggacggtgagtctggacgcccaggacgcccaggcgaaagaggcttgccgggaccacccggaatcaaaggcccagcaggtatccctggattcccaggcatgaagggacacagagggttcgacggccgtaatggtgagaaaggtgagacaggagcccctgggctgaagggagaaaatggcctgccaggagagaacggcgcacccggacccatgggacccaggggggctcccggagagcgcggtaggccagggttgccaggcgctgcaggggctcgcggtaacgatggcgcacgaggctccgatgggcagccaggacctccgggtcccccaggtactgccggattccctggatcaccgggagctaaaggggaagttggccctgccggttctcccggatctaatggagctccaggacaaaggggcgaaccaggtcctcaggggcatgccggtgcacagggtcccccaggccctccaggaataaacgggagtcccggtggtaagggcgagatggggccagccggaatccctggggcacctgggctgatgggagcaaggggcccacccggacccgctggagccaatggggcaccaggcctcagaggcggtgccggtgagcccggaaagaatggcgctaagggggaacctggaccccgtggagaaagaggcgaggccggtatcccaggcgtgcctggcgctaaaggggaggacggaaaggacggctcccctggcgaaccaggggcaaatggtctgccaggagctgccggtgagagaggcgctcccggatttcgcggaccggcaggtcccaatggcatccctggcgaaaaggggcctgccggagagcgtggtgctcccggtccggcagggcctaggggtgccgctggtgaaccaggcagggacggtgtgcccggaggacctggaatgcggggtatgccgggaagccctgggggacctggcagcgatggcaagccaggccctccaggttctcaaggggaatcagggaggcccggaccccctgggccttctggccctagagggcaacccggagttatggggttcccaggcccaaagggtaacgatggagcgccaggcaagaacggcgagcgcggtggacccggtgggccagggcctcaaggtccccctgggaaaaacggcgaaaccgggcctcagggacctcccggacccaccggacctggcggagacaagggggacaccggaccaccaggccctcagggtttgcaaggcttgccaggcaccgggggacccccaggtgagaacggcaagcccggtgagccgggacccaagggagatgcaggagccccaggtgcgcctgggggaaaaggcgacgctggggctccaggggagcgaggcccaccaggcctcgccggtgctcccggtcttagaggaggcgctggtccccctggtccagagggcggtaaaggggctgccggaccacccggaccacccggagccgcagggacccccggtctccagggcatgcccggagagcggggtgggctggggtcgcccggacctaagggggacaagggagaaccgggaggtcctggggcagacggggttccaggcaaagacggacctagaggacccactgggccaatcggccctcccggacccgctgggcagcccggagacaaaggagagggaggagcaccaggcctccccggaattgctggacctcgcggatctccgggtgagcggggtgagacgggccctcccggtccagctggattccctggcgcacctggccaaaacggtgagccgggtgggaaaggcgaaagaggagcaccaggcgagaagggagagggtgggccaccaggtgtggctgggcctccgggtggatcaggtcctgccggtccacctggaccccagggcgttaagggggaacgaggatcacctggaggtcccggagctgcgggttttcctggagccaggggactacctgggcctccagggtcaaatggcaacccagggccacccggtccctctggctcccctggaaaagacggcccacctgggcctgcgggaaacaccggtgcccctggcagccctggcgtgagtggacctaaaggagatgccggacaacccggagaaaaaggcagtcctggggctcagggacctcctggagctcctggtcccctcggaatcgcaggtattaccggcgctagaggcttggcaggtccaccagggatgccgggtcctcgagggtctccaggccctcagggagtcaaaggcgaatcaggcaagcccggagctaacggtctctcgggggagagagggccacctggtcctcagggactccccggtcttgccggaacagccggagaaccagggagagacggaaacccaggctccgatggcttgccaggccgagacggaagcccgggaggcaaaggcgaccggggagagaatggctctcccggtgcccctggtgcacccggacatcctggaccgcctgggcctgtggggccagctggtaagtcaggcgaccggggagagagcggaccagctggtcctgcaggtgcccctggaccggcaggaagtcgtggggcacctgggccacaggggccacggggagacaagggagagaccggagaacggggagcagccggaatcaaaggtcaccgaggtttccctggcaacccaggagctcctggcagtccgggacctgccggacaacagggagccatcgggtcacccggtcccgctggtccgaggggccctgtcggtcctagcggccctccaggaaaggacggaacaagcggccaccccggaccaatcggtccgccagggccaaggggaaaccgtggcgagagaggcagcgaggggtccccaggccaccctgggcagccaggaccgcctggaccgccaggagcgccaggaccgtgttgtggtggcgtcggggcagctgccattgccggaatcgggggtgagaaggctggaggctttgccccatattatggcgacgaacccatggactttaaaattaataccgatgaaataatgacttccctgaagagcgtcaatggacagatagaaagccttattagtccagatggctctaggaagaaccctgctagaaactgccgcgatctaaagttctgccatccagagctgaagagtggagagtactgggtggacccaaaccagggctgcaagttggacgccattaaggttttttgcaacatggaaacaggcgagacttgtatttctgcaaaccctctgaacgtaccaagaaagcattggtggaccgactcgtcagcagagaagaagcacgtgtggtttggagaaagtatggacgggggatttcaattctcttacggaaacccagagctgccagaagacgtgctagacgtgcatctggcctttctccggttacttagctcgagagcaagtcagaatataacttaccactgcaagaattctatcgcttacatggaccaagcctcaggcaacgtgaagaaggcactgaaactgatggggtcaaatgaaggcgagttcaaagcagagggcaattcaaagtttacatacactgtgctggaggacgggtgcacaaaacacaccggtgagtggtccaagacggttttcgaatacaggacacgtaaggctgtgaggttacctatagtggatattgcgccatacgatatagggggacctgatcaggagttcggcgttgatgttggccctgtgtgttttctgtag

SEQ ID NO: 28086 - DNA, 3492 bp, synthetic construct
  misc_feature 1..3492: note = Description of Artificial Sequence: Synthetic coding sequence
  source 1..3492: mol_type = other DNA
atgatgtccttcgtccaaaaagggagctggctgcttctggcactcctgcacccaactataatcctggcgcagcaggaggctgttgaagggggatgctcacacttaggacagtcatatgctgaccgggacgtatggaagcctgaaccatgccagatttgcgtgtgcgatagcggatccgtgctctgcgacgacattatatgcgatgatcaggagctggattgccccaacccagagatcccttttggcgagtgctgcgccgtgtgcccacagccacctactgctcccactcgcccacctaatgggcagggcccacaagggcctaaaggagatcccggacctccgggaattccagggagaaacggtgatcctggaatccctgggcagccaggatcacccggaagtcctgggccacccggtatctgcgagagttgtcccacagggcctcagaactattccccccaatacgatagttatgatgtgaaatcaggggtcgccgtgggtggcctggctggatacccaggccctgcagggccaccgggacccccaggtcctcctggtactagtggccacccaggcagtcctgggtcccctggctatcaagggccaccaggggaacctggacaggccggaccgtcagggcctccgggtccacctggagcaatcgggcctagcggccctgccggtaaggacggggagagtggcaggcctggcaggcctggtgagcggggtctgccaggcccacctgggatcaaggggcctgcaggaataccgggattcccagggatgaaagggcaccgcggtttcgatgggaggaatggagaaaaaggcgagaccggtgccccaggcctcaagggcgagaacggacttcccggtgaaaacggtgcacccggtccgatgggacccaggggtgcccctggagaacggggaagaccgggtcttccgggagctgctggtgcccgaggtaacgacggcgctcgaggaagcgatggacagccaggaccgccaggccctccgggaactgctggtttccccggatcccctggggcaaagggagaggtgggtccagcgggttcacctgggagcaacggcgcacccggacagcgcggtgagcctggaccacaggggcacgctggagcacaagggcctcccggaccgccaggtattaatggtagcccaggcggtaagggagaaatgggcccagccggaattccaggggctccaggcctcatgggagcgcgaggcccacccggacctgccggagcaaacggtgcccctgggctgcggggaggcgcaggcgaacctggcaaaaacggcgcaaagggcgaacccggacccaggggcgagcgaggagaagccggtattccaggggtacccggagccaagggtgaggatggcaaggacggtagccccggagagccaggagccaatggactccccggagcagcaggggagcggggagctcccggattccggggtcccgctggacccaacggaattccaggagaaaaaggccctgctggggagcgcggagccccaggacctgctgggcctagaggagcagccggtgagcctggcagagatggggttcctggtggtccgggaatgcgtggcatgccgggtagccctggaggcccaggcagtgacgggaagccaggcccacctggtagccaaggcgaatctggacgcccaggccctcccggaccgtctggtccacggggtcaacctggggttatgggatttcccggtccaaaaggcaacgacggggctccaggaaaaaacggggaaaggggaggcccaggcggacctgggcctcaggggccacctggtaaaaacggagagacaggccctcaggggccacctggcccaacaggacccggaggcgacaagggtgacacaggtcctcctggcccacagggtttgcagggcctacccggtactgggggtcctcctggagagaacggcaagcccggagagccaggtcccaagggagacgcaggcgctcctggggctccaggaggcaagggcgacgcaggggctcccggagagcggggaccccctgggctcgccggagctcctggattacgtggcggtgccggaccacccggaccagaaggaggtaagggcgctgccggtcccccaggtccgcctggagccgctggaacccctgggctccaagggatgccaggcgaaagaggaggcctgggaagccccggtccgaaaggcgacaagggagagcctggcggtcccggagccgatggcgtcccagggaaagatgggcctagaggacccacgggaccgattggaccgcctggcccagcaggacaacctggcgacaagggagaaggcggtgccccaggcctcccaggtattgctggcccacgtggatcccctggcgaaagaggtgaaaccggacctcccggacctgccggatttccaggcgcaccgggtcagaatggggagccgggagggaagggggagagaggggcaccgggagaaaaaggggaaggcggtcccccaggcctttttgggccacctggtaaggacggaaccagcgggcacccgggtcctatcggacctcccggaccacggggtaataggggagaacgtggctccgagggcagcccaggacatccaggtcaaccaggtccgcctggcccacctggtgccccaggcccatgttgcggtggggtgggcgcagcagctatcgccggaatcggtggggagaaagctggtggctttgccccttactacggggacgagcctatggacttcaagatcaatacggacgaaattatgactagcctgaaatctgtgaatgggcaaattgaatctttaataagccctgatggtagccgcaagaatccagcaagaaactgtcgggatctgaaattttgccatcccgaacttaagtccggcgagtactgggtagaccccaatcaggggtgcaagctcgacgctataaaagtgttttgtaatatggagaccggggagacctgcatttcagcgaatcctctgaacgtgcccagaaaacactggtggactgactcaagcgccgaaaagaagcacgtctggtttggagaatccatggacggcggatttcaatttagttatggaaatcctgaacttcccgaggatgttctcgacgtccacttggcctttctcaggcttctgtcttcacgggctagtcagaacatcacttatcactgcaagaattccatcgcttacatggatcaggccagcggcaatgtcaagaaggcattgaaactcatgggatcaaatgaaggtgagttcaaggccgaaggaaatagtaaattcacttatactgtactggaggacggttgtacaaagcacacaggagaatggtccaagactgtgttcgagtaccgaactcggaaagcggtgcggcttccgatcgtcgacatagctccctacgatatcggcggtccagatcaagagtttggcgtggatgtaggaccagtgtgcttcctgtag

SEQ ID NO: 28087 - DNA, 5139 bp, synthetic construct
  misc_feature 1..5139: note = Description of Artificial Sequence: Synthetic coding sequence
  source 1..5139: mol_type = other DNA
atgggacgggaccagcgagccgtcgcagggccagccctgagacgatggcttttgttgggcaccgtgacggtcggctttctggcacaaagcgtgcttgccggtgtgaaaaaatttgacgttccgtgtgggggtcgtgattgcagtggcggatgtcagtgttacccggagaagggaggcagaggccagcccggaccagtgggacctcaggggtacaacggccctcccggactccagggcttcccgggactgcagggacgcaaaggggacaagggggaacggggagcccctggggttactgggcctaaaggagacgtcggtgctcggggagtgagtggatttcccggtgccgacgggatcccaggacaccccggacagggaggtccgagaggcaggccaggctatgatggatgtaacgggacacaaggtgacagcggacctcagggaccgcctggttccgaaggcttcacaggtcccccaggtccgcagggtccaaaaggccagaagggagaaccctatgctctcccaaaggaggaaagagaccggtaccgcggtgagccaggtgagcctggtttagtaggcttccaggggccaccagggcgaccaggacacgtggggcaaatgggaccagtgggcgcaccaggcagaccagggcctagcagtgatgaaagctttaaaaataagctcaagaacaaaggcctgaattattatactgtgaacagcatgcaaggagatgtgggacagcccggtcccaatggaataccttccgacactcttcaccccattatagcgccaacaggagtcaccttccaccctgatcagtacaaaggcccagtgggctggcgtggcagaccttgggtcgctggcatttcgctgaagggggaggagggtattatgggattcccaggcctccgaggctacccagggctctccggtgaaaaagggtctcccggtcagaaagggtcaagaggcctggatgggtaccaggggcctgatggaccacggggacctaagggcgaggccggtgatcctggtccacccggactgccagcctatagtccccacccctccctcgcaaagggagcgcgaggcgatcccggattcccgggtgcgcagggagaacctggatcacaaggcgagcccggagacccaggcctcccagggccacctggcctgtctattggagacggagatcagagaaggggattgcctggcgagatggggccaaagggctttattggggatcccggaatcccggcattgtatggtggaccacctggacctgatggtaagcggggtccgcctgggcctccaggcttgcccggacctccgggtcctgacggattcctgttcggtttaaaaggagccaaggggcgtgccggatttcccggattgcccggtagtccaggcgctagaggccctaaaggctggaaaggagatgccggtgagtgtagatgtaccgaaggggatgaggccattaagggtctcccagggctcccgggtccaaagggatttgccggaatcaatggcgagcccggacggaagggcgaccgcggagaccccggtcagcacgggctgcccggattcccagggttgaaaggcgttccaggtaacatcggcgctccgggacccaagggtgctaagggcgacagtagaacgataaccactaaaggcgaaaggggccagcctggcgtgccgggtgtgccagggatgaagggcgatgacggctctccgggacgtgatggattggatggattcccaggcttacctggaccccctggtgacgggattaagggcccacctggagacccagggtacccaggcataccaggaacgaaaggcactcccggagagatgggcccaccgggactggggcttccagggctcaaaggacagcgtggcttccctggggacgcaggcctccctggacccccaggattcttaggtcctccgggtccagctggaactccagggcagattgattgcgacacagatgtcaagcgtgccgttggcggagatagacaagaagcaatccaacctggatgtattggcggaccaaagggactgcccggtctacccggacctccaggccctacaggggcaaagggcttgcggggaataccaggctttgccggagccgacggaggtccaggccctagggggttgcccggtgacgctggcagagaagggttcccagggcctccgggtttcatcggtcctcggggaagcaagggagccgtcggtctgccagggccagatgggagccctggaccaatcgggttacctggccctgacgggcctcccggagaacgtggcctgcccggagaagtcttaggcgcacagcccggacctcgcggagacgccggagtaccgggtcagcctggtctgaaggggttacccggtgataggggccctcctggcttccgcggtagtcaagggatgcctggaatgccaggactgaaaggccagcctggtttgcctggcccatcagggcagccagggctgtatggccctcctggcctgcatggattccctggggcacctggacaggaagggccactgggtctccctggtatacccggtcgagagggtcttcccggagacagaggtgatcctggcgataccggtgcacccggaccggtcgggatgaagggtctgtccggagaccggggtgacgctggatttacaggcgaacaggggcatcctggctctccaggctttaagggcattgatggcatgccagggacccccggactgaagggagacaggggcagccccggtatggacgggtttcagggaatgcccggactgaaaggtcgaccgggatttcccggaagtaagggtgaggccggattcttcggaattcccggactcaagggcttggctggagaacctgggttcaaggggagcagaggtgacccaggacctccaggccctcccccagttattttgcctggcatgaaagacataaagggggagaaaggggatgagggcccaatgggtcttaaaggctatttgggggcaaagggcatccagggaatgccagggattccaggcctgtctggcatcccaggcctcccaggaaggcctgggcacattaagggcgtgaagggagacatcggagtccctggcattcccggactccctggctttcccggtgtggcgggtccccctggaatcaccgggttcccgggattcattggctcaaggggagacaagggcgcaccagggagagccggactgtatggcgaaattggcgctaccggcgattttggtgatataggcgacacaatcaatctgcctggccgtcctgggttgaaaggggagcgaggaacaactggcatcccaggcttgaaagggttttttggggaaaaggggacagagggggacattggcttcccaggcattacgggcgtgaccggcgtgcaaggaccacccggattgaagggacagacgggattcccaggtctgacaggcccacctggatcccagggggaactgggcaggatcggactcccaggcggaaagggggacgatgggtggcctggggctcccggtctccccggattcccgggtctgagaggaataaggggactccatggactccccggaacgaaaggattcccgggatctccaggttccgatatccacggcgaccccggatttcctggcccacccggtgaacgtggagaccctggggaagcgaacacccttcctggcccagttggcgtccctggacagaaaggagaccagggcgcaccaggggaacgaggcccacctggttcccctggcttgcaggggtttccaggcatcaccccacccagcaatatctccggcgcacccggagacaagggcgcaccgggaatctttgggcttaaggggtatagaggtccgccaggtcccccaggatccgcggctctgcctggctccaagggtgatactggcaatcccggagccccaggaacgcctggcacaaaaggctgggccggtgacagcggcccacaaggcagaccaggggtcttcggcttgccgggagaaaagggtccccgaggcgaacagggttttatggggaatactgggcctaccggggctgtcggagatcgcggaccgaagggtcctaaaggcgatcccggattccccggagcgcctggaactgtgggagctccgggtatcgcaggtattcctcagaagattgcagtccagccaggcaccgtcgggcctcaggggaggcgcggtcctcccggtgcacccggagaaatggggccacagggccctcctggcgagcccggtttccggggagccccaggcaaggccggtccccagggcaggggcggagtgagcgcagtgccagggtttagaggggacgagggtcccattggacaccaggggcctatcgggcaggagggagccccaggacgaccgggatctccagggctgccgggtatgcccggacgttcggtatcgattggctacctgcttgtaaagcacagtcagactgaccaggagcctatgtgtccagtaggcatgaataagttgtggtccgggtattctctgctctatttcgaggggcaggagaaggcccataatcaggatcttggcctcgcaggaagttgcctcgcacgtttctcaaccatgcctttcctctactgcaatccaggtgacgtctgctactacgctagccggaatgacaaaagttactggctgtctacaactgctcccctgcctatgatgcctgttgctgaggatgaaataaagccatatatctcgcggtgctctgtgtgtgaagcccctgctattgcaatcgcggtacactctcaagacgtgtccatccctcactgccccgctggctggagatctctgtggataggttactctttcctaatgcacaccgctgccggagatgaggggggaggccagtccctggtcagtcctggatcttgcctggaagacttccgggctactcccttcattgagtgcaatgggggtcgcggaacctgtcattattacgccaataagtattcgttctggctcaccactattccagagcaaagtttccaggggtctccaagtgccgacacattaaaggccggactgatccgcactcacatttcgcgttgtcaggtgtgcatgaagaatctgtag

SEQ ID NO: 28088 - DNA, 5138 bp, synthetic construct
  misc_feature 1..5138: note = Description of Artificial Sequence: Synthetic coding sequence
  source 1..5138: mol_type = other DNA
atggggagggatcagagagctgtggcgggacccgctctgcggaggtggctcctgctcggaactgtcaccgtgggcttcctggcgcagagcgtgctcgctggcgtgaaaaaatttgacgtgccctgtggcggacgcgactgttccgggggttgtcaatgttacccagaaaaaggcggtcgcggacagccaggtccagtcggaccccagggatacaacggccctccgggactgcagggattcccaggtctgcaaggtcgcaagggagataaaggcgaacggggagctcctggcgttaccggccctaagggtgatgtcggggctcgcggagtctccgggtttccgggagccgacggtataccgggtcacccaggacagggcggtcctaggggacgcccaggctacgacggctgcaacgggacccagggtgattccgggccacagggcccacccggatcagagggatttaccggacctccgggtccacaggggcctaagggtcagaaaggagaaccttacgctctgccaaaagaggaacgggacagatacagaggtgagcccggagaacccggtctggtgggtttccagggcccaccgggaagacccggtcacgtaggacagatggggcctgtgggggcaccagggaggcctgggccacccggacctcccggtcctaagggccagcagggtaatcgaggcttgggattttacggcgtcaagggtgagaaaggcgatgtaggacagcctggcccaaacggaataccatccgacaccctgcatcccatcatagccccaacaggcgtcacatttcaccctgaccagtataagggagagaaaggctcagaaggggaacccggaattcgcggaattagtctgaagggagaggaaggaatcatggggtttcctggtctgagaggttatcctgggctatctggcgaaaaggggtctcctggtcagaagggcagccggggactcgacggctatcagggaccagacggcccaaggggaccgaagggagaggcgggtgatccagggccaccaggcctccctgcctattcgccccacccctcgctggccaaaggtgccaggggtgaccccggttttccgggagcacaaggggaacccggttcccaaggagagcctggggaccctgggctaccaggaccacctggcctgtccatcggcgacggcgatcagcgccgaggattgcccggtgagatgggtccaaagggattcattggcgatccaggcatccccgctctctatgggggtccaccagggccagatggaaaacggggaccccctggacctcccggacttcctgggccaccgggacctgacggattcctatttggactcaaaggtgcaaaaggaagagcaggattccccggactgcctggctctcccggtgcacgaggcccaaaaggttggaaaggcgatgccggagagtgccggtgcaccgaaggggatgaagcaattaagggcctccctggtttacctggaccaaaaggatttgcaggcattaatggagagccagggagaaagggggatcgcggagaccccggacagcacggattaccaggattccccggactgaagggtgtgcctggaaatatcggggcaccgggtcctaaaggggcaaagggagattctcggaccataaccaccaaaggagagcgtgggcagccaggggtgcctggagtgcctggcatgaagggagacgatggttcacctggccgtgatgggcttgacgggttccccggattgccaggccctcctggcgacgggatcaagggcccacccggagacccaggatatccgggtatacctggaactaagggtacacccggtgagatgggccctcctggtctggggcttccaggtctgaaagggcagcgaggattccccggagatgctggcctgcccggacctcctggattcctggggccacccggtcccgcaggaacacctggtcagatagactgtgacacagatgtcaagcgggcagtcggcggagaccgccaggaagcaattcagcccggttgcattggcggtcccaaggggttgcctggccttcctggaccacctggccctacaggcgcaaaaggcctccgcggaatccctggttttgctggtgccgatggcggacctggtcccagagggctgccaggagacgcagggagagaaggatttcctggcccaccaggcttcatcggacctcgcggatcgaagggtgctgtggggctccctggccctgatggctcccctggcccaatagggctgcccggtcctgacggcccacctggcgagagagggctcccgggagaagtgctcggagcacagcccggtccccgaggtgacgcaggcgtgccagggcaacccggtctcaaagggctgcctggagacagggggcctcccggatttagaggcagccaagggatgcccggtatgcccggtctgaagggacagcccggtctccctggacctagcggacagcctggcctctatggaccgccagggctccacgggttcccaggcgcacctggccaagaagggcctctgggactccccggtatcccgggacgagagggacttccaggcgaccggggagatccgggagacaccggtgcgcctggcccagtcgggatgaagggactgtctggggaccgaggagacgcaggtttcaccggagagcaggggcatcccggatcaccaggttttaaagggattgatggaatgcccggaacaccagggctgaaaggggacagaggctcccccggaatggacggatttcagggcatgcccggactgaagggacgcccagggttccctggatctaaaggagaggccggattcttcggtataccaggccttaagggcctggccggagaaccgggattcaaggggagccgaggcgatcctggccctcccggaccccctccagtgattctccccggaatgaaggatataaagggcgagaaaggcgatgagggacccatgggcctgaagggctacctgggggctaaggggatccagggcatgcccggaatccctggactgtccggaattcctggactccccggtaggccaggccatattaagggggtgaaaggggacattggagtacccggaattcccggtctcccaggattcccgggtgtagccggacccccaggaatcaccggctttcccggtttcatcggctcccggggtgataagggggctcccggaagagctgggctgtatggagaaataggcgctaccggcgatttcggcgatattggcgacaccatcaatctgccgggaaggccaggcctgaagggcgagagaggcacgacagggatcccgggactgaagggctttttcggagagaaagggaccgaaggagacattgggttcccagggattacgggtgtgacaggcgttcaagggcctccaggcctcaagggtcaaaccgggtttcctggactgactggtccccctggttcccagggtgaattgggcagaattggcctgccagggggtaagggcgacgatgggtggcctggtgcccctgggctgccaggcttccccggactgcgcggaatccggggactgcacggcttgcctggcaccaagggattccctggcagccctggttcagatatccatggcgatcctgggtttcccggaccaccaggagaaaggggggacccaggtgaggctaacactctacctgggccagtgggcgtgcctggacaaaagggggatcagggggctcctggcgaacgcggtccacccggatccccaggtttacagggcttccccggtataacacctccctccaatataagcggagcaccaggcgataaaggcgctcccggaatttttggactcaaggggtatagaggaccacctggcccacccggaagcgctgcgctccccggatctaagggggataccggcaaccccggtgctcctggtacgcccggaactaaagggtgggccggagactccggccctcagggcagaccaggtgtctttgggttaccaggtgagaagggacctaggggcgagcaagggttcatggggaatacagggccaacgggagccgttggagatcgtggacctaaaggacctaagggagaccctgggttccccggagctcctgggaccgtaggtgcccctggaatagccggtattccgcagaaaattgcagtgcagcccggaaccgtaggacctcaaggtaggcgaggccctcccggtgcacctggtgagatgggacctcaggggccacctggcgaacccggttttcgaggggctcctggcaaagctggtccgcagggcagaggaggcgtgtcggcagtccctggattcagaggcgacgaggggccaataggccatcaggggcctattggacaggagggggctcctggcaggccagggtcaccgggtcttcctgggatgcctgggagaagcgtgtcaatcggctacctcctcgttaaacattctcagaccgatcaggaaccgatgtgccccgtcggtatgaacaagctttggagcggttattcccttttgtatttcgaggggcaagagaaggcacataaccaggacttaggcctggccggatcctgcttagcgagattttccacaatgccctttttgtactgtaaccctggcgacgtctgttattatgcctctcggaacgataagtcctattggctgtcgactaccgcgccactaccaatgatgcctgtggcagaggatgaaatcaagccctacatttcacgctgctcagtgtgcgaggccccagctatcgccatcgccgtacactcacaggacgtatctattcctcactgcccagccggttggcgaagcctctggatagggtatagttttctgatgcatacagccgctggggatgaagggggaggccaaagcttggtgagcccaggatcttgcttggaggacttccgagcaactcctttcattgagtgtaacggcggaagaggaacatgtcactactacgcaaacaagtatagcttctggcttaccaccatcccagagcagagctttcaagggagcccctcggccgacacgctcaaggccggtctaatccggacgcacatttcacgttgtcaggtctgtatgaagaacctcta

SEQ ID NO: 28089 - DNA, 318 bp, synthetic construct
  misc_feature 1..318: note = Description of Artificial Sequence: Synthetic coding sequence
  source 1..318: mol_type = other DNA
atgggacgggaccagcgagccgtggcaggacccgctctgcgaaggtggctgctgctgggtacagtgacagtcggatttttggcccaatctgtgctggccggagtcaaaaagtttgacgtaccctgtggaggacgcgactgttccggcggatgccaatgctatccagaaaagggcggtcgagggcagccagggcctgttggccctcagggctacaatggtcccccaggactgcaaggtttccctggactgcagggtcgcaaaggcgataaaggggagagaggagcacctggcgtcacagggccaaaaggagacgtttag

SEQ ID NO: 28090 - DNA, 4497 bp, synthetic construct
  misc_feature 1..4497: note = Description of Artificial Sequence: Synthetic coding sequence
  source 1..4497: mol_type = other DNA
atgagcgctcgaaccgctccaagaccccaagtactgctccttccactccttctggtgctgctcgccgctgccccagctgcgagtaaagggtgtgtgtgcaaggacaaaggtcagtgcttttgtgatggggctaagggcgaaaagggagaaaagggttttcccggaccgcctggctctcccggtcaaaagggttttaccgggcctgagggcctacctggaccacagggcccaaagtccttccgcgcaattccttcctactcaggaggaaaatcacttcaaggtatctctggcctccctggtttctcaggaagtccagggcttcccggtacaccaggaaataccggaccttatggactggtcggcgtgccgggatgttctggtagtaagggcgagcagggctttcctgggctaccaggcaccctgggctaccctgggattccagggattcacaatctgaagattttcaaaggggctcccgcaaaagaggaggacatcgagctggatgccaaaggcgaccctgggctccctggcgcaccaggcccacagggcctgccgggaccacctgggttccccggtcctgtggggcctccaggccctcccggtttctttgggtttccgggtgcaatggggcctcggggacctaagagcttcgtgctaagttcaaggatatcgaccaagggggaaaaaggtgttaaaggactcaccgggcctccaggcccaccgggtacagtgattgttactctgactggacctgacaataggacggacctaaagggggaaaagggtgacaagggtgccatgggtgagcccggtccccctggcccaagtggccttccgggtgagtcatacggtagtgaaaagggggctcctggagatcctggtctgcaaggtaagcccggaaaggacggcgttccagggttcccaggctctgaaggcgtcaagggaaataggggatttccagggcttatgggtgaggatggaatcaaagaggagaaacgtgatgttgccatcgtctccttttctagcaaaactgaatattacgacacttatcaagaaaagggggacgagggcacgcccggacctccaggccctaggggggctcgaggccctcagggcaagaacaagttccgttgcatcccagggagccagggtagctctaggccaggcctaaggggagcgccaggctggcctgggttgaaaggtagtaagggggagagaggcagaccgggaaaggatgcaatgggcacccccggaagcccgggatgcgccggttcccccggtttgcccggaagtcccggaccacccggtcctcctggagatattgttttccgtaaggggcctcccggtgatcatggcctgcctggatatctgggcagtcccggtattccaggagttgatgggcctaagggcgaacctggactactgtgtacccagtgcccctacatcccaggtccccctggcttgccaggcttacccggtctgcatggtgttaagggtatccccggacgtcagggtgccgcaggcctgaagggctcacccggatctccgggtaataccggcctgccagggttccccggattcccaggcgcacagggggaccctgggctgaagggtgaaaagggagaaacgctccagcccgaaggacaggtaggggtgcccggagaccctggacttcgaggccaaccaggcaggaagggtctcgatgggatcccaggaactcccggtgtgaaaggtctgcctgggcctaaaggagaacttgccttgtctggagaaaagggtgaccaagggcctccgggagaccccggttctcctggatcacctggtccagctgggcctgccggaccccctggatatggcccacagggagagccaggtctgcaggggactcaaggagtgccaggggctcccggacctcccggtgaggcaggaccaaggggagagttatccgtgtccaccccagtgcccggtcccccagggccacctggcccacccggacatcctggacctcagggcccacccggtatcccaggatccctcggtaagtgcggggaccctgggctgcccggtcctgatggcgagcccggtattccgggaattggatttccaggccctccgggtcccaagggtgaccaggggttccctggaactaagggatccttgggctgtcctggaaaaatgggggagccaggattacccggaaaaccaggactgccgggagcaaaaggtgagccagccgtggcaatgcccggaggcccaggcacgcccggattcccaggtgaaagaggcaattctggtgaacacggcgagataggcttgccagggctgcccggtttaccaggcactcccggaaatgaagggttggacggccctaggggagacccaggccagccaggtcctccaggcgagcagggtccacctggccgatgcatcgagggacccagaggtgcccagggcctgccgggattaaacggcctgaaagggcaacaggggaggcgaggaaaaactggacccaagggggatcccggtattccaggactggacaggtccggattcccaggagaaactggtagccccggtatccctggacaccagggcgaaatgggacccctcggccagcgtggttatcctggcaatcctggaatcctgggacctcccggtgaagacggagtaatcggaatgatgggcttccctggcgcaatcgggccacctggacccccaggcaacccaggcacccccggacaaagaggctctccgggaatccccggagttaaagggcaacgcggaacacccggtgccaaaggggagcagggcgacaagggaaatcctggtcccagtgagatttcacatgtgatcggagacaaaggggaacccggtctgaaggggtttgcgggaaacccgggagaaaagggcaataggggcgtacctggcatgcctggtctgaagggactgaagggtctgccaggaccagcaggcccacctggcccacgcggagacctggggtctactgggaaccccggtgagccgggtttgagaggaatcccaggaagtatgggtaacatgggaatgccaggctctaaggggaagcggggtacattaggtttccccggacgggctggacgccctgggctgcctggcatccacggtctgcaaggagataagggggagccgggttattcagaggggactagacctggtccccctggacctacgggtgatcccggactgccgggtgacatgggcaagaaaggggaaatgggtcagcctggaccacctgggcacctgggtccggctggtcccgaaggagcgccaggttccccgggaagcccaggtctgcccggaaaacctggaccccacggagacctagggtttaaagggatcaagggtctacttggtccaccaggcatcaggggacctccgggactgcccggattcccaggttcacccggacccatgggcatccggggtgatcagggccgtgatggcatccccggacctgcaggcgaaaagggtgaaactggcctgctaagagcccctcccggtccccgaggcaatcccggagctcaaggagctaagggcgatcgtggagcaccaggttttccagggctcccgggtagaaaaggagccatgggagacgctggcccacgtggcccaaccggaattgagggcttccccggtccgcctggactcccaggtgccattattcctggtcagaccggaaatcggggaccaccaggatcaagaggttccccaggggctcccggtccacctgggccacccggatcccacgtgattggaataaagggtgacaaggggagcatggggcatccgggaccgaagggccctcccggaacagccggtgacatgggaccacccggacgcctgggtgcaccaggcacccctgggctcccaggacctcggggtgacccgggattccagggcttccccggagttaagggcgaaaaaggcaaccccggtttccttggctcaatcggtccccctggacctattgggccaaagggacctcctggagtgcgcggagatcctggcacgctcaaaatcatatctctgcctgggtcgcctggcccacctggtactcccggagaaccgggaatgcagggggagccagggccacctgggcctccaggcaacctggggccatgtggtcccaggggtaaacccggtaaagacgggaaaccaggcacacctggccctgccggagaaaaaggtaataagggttccaaaggggaacctggcccagcaggaagcgacgggttgcctggcctgaagggtaagcgaggagactcaggcagtcccgctacgtggactacaagggggtttgtgtttacacggcattctcagacaactgccattccctcatgtcccgaagggactgtacccctatattccggattcagttttttattcgtacagggcaatcaacgggcacacgggcaggatctcgatgctttattcgtaaaagttttgaggagtccctag

SEQ ID NO: 28091 - DNA, 4913 bp, synthetic construct
  misc_feature 1..4913: note = Description of Artificial Sequence: Synthetic coding sequence
  source 1..4913: mol_type = other DNA
atgtccgccagaaccgcccctcggcctcaagtattattgctaccccttctgcttgttttactcgcagccgctccggctgcttcaaaaggctgcgtgtgtaaggataagggacagtgtttctgcgacggtgccaagggcgaaaagggagaaaaaggattccccggtccaccaggttcgcctggccagaagggattcaccgggcctgagggtttgcctggtccccagggccctaagtctttccgcgctatccccagttactccgggggaaagtccttgcaaggtatttcagggcttccgggtttttcagggagtccaggcctaccaggaactccagggaacaccggtccctacggcctagtgggagttccgggttgctccggctctaagggggaacagggctttccaggcctcccaggcaccttagggtatccgggtatcccgggtatccacaatctgaagatatttaagggagctcctgccaaggaagaggatattgagctcgacgcaaagggagacccaggcctgcccggtgcaccagggcctcagggcttgcctggaccgccaggcttccccggaccggtgggccctccaggacctccaggcttctttgggttccctggtgctatgggacccaggggaccgaagtcctttgtcctttctagccggattagtaccaagggcgaaaagggcgtgaagggattaaccggccctcccggaccgccaggaacagtgatagttacacttactgggcctgacaatcggactgaccttaaaggggaaaagggcgataagggagccatgggtgagccaggccctccagggccttccgggctcccgggagaatcgtatggaagtgaaaaaggggctcctggggatccagggctccagggtaagcccggaaaagacggcgttcccggttttccaggatctgaaggcgtgaaaggcaatcgagggttcccagggttgatgggcgaggacggtatcaaagaagagaaacgagacgtcgctatagtctcgttttcgagtaaaacagagtactacgatacctatcaggagaaaggcgatgaggggaccccaggcccacccggtcctagaggggcacgaggccctcagggtaagaataaattcaggtgtatcccgggtagtcagggttcttcccgaccaggactcaggggggcacccggatggccgggactgaaaggatcaaaaggtgagagagggcgacccggtaaggatgcaatggggaccccaggcagcccgggttgcgccggtagtccgggtctgccagggtcccctggccctcctggtcctcctggtgatattgtgttcagaaaaggcccacccggtgaccacgggctgccagggtaccttggatcccccggtatccctggagtagacggtccaaagggggaacccggtctgctttgtacacaatgcccctatattcctggccctccgggtctgcccggactacctgggctgcatggggtcaagggcatccccggtagacagggggcagccggtttgaaaggtagccccggatcccctggcaacacaggactgcccggtttccccggattccccggtgcccagggcgacccgggtctgaaaggagaaaaaggggagacactgcagcccgagggacaggtgggtgtacccggagatccagggctgcgaggccagccaggtaggaaaggccttgatggaattccgggaaccccgggagtaaagggactgcccggacctaaaggcgagctggctctgtctggagaaaaaggcgatcaagggcctccgggtgaccccggtagtccgggtagccccggtccagcgggtccggcaggacctcctgggtacggccctcaaggagagcctggtctgcaggggacccaaggcgtccccggagccccaggaccccctggagaggctggcccaaggggtgaactgtccgttagcactcccgtgcccggtccacctggtcctcctgggcctcctggccacccaggtccacagggaccacccggaatccctggatctttaggcaagtgtggggaccccggacttcccggtcctgacggggagcctggcatccctggaataggatttccgggacctcccggtccaaaaggcgatcagggattcccgggtacgaaaggcagcctgggatgtccaggtaagatgggagaaccaggtctccccggaaagcctggcctccctggggctaagggggaacccgctgtggcaatgccaggagggccaggcactcctggctttcctggtgaacgaggcaattctggcgaacacggggaaatagggttaccaggcctgccaggccttcctgggacacccggaaacgagggattggacggacctagaggtgacccaggtcagccaggtccccctggagaacaaggcccacccggacggtgcattgagggaccgcgaggggcacagggcttgccgggtctcaatggcctgaaaggccagcagggacggagaggcaagactggtccaaaaggcgatccaggtatcccaggcctggacagatcaggatttccgggtgagaccgggtcaccaggcatccctggacaccagggagagatggggccactggggcagcgagggtatccaggtaatcctggcatcttaggaccccctggcgaggacggagtgattgggatgatgggcttcccaggagcaatcggtcctccaggcccacctggtaatccgggtacccctggccaacggggaagtccaggcattccaggtgtgaagggacagaggggcacgcccggtgccaagggcgagcagggagataaaggcaatccaggcccttccgagatttcccacgttatcggagataagggtgagccagggctgaaagggtttgccggtaatccaggagaaaaagggaataggggggtcccaggtatgcccggtctaaaaggcctgaaagggttgcctggtcccgcaggccctcctgggcctagaggagacctcgggagtacaggaaatcccggagagccaggtctgagaggcatccctggatctatgggaaatatggggatgcccggttcgaaaggcaagaggggcacattgggattccctggtagggctggcaggcccggtctgcctggcatccatggcctacagggagacaagggggaacccggatattctgagggtacaagaccgggaccccctggcccaactggagacccgggattaccaggcgacatgggcaaaaaaggcgaaatgggccaacccggaccaccaggccacctgggaccagccggaccagagggtgcacccggttccccaggtagcccaggattgccaggcaaacccggtccccacggtgacctggggtttaaggggataaagggcttgctaggccctccagggattaggggcccaccgggtttacctggatttcctgggagccccggtcctatggggatacggggagaccagggacgggatggcattcctggcccagcgggagaaaaaggcgagactgggttgctcagggcacccccaggcccacggggaaaccccggagcccagggggctaagggagatcgaggagcgccagggttcccagggctgccgggtcgcaagggagccatgggtgacgctggccctaggggcccaaccggcatagaaggatttccaggtccacccggattgcctggggcaattatccccggacaaaccgggaaccggggacccccaggaagtcggggttctccaggtgcccctggcccacctggccctcctggaagccacgtgatcggcataaagggggacaaggggtccatgggccatcctgggccaaagggccctcccggtaccgcaggggacatggggccacccggacgcctgggagcgccaggcacaccgggactgcccggacctcgaggtgaccccggtttccaaggctttcccggagtgaagggggaaaagggaaatccaggcttccttggctctataggacctcccggaccaatagggccaaagggccctcctggggttcggggtgatcccggaacccttaagatcatatccctgccaggctcccccggacccccaggcactcccggagagcctgggatgcagggggagccgggacctccagggccaccgggaaacctgggcccatgcggaccccgaggtaagccaggcaaggacggcaaacctggaacaccgggaccagccggtgaaaaaggaaataaggggagcaagggtgagccaggccctgccggatcagatggtctaccaggactcaaaggtaagcggggtgatagtggttccccagcaacatggaccacaagaggttttgtgttcaccaggcatagtcagacaactgccattccatcttgtccagagggaacagttccattgtatagtggtttctccttcctgtttgtgcagggaaatcagagagctcatgggcaagatctgggaacgttggggtcatgtctgcagagattcaccactatgccctttctgttttgtaatgttaacgatgtttgcaacttcgcaagccgcaatgattacagctattggctaagcacccctgccttgatgccgatgaatatggcccctatcacagggagagcactggagccctacatatctcgatgtacagtgtgtgagggacctgctatcgccattgctgtccactcacagaccaccgatattccaccatgcccgcacgggtggatcagcctttggaagggttttagtttcattatgaaggcttatagcataaattgcgagtcctgggggatcaggaagaataacaagtcactgagcggcgtccacgaggagaagaccctgaagttgaaaaagaccgcagagctgctattcttcattctcaaaaacaaagttatgactgaacacgctgttattta

SEQ ID NO: 28092 - DNA, 4485 bp, synthetic construct
  misc_feature 1..4485: note = Description of Artificial Sequence: Synthetic coding sequence
  source 1..4485: mol_type = other DNA
atgagcgccagaactgcaccaagaccacaggtgctcctcctccctctgctgttggtcctcctggctgcagcgccagctgcttcaaagggctgtgtgtgcaaggataaggggcaatgcttctgtgatggggcaaagggtgagaagggagagaaaggatttccaggccctcctggcagtcccggtcagaaaggttttaccgggcctgaaggtctgccgggacctcagggcccaaagagtttcagagctattccaagctattctgggggaaagagtctgcagggaatatcaggactcccagggtttagcggctcaccaggactgcctgggacaccaggaaacactggcccatacggactggtgggtgtgcctgggtgctcagggagtaagggggaacagggctttcctgggctaccagggacgttgggataccccggtatcccaggaatccacaacttaaagattttcaagggcgcacctgctaaggaggaagatatagagctggatgctaagggggaccccggactccccggagcccctggtcctcagggtttgcccggacccccaggattcccaggacccgtaggcccacccggtcccccaggattttttggattccctggagccatggggcctagggggccaaaatcttttgtgctgagctctagaatctccactaagggagaaaaaggcgtcaaaggactcactggcccacctggtcccccaggcaccgtcatcgtcaccctcaccggaccagacaaccgaacggacttaaagggggaaaaaggtgacaagggcgctatgggggagcccggtccccctgggcctagcgggttgccaggcgaaagttacggctctgagaagggggcaccaggagatccaggtcttcagggaaagcccggaaaggatggtgtccctggctttcccggttccgaaggagtcaaaggcaaccggggttttcctggcctgatgggagaggacgggatcaaggaggagaagagagacgtggctatcgtgagcttcagttccaaaacagagtattatgacacctaccaagaaaaaggtgacgagggaactcctggcccaccgggacctaggggagcccgtggccctcagggaaaaaataaattccgatgcatccccggatcgcaaggctcttctcgccctgggctgaggggtgcacccggatggcccggactaaagggaagcaaaggggagagaggcagacccggaaaggatgcaatgggaactcccggttccccaggttgcgctggttcccccggattaccaggcagccccggacctcctgggcctccgggagatatcgtatttcggaagggtcctccaggtgaccacggcctgccaggctaccttggatctcctggaatacccggagtggatggccctaagggagaacccggtttactgtgcacgcagtgtccatatattcctggaccgccaggactcccgggactgcccggactgcacggcgtgaaggggatcccagggaggcagggggctgccggattgaagggcagccctggctcaccaggcaacacaggactgcccggattcccaggatttccgggagctcagggagatcccggtctcaagggcgagaaaggtgaaactctgcaacccgagggccaggtgggtgtccccggagacccgggattaagggggcagcctgggaggaaaggattagatggaattccgggtactcctggcgtgaaaggacttccagggcctaaaggcgagctcgccctgagcggcgagaagggggatcagggccctcctggcgatccagggtctcccggatctcctggacccgcaggcccagcaggcccacctggatatggcccacaaggagagcctggcttacaaggaacccaaggcgttcctggcgcaccaggccctccaggtgaagccggtcctcggggagaattgagcgtatcaactccagtgcccggaccccctggaccaccgggaccaccaggacatccaggacctcagggaccccctggcattcctggtagtctgggcaagtgcggtgatccaggcttgccaggcccagatggagaaccagggattcctgggatagggtttcctggtcctcctggtccaaagggagaccagggcttcccaggcacgaagggaagtctaggatgccctggaaagatgggagagccaggactgccgggaaaacccggtctccctggcgcaaagggagagcctgcagtggccatgcccggagggcctgggacgcccggatttcccggagagaggggtaacagcggggaacacggcgagatcggcctccccggtttacctggccttccaggaacacctggcaatgaaggacttgatggtcctagaggcgacccaggccagcccggaccgccaggcgaacaaggaccgccagggaggtgcatagaggggcctcgtggtgcccaaggcttgcccggactcaatgggctcaagggccagcaaggcagaagaggaaagactgggccaaaaggggaccccggaatcccaggcctggacaggagcggattccccggagagactgggagcccagggatccctggccaccagggggagatgggccctctggggcaacggggatatccaggaaatcccggaatcttagggcctcctggagaggacggagtgattgggatgatgggctttccaggggcaattggccctcctggaccccctggcaaccccggtaccccaggacagcggggatcgccaggtatccccggagtcaaaggccagcgcggtacgcctggtgcgaagggggaacagggtgataagggcaacccgggaccttcagagatcagccatgttattggcgacaagggcgagccaggtctgaagggttttgcgggaaatccaggggagaagggtaataggggagtccccggaatgccagggttgaaaggactgaaaggcctgcccggacccgctggaccacccggtccacgaggcgacctagggagcacaggcaaccccggagagcccggtctccgcggtatccccggaagcatggggaacatgggaatgcccggaagtaagggcaagcggggaactctcggatttcccggacgagctgggcgtccagggctaccaggcatccatggtttacaaggcgacaagggcgagcctggttattctgaggggacacgcccaggtcctcctggcccaaccggcgatccgggactgcccggagatatgggtaagaagggagaaatggggcagcccggaccccctgggcatctggggcctgctggaccagagggtgcgccagggagccccggttcaccgggtctccccggtaaacccggtccacacggggaccttggcttcaaggggattaaggggctattgggcccacccggaataaggggtcctccagggctgccagggtttccagggtccccaggtcccatgggtatccggggagaccaggggagagacggcatccccggtcctgccggagagaaaggagaaactgggttactgagagcgccacccggtcctcggggaaatccaggggcacaaggggctaaaggggacaggggggctccagggtttcccggattgccagggcgaaagggggctatgggggacgcaggcccacgcggtcctactggaatcgaaggcttccctggtcctccagggttacctggtgcaatcattccaggccagacgggaaaccgcggtcctcctgggtctcgtggatccccgggagcacccggtccgccagggcctcctggcagccacgtgatcgggattaaaggagataagggatcaatgggccacccaggcccaaagggacctccaggcaccgctggcgacatgggcccacctggacggctgggcgcacctggtactcctggtcttccaggacccagaggggatccaggcttccaggggttcccaggtgtgaaaggcgagaagggcaatcccggattcctaggaagtatcggccctccgggacccatcggacccaagggccctcctggcgtgcgcggtgaccctggtaccttaaagatcatcagtctcccaggcagcccagggccacccggaactccgggagagccaggaatgcagggggaaccaggaccccctggtcccccagggaatctgggaccctgcggtccccgtggcaaaccaggtaaggacggcaaacccggaactcctggccctgcaggggagaagggtaataaaggcagtaaaggggagcccggacctgcaggtagtgatggccttccaggcttgaaaggcaagcgtggcgattcggggagcccagccacatggaccacacggggttttgtctttacaagacacagtcaaaccaccgcaattccaagctgtcccgaaggtaccgtcccgttatacagcgggttcagctttctttttgtccaagggaaccagcgggctcatggccaggaccttgagtctcttttccaccagctttag

SEQ ID NO: 28093 - DNA, 4275 bp, synthetic construct
  misc_feature 1..4275: note = Description of Artificial Sequence: Synthetic coding sequence
  source 1..4275: mol_type = other DNA
atgtctgccagaactgctcctaggccacaggtgctgttgctgcccttactgctagttttgcttgctgccgctccagcagcctctaaggggtgcgtttgcaaggacaagggccagtgtttctgcgatggagctaaaggcgaaaaaggagagaaagggttccctgggccaccagggtctccaggccaaaagggcttcactggccctgaaggattgccgggaccccagggccctaagagcttccgcgctattccctcgtattctggcggtaaatcactgcaggggatatctgggctccccggattcagcggttcccccggactgccagggactcccggtaatacaggaccatatggcctcgtcggcgtccctggatgttccggatccaaaggtgagcagggtttccccggtctcccgggaacattagggtaccctgggatacctggcatccataacttgaaaattttcaaaggggctccagcaaaagaagaggacatcgaattagacgcgaagggggacccagggttacctggggctcctggcccacagggcttaccgggaccacctggtttcccagggccagtagggccacccggaccacctggcttcttcgggttccctggcgctatgggtccgaggggcccaaagtcgttcgtgctgtcaagcaggatctctacaaaaggggaaaaaggggtcaaaggattgactggcccacccggtcccccaggtacagtaattgtgacgctcacaggcccagataacaggaccgatctgaagggcgagaaaggcgacaaaggcgctatgggtgagcccggaccaccagggccaagcgggctaccaggagaaagttatgggtccgagaaaggggctcccggtgatcccggactccagggcaagcccggtaaggacggcgtgcccggatttccgggatcggagggcgttaagggtaacagaggattccccggactgatgggcgaggatggaatcaaggaagagaagcgagacgtcgcaatcgtcagcttctcgtcaaaaaccgaatattatgatacctaccaagagaagggtgacgagggtactcctggcccacccggtccaaggggtgccaggggcccacagggaaagaataaatttcgctgtatccctggctcacagggttcgtcccgtcctggcctgcggggtgcacccggttggcctggacttaagggttctaaaggagagaggggtcggccaggcaaagacgcaatgggcacgcctggaagcccaggatgcgcaggaagtcctggactgcccggttctccaggccctccaggaccaccaggagatatcgtgttccggaaggggcctcctggggaccatggactgcccggatacttgggtagtcctgggattccgggagtcgatggcccaaaaggggagccaggcctcctgtgcacacaatgcccttatattcctggcccacccggtctccccggtctgcctgggctgcatggcgtcaagggcatccccggtaggcagggagctgcaggactgaagggatcgcctgggtctcctgggaatactggcctacctggcttccctggattccccggagctcagggggaccctgggctcaaaggtgagaaaggggagacacttcaacccgagggacaggtgggggtccccggtgatcccggactccgtgggcagcctggacggaagggcttggacggcatccctgggactccgggagtgaaggggctgccgggacctaagggcgagctggcgctctccggtgagaagggagatcaaggaccgcctggcgatcctggctctccagggtccccgggacctgctggaccagcaggacctccgggttatgggcctcagggagagcctggcctgcaggggactcagggagtgcccggtgcccctggtccacccggagaggcaggcccacggggagagctatctgtttctacccctgtgccgggacctccgggtccacctggccctccaggccacccaggccctcagggccctccaggtattcccggaagtctagggaagtgcggcgacccgggattgccaggccctgatggagaaccaggaatccccggaattggcttccctggccctccgggtccaaaaggagaccaaggttttccaggcactaaaggttcactgggatgtcccggtaagatgggggaacccggtttgcccggtaagccaggtcttccgggagcgaagggagagcccgctgtggccatgcccggaggccctggcaccccaggctttccaggagagagaggcaacagtggagaacacggagaaatcggcctgcctggccttcctgggttacctggtacccctggaaacgaaggtttggacgggcctcgtggtgaccccggacagcctgggccacccggagaacagggccctccgggtcggtgtatcgaaggaccacggggagctcaaggcctgcccggtttaaacgggcttaaaggccagcagggaagaagggggaaaaccggtcccaagggagaccccggaatccctggcctcgacagaagcgggtttcccggtgaaactggctctcctgggatcccaggccaccagggcgagatggggccactgggacaacggggatatcccggtaaccccggtattctggggccaccaggtgaagatggcgtcatcggcatgatgggtttcccaggagctatcggcccacctgggccaccaggcaacccaggaacccccggtcagcggggtagcccaggaatccctggcgtcaaaggtcaacgcggtacacccggagcgaaaggggaacagggagacaaaggaaaccctgggccttctgagatttctcacgtcatcggagacaaaggcgagccaggcctcaagggatttgctggcaacccaggagagaaaggcaacagaggggtccccggaatgccgggacttaaaggactgaaagggctgcccggtccagccggaccaccagggccacgcggagacctcggctctacgggaaacccgggtgagccaggactccgaggcatccctggttccatgggaaatatggggatgccaggcagcaaggggaagcggggaacacttggattccccggtcgggctggtcgcccaggccttcccggtattcacgggctgcagggcgacaagggagaacccggatatagtgagggcacccgcccagggcctcccggacctacaggagaccccggtctgcccggagacatgggcaaaaaaggagaaatggggcagcctggcccacccggacatctggggcctgcaggccctgaaggggctcccggaagcccaggttcccccggattgcctggcaagccaggtcctcacggggatcttggatttaaagggattaaaggcctccttgggccaccgggaatcaggggaccaccaggtttgcccggatttccgggtagccccggacctatgggtattcggggtgatcaaggcagagatgggattccgggacctgccggagaaaagggggagactggccttcttagagccccacctgggcctcgagggaatcccggagcccaaggggctaaaggcgaccggggtgcgcctggcttccctgggctaccaggccgaaaaggtgcaatgggggacgcagggcctcgcggtccaaccggtatcgaaggattccctggcccacccggactgcccggagccatcattccaggccagacggggaataggggacctccgggttctagaggatcccctggagctcctggtccacccggacccccaggttctcacgtgattggaattaaaggagataaggggtctatgggacatcctgggccaaaagggcctccgggaacggctggggacatgggtccccctggccgactcggtgcccctggtacacccggtttgcctggacctagaggagacccaggatttcaaggcttcccaggtgtcaagggcgagaaaggaaatcctggatttctaggctcaatcggacctcctggacccatcggcccaaaagggcctcctggagtgcggggagaccccggaactctcaagattatatccttacctggaagtccgggacccccaggtacccctggggaacccggtatgcagggggaaccaggtcctccgggtccccctggaaacctaggaccttgtggccctagaggaaagcctggaaaggacggcaagccagggacccctggtcccgctggagaaaaaggcaacaaaggaagcaagggtgagcctgaatctctgtttcatcagctatag

SEQ ID NO: 28094 - DNA, 5012 bp, synthetic construct
  misc_feature 1..5012: note = Description of Artificial Sequence: Synthetic coding sequence
  source 1..5012: mol_type = other DNA
atgagtgccagaactgccccacgtccccaagttctgcttcttcctctacttctcgtgctgctcgcggcagcgccagccgcttccaaaggatgcgtgtgcaaggataaggggcagtgcttttgtgacggtgccaaaggtgaaaagggagaaaagggattccccggtccgcctggcagtcccggtcagaaagggtttacgggacccgaaggccttcctggaccacaagggccaaagggttttccaggtctacctggcctgactggctcgaagggtgtaagaggtatctccggattacctgggttctccgggtccccaggcctcccaggaacacccggaaataccggtccctacgggctggtcggcgttccgggttgttctgggtcaaagggggagcaaggcttcccagggcttcccggtaccctggggtacccagggatcccgggtgcagcaggcctgaaaggacagaagggagccccagccaaggaagaggacattgaacttgacgctaagggggacccaggccttcctggagccccaggccctcaggggctgcccggacccccaggcttccccggaccagtgggtcccccagggccacccggatttttcggatttccaggtgctatgggaccacggggtcctaaagggcacatgggcgaacgggtgattggtcacaagggagaacggggagttaaaggactgaccgggccacccggaccgcctggcacagtcatcgtgacactgacaggccctgacaatcgcaccgatttaaagggagaaaaaggcgacaagggagctatgggagaacctggacccccaggcccatccggactccccggagaatcttacggaagtgaaaagggcgctccaggtgatcccggtctgcagggaaaacccggaaaggacggagttccagggttcccgggttccgagggggtcaagggaaatcggggatttccagggttgatgggagaggacgggattaaagggcagaagggagacattgggccaccgggattccgcggacctactgaatactatgacacctatcaggagaagggagacgagggaactccagggccaccaggaccacgcggtgcacgcggtccacagggcccttctggacccccaggagttcctggatcaccaggatcaagtaggcccggactgcgcggagccccagggtggccagggttaaagggatcaaagggggaacgcggtaggccgggtaaagatgccatgggcacaccaggcagccctggttgtgcgggatcccctggactcccaggatcacccggaccccctggccctcctggggatattgtctttcggaaagggcctccgggtgaccatgggctcccgggatatctaggctcgcctggtatccctggcgttgatgggccaaaaggggagcccggtctgctttgcacccaatgcccctatataccaggtcctcccggactccccggattacccggactgcacggtgttaagggaattcccggtaggcagggcgcagccggtctgaagggttcacctggttctcctggcaatacaggcctccccggattcccgggttttccgggtgctcagggggatccaggcctgaagggagagaagggtgagaccctccaacctgaagggcaagtgggcgtaccaggcgatccagggctgaggggtcaaccaggacgcaaaggtcttgacggcatcccaggaacgccaggggtcaagggtctcccagggcctaagggcgaattagccctttccggagagaagggggatcaggggccaccaggagaccctgggagtccaggctcacctggacccgctgggccagccggacccccaggatacggcccacaaggcgagcccggattacagggaactcagggggtgcctggggctccaggccctcccggagaggcaggacccagaggggaattatctgtgtcaactcctgttcctgggccacccggacctcctgggccaccaggtcacccgggaccgcagggaccacccggaattcctgggagtcttggaaagtgcggggaccccggactccccggtccagatggcgaacctgggatccccggtataggattccctgggcctcccggtcccaaaggggatcaggggttccctggcaccaagggctccctagggtgtccaggcaaaatgggagaacccggactgcctggtaagcctggccttcccggtgccaagggagagcccgcagtcgccatgcccggtggcccagggacacctggcttcccgggtgaacgcggaaatagtggcgagcatggtgagatcggcctgcccggattgcccggtctccctggtactccgggaaatgaggggcttgatggaccgagaggtgatcccggtcagccaggacctcctggcgagcaaggcccacctggcaggtgcatcgaaggccctaggggcgctcagggcttgccgggtctgaatgggctgaaaggacagcagggaagaagaggcaagacaggaccaaaaggtgacccaggcatccccggtctcgatcggtccggctttcccggtgagactggtagccctgggatcccgggtcaccagggggagatgggcccactagggcagaggggatatcctggcaatccgggtatcctgggaccccctggggaagatggagtgattgggatgatgggttttcccggagccattggccctcccggaccccctggtaatccaggcacccctggacaacggggttccccgggaatccccggagtcaaagggcagcgcggaacacctggcgctaagggcgaacagggggacaagggaaatcctggtcctagcgagatttcccacgtcattggggacaagggtgaacccggactgaaaggctttgcaggcaatcctggagaaaagggaaatcgcggagtgccgggaatgcctggcctgaaaggcctgaagggcctgcctggtcctgccggaccgcctggaccaaggggggatctgggaagtacaggaaatcctggggagcctggcctcagagggataccaggctctatgggtaatatgggaatgccaggctcaaagggaaagagggggacactcggctttcctgggcgagcaggtaggcctggactgcctgggattcacggactgcagggcgacaagggggaacctggatactcagagggcacccgacctggtccaccagggcctacaggtgatccgggtttgcctggcgatatgggcaagaaaggagaaatggggcagcctgggccaccagggcatcttgggcctgcgggtcccgagggcgctcccggaagtcctggctcaccgggtctgcctggcaagcccggtccccacggggatctgggtttcaagggcattaagggactgctgggcccaccaggtatcaggggtccccctggcctgccgggattcccgggatctcccggtcctatgggcataagaggagatcagggcagggatggaattcctggacctgctggagaaaagggggagaccggcctcctgagggcacctcctggtcccaggggaaaccccggagcccagggggcaaagggggaccgaggagctccaggtttcccaggactgcccggtagaaagggtgctatgggagatgcaggcccaaggggtccaactggcattgaggggttccccggtcccccaggtctgcccggtgcaatcattccaggtcagacggggaaccggggacccccaggatcgcggggatccccaggcgcacccggtcctccgggtccaccgggttcccacgtaatcggcattaagggagacaaaggaagcatgggccaccccggtcccaaagggcctccgggaacagcaggcgacatgggccctcctgggagactaggggctccaggaacacctgggttgcctggtcccagaggtgaccccggattccaggggtttcccggagtgaaaggtgagaaaggcaatccaggctttttgggctctattggcccaccaggtccaataggcccaaagggcccaccaggcgtgaggggagatccaggaaccttaaaaatcatttccttgcctggttcccctggccctcccggtacccctggcgagcctggaatgcaaggtgaacccggaccgcctggtccccctgggaatctaggaccatgcggtccacgcggtaagccgggtaaggatgggaaaccaggtactcctggtccggcaggagaaaagggaaataaaggctcaaaaggggagcctgggccagccggaagcgatggtctcccaggactgaaaggtaaaaggggtgacagcggaagtcctgctacatggaccacacgcggatttgtctttactagacacagtcagactactgcaattcctagttgcccagaggggactgtccctctttacagtggcttctcatttcttttcgtgcaaggcaatcagagggcccacgggcaggacctgggcactctgggatcctgtctgcaaaggtttacaactatgccatttctcttctgtaatgtcaacgatgtctgtaacttcgcaagtcgtaacgactatagctattggctatcgactcctgccctgatgcctatgaacatggctcccataacagggagggctttggagccctatatcagtcgttgtactgtgtgtgagggccctgctatcgctatagccgtccatagccagactaccgatattcccccttgcccccacggttggataagcctttggaaggggttttctttcatcatgttcactagtgctggctcagagggcaccgggcaggccctggcttcacccggttcttgtctggaggagttccgggcttccccgtttttggagtgccacggtaggggcacctgcaactactattcgaatagctattctttctggctggcctccctaaaccccgagaggatgttcaggaaacctatcccatccaccgtaaaagccggtgagctggagaagattatttcccggtgccaggtatgcatgaaaaagcggcatta

SEQ ID NO: 28095 - DNA, 4500 bp, synthetic construct
  misc_feature 1..4500: note = Description of Artificial Sequence: Synthetic coding sequence
  source 1..4500: mol_type = other DNA
atgatggcaaactgggccgaggcccgaccactgttgattctaatagtgttacttgggcaatttgtctctattaaggcccaggaggaagatgaagatgagggctacggagaggagatcgcatgcacccagaacggccagatgtatctgaatagggatatttggaaacctgctccctgccaaatttgcgtctgtgataacggcgcaatactatgtgataaaatcgagtgtcaagacgtgctcgactgtgccgaccccgtgacgcctcccggagagtgctgccctgtctgttctcagactcctgggggtgggaacaccaatttcggaagaggcaggaaaggtcagaaaggggaaccaggcttggtgccggtggtgaccgggatccgcggaagacccggacccgctggcccacctggctcacaagggccaaggggggagaggggaccaaagggtcgcccaggtcctagaggtccccagggtattgacggtgagcccggagtcccagggcagcctggagcacccggacccccagggcatccctcgcacccgggtcctgatggtctgtctcggcctttttcggcccagatggctggcttagacgaaaagtctggattgggatcacaggtgggattgatgcccggaagcgtgggacctgtcggaccaaggggacctcagggcttgcaggggcagcagggcggagcgggtcccacagggccaccaggagagccaggggatccgggtcccatgggccctatcggcagccgtggacccgaggggccaccgggaaagcctggagaagatggggagccagggagaaacggcaatcctggcgaggttggattcgcaggcagtccgggtgcgagaggattccctggcgctcctggactgcctggattaaaaggccacagaggtcacaaggggctggagggccctaaaggcgaagtgggcgcaccaggatctaaaggtgaggcagggccaactggccctatgggcgcaatgggcccattggggccaagaggtatgcctggcgagaggggcagactcggtccacagggggcaccgggtcaacgcggtgcccacgggatgcctggaaagccaggccctatgggccctctggggatccctgggtccagtggctttcctggaaaccccggaatgaaaggcgaggctggccctacaggggcacggggacctgagggacctcaggggcagagaggtgaaacaggaccaccaggtccagtcggatccccaggtctgcccggtgccattggcactgacggaacgccgggagctaaaggccctactgggtctcccggaacctcaggccctccaggcagcgcaggacctcctggctcgccgggaccacagggctctacaggaccgcaggggatcagaggtcagcctggtgatcccggtgtacccggattcaagggggaggctggcccaaagggagagccaggtcctcacggtatacaggggccaattggccctcctggggaggagggaaagcgcggacccagaggcgatcccggtaccgtgggcccaccaggccctgtcggggagcgtggcgcacctggcaaccgaggattccccggaagcgacgggctccccggtcccaaaggagctcaaggggaaagggggcctgttggctcctccgggcctaaggggtctcagggcgatcctgggcgacccggtgagcccggtcttccaggtgcccgtggcttaacggggaacccaggggtccaagggcctgaaggaaagctagggccactaggcgcaccaggcgaggacggacggcctggacccccaggctctatcggaatccggggacagcctgggtctatgggattacctggtcctaaaggtagttctggcgatcccggtaagcccggagaggcaggaaatgccggtgttccaggacagaggggcgcacctgggaaagacggggaggtcgggccaagtgggccagtaggcccacccggactcgctggcgagcgcggtgaacagggccctcctgggcctactggctttcagggcctgcctggaccgcctggcccaccaggcgaggggggtaagcctggcgatcagggagtgcccggtgatcccggtgcggtcggcccattaggacccagaggcgaaagagggaacccaggtgagcgaggagagcccggtattacggggctgcctggtgagaaaggaatggctgggggacacgggccagacggtccaaaaggttcacccggaccctctgggacccccggtgatactggcccaccgggtcttcagggcatgccgggagaacggggaattgccggaactcccggacccaagggtgatcggggtggtattggagagaaaggcgcagaggggaccgctggcaatgatggggcaagagggctgcccggtcccctcggaccgccagggcctgcaggccctacaggggagaagggcgagcccggtcctaggggcctggtaggaccccctggctccagagggaaccctgggtctcgaggtgagaacggacccaccggcgcagtcgggttcgctggtcctcagggtccagacggacaaccaggagtgaagggtgaacctggcgaaccaggacagaagggcgacgcgggatctccaggcccacagggattggcagggagtcctggcccacacggaccaaatggtgtgcctggtcttaagggagggagaggcacacagggacctccaggggctactggattccctgggtccgccggtcgtgtggggcctcctggcccagccggtgcacctggccctgctgggcctcttggcgagcccggaaaggaggggccacccggtctcagaggcgaccccggatcgcacgggcgtgtgggcgaccggggacctgccggtcccccaggaggccctggcgacaagggggaccccggagaggacggccagcctggacccgatgggccaccagggccagctgggactactggacaaaggggaatcgtcggtatgcctggacagagaggcgagaggggcatgcccggtctaccaggacccgctgggacgcctggaaaggtgggccctaccggagccaccggcgataaaggtcctccaggacctgtcgggcctcccggaagcaacggtcccgtaggagaaccgggaccagagggcccagccggaaatgacggcacccccggtcgggacggcgcagtcggcgagaggggggaccgtggggatcctggtccagccggacttcctggctcacagggtgcccctggaacacccggtccagtcggcgctcctggggatgcgggacagcgaggagaccccggtagtcggggtcctattggtcccccagggcgagccggtaagagaggcttacccggaccgcaaggcccacggggagacaaaggcgatcacggggaccgcggagacagggggcaaaaggggcacaggggctttacagggctgcagggactccctggccctcccggtcccaacggggagcaaggatctgcgggtatccctgggccttttggcccacgcggaccacctggcccagtcggcccaagcgggaaggaaggtaatcccggtccgctcgggcctatcggccctccaggcgtgcgtggctctgtaggtgaagccggacccgagggcccacccggagagcccggaccacccggtcccccaggacccccaggccacctgactgcagcccttggggacatcatggggcattatgacgagtccatgcctgatcctttgcctgaatttactgaggatcaggcggctccagacgataagaataagactgacccaggagtgcacgcaactctgaaatctctctcatcccagatagaaaccatgagaagccccgatggcagcaaaaaacaccccgctagaacgtgtgatgacctcaagttatgccatagcgccaagcagagtggtgaatactggattgatcctaatcaaggttccgtcgaggatgcaattaaggtctattgcaatatggaaactggagagacctgcattagcgcgaatccttcctccgtgccaaggaagacctggtgggcttcaaagagcccagacaataagccggtctggtatggcctcgacatgaatcgagggagtcaatttgcatacggtgaccaccaatcgccaaatactgccataacacagatgacatttctgcggctgctttcgaaggaagccagccagaatattacttatatctgtaagaattccgttggatatatggatgaccaggcaaagaatctaaagaaggccgtcgtcctgaagggggcaaacgaccttgacattaaggctgaagggaatattcgatttcggtacatcgttcttcaggatacttgtagcaagaggaacggaaacgtcgggaagacagtctttgaataccgtacacagaacgtcgcacggctcccgattatagatctggcaccagtagacgtcggcggaactgaccaagaatttggcgtggaaattggtcccgtatgcttcgtgtag

SEQ ID NO: 28096 - DNA, 3420 bp, synthetic construct
  misc_feature 1..3420: note = Description of Artificial Sequence: Synthetic coding sequence
  source 1..3420: mol_type = other DNA
ctgcctggccgtaggcaccgactgggaccacctggatctcagggccctagaggggagcggggacccaaggggaggcctggtcccagagggccacaaggcatcgacggcgaaccgggtgtgcccggacagcccggagctcctgggggtgctggtccgacaggtccacccggagaacctggcgaccccggaccaatggggccaatcggctcacggggaccagaaggaccgccaggcaaacccggagaggacggtgagcccggaagaaatggtaaccccggtgaagtgggctttgcagggagtcccggtgcaaggggattcccaggggctcctggcctgcccggtttgaaagggcacagaggacacaaaggactggaaggacctaagggtgaagtgggggcaccaggttccaagggggaggccggtccgactggcccacgcggtgacccgggtacagttggcccacccggtccggtgggagaaagaggagcaccaggtaaccgcggatttcctgggtctgacgggcttcccggacccaagggtgctcagggcgagagggggccagttggctcctccggccctaaaggcagtcaaggggatcctgggagaccaggcgagcccggtctcccaggagccagaggtttgacaggtaacccaggcgtgcagggtcctgaaggcaagctgggacctttgggagcccctggagaggacggcagacccggtccacccggaagtatcgggattcggggacagccagggtctatgggactgccaggccctaagggctcttccggggaccccggaaagcccggtgaggccggtaacgccggagtgcctgggcagcgcggagcgccaggtaaagacggagaggtgggcccatctggtcccgtgggccctccaggccttgcgggagagagaggcgagcaagggccacctgggccaaccggctttcaaggtctgccaggcccacctggaccgccaggagagggaggcaagcccggtgaccaaggagtgcctggcgatccaggagccgtgggcccactcggcccacgcggtgaaagaggaaaccccggagaacggggagaacccggtataaccggtctccccggagaaaaggggatggcaggcggtcacggtccggacggtccgaaaggatctcctgggccatctggtacccctggtgacaccggccctccaggtctacaaggaatgcccggagaaagaggcatcgcaggtacaccaggccctaaaggcgaccgcggtggcattggggagaaaggcgctgaaggcactgcgggtaacgatggcgcacggggactgccgggaccattggggcctcccggtcctgcgggtcctaccggcgaaaaaggggaacccggacctcgtggcctcgtcggacctcccggttctcgaggcaatccaggaagtcgaggagagaacggcccaacaggggctgtcggatttgctgggccacaaggccctgatggacagcctggggttaagggagaacccggagagccaggtcagaagggtgacgctggctcccctggccctcagggtcttgctggcagtccagggcctcatggccctaatggtgtcccgggactgaagggcggtaggggtacccaaggccctcccggtgcaactggatttcccggtagcgctgggagggtggggccaccaggccctgctggggctccaggccctgctgggcctctgggcgaacctggaaaggagggaccaccaggactgagaggggacccgggaagtcacgggagagtcggcgacaggggcccagcgggaccacctggcggacctggggacaaaggcgatcctggggaggacggccagccagggcctgacggacctcctggacccgcaggaaccactgggcaacgcggtattgtgggcatgcctggtcagagaggggagaggggtatgcccggacttcctgggcctgcgggaaccccaggaaaagtagggccaaccggtgcaaccggagacaagggacctccaggtcctgtgggaccaccagggagcaatggccctgtgggggagccagggcctgaggggcctgccggtaatgatggtactcctgggcgtgacggcgctgtaggcgaacgaggagatagaggtgaccccggacctgccggtcttccgggatcccagggcgctcccggaacccctggacctgttggggcaccgggagacgcaggccaacgaggggatcctgggagtagaggacctatcggacccccagggagggccggtaagaggggcctcccaggaccgcagggacccaggggggacaaaggggaccatggggatcggggagataggggacagaagggacacagaggcttcactgggcttcaggggcttcctgggcctccgggtccgaatggtgagcagggttctgccggtatcccaggccctttcggaccccgagggccacctgggccagtgggaccttcaggaaaggaaggcaatcccggtccccttggaccaatcggccctccgggagtgagaggatctgtgggtgaggcaggccctgaagggcctcccggtgagcctggaccgcctggccctccaggacccccagggcatctaacggctgccctgggggacatcatggggcattacgatgagtctatgcctgacccactgccagaattcaccgaggaccaggctgcccctgacgataagaataaaaccgaccctggcgtgcacgctactctgaagtccctgagctcacagattgagacaatgaggtcacctgatggctcaaagaagcaccccgctcgcacttgtgatgacctgaagctgtgtcacagtgctaagcaatccggagaatattggattgatccaaatcagggcagtgtggaagacgccataaaggtgtactgcaacatggaaacaggggaaacctgcatctccgctaacccatcgtccgtaccaaggaagacctggtgggcttccaagtcacctgacaataaacccgtctggtatgggctggacatgaatcggggtagccagttcgcatatggagaccaccaatcacccaatacagccattacccagatgacattcttgagactgctcagtaaggaagcatcacagaatatcacctatatatgtaaaaatagcgtgggttatatggatgaccaagccaagaacctgaagaaagccgttgtactcaagggcgctaacgatctggacattaaggccgagggcaacatcaggtttaggtacatcgttttgcaggatacatgttccaaacggaacggcaatgtcggcaagaccgtctttgagtaccgtacccaaaacgtcgctcggcttccgatcattgatctggccccagtagatgttggaggtactgaccaggaattcggggtggaaatcggccctgtctgcttcgtttag

SEQ ID NO: 28097 - DNA, 5304 bp, synthetic construct
  misc_feature 1..5304: note = Description of Artificial Sequence: Synthetic coding sequence
  source 1..5304: mol_type = other DNA
atggaaccttggagcagtagatggaagaccaagaggtggttgtgggatttcactgtaacaacactcgcgttgaccttcctctttcaggccagggaagtgagaggagcagctcccgtcgatgttctgaaagccttggacttccacaacagccctgaaggcattagcaagactaccggtttctgcacgaaccggaagaactccaagggctcggacaccgcttaccgcgtatctaagcaagcacagctctctgctcccacgaaacagttgttcccgggagggacattcccagaggatttttctatactattcactgtcaaaccaaagaaggggatccaatcctttctcctgtcaatctataacgagcacgggatccagcagataggagtcgaagtgggtcggagtcctgtgttcctgttcgaggaccacacaggtaagcccgctcctgaggactaccctctgttcagaactgtaaatatcgctgatgggaaatggcaccgcgttgccatctccgtggaaaagaagacagttaccatgatcgtggattgtaagaagaaaactacaaaacccctcgaccggtctgaacgagctatcgttgacactaacgggattaccgtgtttgggacaaggatcctcgatgaagaagtgttcgagggcgacattcagcaattcctgattaccggagacccaaaagccgcttatgattattgtgagcactattcgcccgactgtgacagtagtgcgcctaaggccgctcaggcccaggagcctcagatcgatgaggccaatatcgtggatgacttccaggaatataactatggcaccatggagagctatcagacggaagcgccacgccatgtcagcgggacaaatgagccgaaccctgtcgaggagatctttacagaggagtatttgacgggtgaagattacgattcccagcgaaagaactccgaagatactctctatgagaacaaagagattgatggccgtgatagtgacctcctggtcgatggtgatctgggagagtatgatttttatgagtataaagagtacgaagataagcccacaagcccacctaatgaagagtttggacccggtgtgcctgccgaaaccgatataactgagacatctatcaacggacacggggcatatggggagaaaggacagaagggcgaaccagccgtggtggaacctggcatgctggtagagggaccgcctggtcctgccggtccagcaggcattatgggtccccctggcctgcaggggcctaccggacctccaggtgatccaggcgaccgaggccctcccggacgtcccggactgcccggagctgacggcctccccggaccccctggcaccatgctcatgttgccattccgctacggcggtgatggttctaaaggtcctactataagcgcgcaggaggcccaggcccaggctatcctccagcaagctcggatagccctccggggacccccaggacccatggggttgacagggcgaccgggacccgtaggtggcccaggctcctcaggtgcaaagggtgaaagcggcgatcctgggccacagggccctaggggcgtgcagggccctcctgggccaactgggaaaccaggtaagcgtggacggccaggtgcagatggcggaaggggaatgcccggagagcctggtgctaaaggggacaggggcttcgatggcctcccaggccttcctggtgataaggggcataggggtgaaaggggtccccagggccctccaggtcctcccggtgatgacggtatgcgaggggaagacggagagatcggaccacggggactgccgggagaagccggaccaagaggcctgttgggccctcggggaacaccaggcgctccaggccagcccggtatggcaggcgtcgatggccctcccggtccgaagggaaatatgggtccccagggggagcctggtccacccggacaacagggcaaccctggaccccagggactcccaggtccccaggggcctatcggtccacccggagaaaaaggtccacaaggcaagcctggccttgctggacttccgggagctgacgggccaccaggccacccaggtaaggaaggccagtccggagaaaagggggctctcggccctcccggtcctcaaggacccattggctatccagggccacgcggagtgaaaggcgcagacggagtgcgcggtctgaagggcagtaagggagaaaagggtgaggatgggttcccgggattcaaaggggatatgggacttaaaggcgaccgtggcgaagtgggccaaattggtccacgtggcgaggatggccctgaaggacctaagggtcgcgctggacccacaggggatcctggccctagcggccaggccggagagaaaggcaagctgggggtacctggcctacctggttatccgggtcggcagggcccaaaaggaagcactgggtttccaggatttccaggagccaacggtgaaaaaggtgccagaggggttgcaggaaaacccggacccagggggcagcgcggacctaccgggcctagagggtcccgcggagccagagggccaaccggaaagcccggtccaaaaggcaccagcggtggggacggcccaccaggtccacctggcgaaagaggtccacaagggccacaaggacccgtaggcttccctggccctaaagggcctcccggaccaccgggaaaagacggcctgcccggacacccaggacaacgtggtgagaccggatttcaagggaagaccggaccaccgggtccagggggagtggtaggccctcaggggcctactggcgaaacaggccctataggggagcggggacatccgggtccaccgggacctccaggtgagcagggcctccccggtgccgctggcaaggaaggggctaagggcgaccccggtccacagggcatttcagggaaagatgggccagccggtctgcggggatttccaggagagcgcggactacccggagcacagggcgctccaggactgaagggcggtgaggggcctcagggtccgcctggccctgtcggcagccctggggagagaggtagcgctggcacagctggcccaatcggcctgcctggcagacccggacctcaggggcctccaggccctgctggagaaaagggggcacctggcgagaagggacctcagggaccggcaggaagggacggggttcagggtccagtgggcctgccaggaccagctggtcccgctgggagccccggtgaggatggggacaaaggtgaaataggcgaaccaggccagaagggcagtaagggtgataagggcgaaaatgggcctccaggtccaccgggacttcaggggccagttggggctccaggcattgctgggggagacggagaacccggaccgaggggacagcagggcatgtttggccagaaaggggacgaaggagcaaggggctttcctgggccacccggaccaattggcctgcaggggctcccaggtccgcctggcgaaaagggagagaacggcgacgtgggccctatgggcccaccaggcccacccggacccaggggacctcagggacccaatggggctgatggtccacaagggcctcccggaagcgttggcagtgtgggaggcgtcggggagaagggcgagccaggtgaggccggaaaccctggcccacccggagaagccggtgtaggcggacctaagggagaacgtggcgagaaaggggaagctggacctccaggcgcagccggaccacctggcgcaaagggaccacccggtgacgatggccctaagggaaacccaggcccagtgggctttccaggagatcccggtcctccaggggaacccggacccgctggccaggacggggtaggaggagacaaaggcgaggacggcgatcccggtcagcctgggccaccgggaccttcaggagaggccggacctcccggtccacccggaaagcgcggaccccctggcgcagctggagccgagggccgacaaggtgagaagggagccaagggagaagctggagctgaggggcctcccggaaaaaccggacctgtgggaccacagggcccagctggaaagccaggcccagaaggcctccgcggtatcccaggtcccgtgggtgagcaggggcttcctggggctgctgggcaggatggaccacctggcccaatgggcccaccagggctgccgggacttaaaggggaccctggatctaaaggggagaaaggccatcccggtctcataggcctcataggacccccaggagaacagggcgagaagggcgatcgtgggctgcctggaacacaggggtcccccggagcgaagggagatgggggaattcctgggcctgcgggtcccctgggcccaccgggacctcccggactacctggccctcagggcccaaaagggaacaaagggtctactgggccagccggacaaaaaggtgacagtgggctgcccggaccacctggatcccctggccctcctggagaagtgatccagccgctcccaatcctcagctcaaaaaagacccgtagacacaccgagggtatgcaggcggacgctgacgataatatcctagactactctgacggcatggaagaaatcttcggcagcctgaactccctgaaacaggacattgaacacatgaaattccccatgggcacacagaccaatcccgctcggacctgcaaggacctccaactaagccaccccgatttccccgacggagaatactggatcgacccaaatcagggttgcagtggagatagctttaaagtgtattgtaactttacgtccggcggtgagacatgcatttaccctgataaaaagtctgagggagtgcgaatctccagttggcccaaagagaagccgggatcatggttctccgaatttaaacggggaaaattattgtcgtacctggacgtggagggaaattctataaatatggtccagatgaccttcttaaagctgttgacagcgtccgccaggcaaaactttacctatcattgtcaccagtcagcagcatggtacgacgtgtcttcgggaagctatgataaagccctacgatttcttggttccaatgatgaagagatgtcctacgataacaatccatttataaaaaccctctacgatggatgcgcatccagaaagggatacgagaaaaccgtgatcgagattaacaccccaaaaatcgatcaggtgcccattgtcgatgtgatgatcaatgactttggggaccagaatcaaaagtttggctttgaggtgggacccgtatgttttctaggctaa

SEQ ID NO: 28098 - DNA, 5456 bp, synthetic construct
  misc_feature 1..5456: note = Description of Artificial Sequence: Synthetic coding sequence
  source 1..5456: mol_type = other DNA
atggagccttggtcatcacgttggaagacaaagagatggctgtgggattttactgtgacaacactggcacttacatttctgtttcaggccagggaggttaggggcgctgcgccagtggacgtcttaaaagctctcgattttcataattcccctgaaggaataagcaagaccacgggcttttgtaccaaccggaagaacagcaaagggtccgatactgcttacagggtcagcaaacaggcccaactgagtgctcccaccaaacaactcttcccaggtggcaccttccctgaagatttcagtatcctgttcaccgtgaaacctaagaaggggatccaatcgttcctgctgagcatttacaatgagcacggtatccagcagatcggagttgaggtaggacgctcgcctgtgtttctttttgaggaccatactggcaagccagctcctgaggattatccactatttcgcacggtcaatattgccgacggcaagtggcaccgggtggcgatctcagtcgagaaaaagacagttaccatgattgttgattgcaaaaaaaagactaccaaacctttagataggagtgagcgcgcaattgtggacacaaatggcattactgttttcgggactcgaatcctggatgaagaggtgttcgaaggtgacattcagcagtttctaatcaccggcgaccccaaggccgcatatgactactgtgagcactattcaccagattgcgactcttctgccccaaaagccgctcaggcccaggagccgcagatcgatgagaaaaagaaatccaactttaaaaagaagatgagaaccgtcgccaccaaatccaaagaaaagtccaaaaagttcacgccacctaagtcagaaaaattttcctcaaaaaaaaagaaaagctaccaggcctctgctaaagccaagttaggagtgaaggcaaacattgtagacgattttcaggagtataactatggtactatggagtcttaccagacagaggccccaagacatgtgtcaggaacaaatgagccaaacccggtggaagagatattcaccgaggagtatttgaccggcgaagactatgattcacagcgcaagaattcggaggatactctctacgagaataaagaaatcgacggaagggactcagatctgcttgtagatggcgatctgggcgaatatgacttctatgaatataaggaatacgaggacaaacctactagcccacccaatgaggaattcggacctggcgtgccagccgagaccgacattaccgagacaagtatcaatggccatggggcatatggcgagaaaggccagaagggcgagcccgctgtggtagagcctgggatgctcgtcgagggtccaccagggccagcaggaccagctggcattatgggaccacccggactgcaggggccaacgggcccacctggcgatcctggcgaccgagggccacctggcagaccgggattacccggtgctgatggcctccctggaccaccgggtacgatgcttatgctgccctttcggtatggcggagacggatcgaaaggccctacgatttccgcgcaggaagcacaggctcaggcgattctgcagcaggcgaggatcgcactccgaggaccacccggaccgatggggctgaccggacgacctggcccagtcggaggtcccggttcatcgggcgctaaaggagaaagcggagacccgggaccacaagggcctaggggagtgcaagggccacctggccctactgggaaacccggaaagagagggagaccgggagcagatggcggtaggggcatgcccggtgagccgggagcaaagggcgacagggggttcgacggtctgcccggactccctggcgacaaggggcacagaggtgaaagagggccacagggtccgccaggaccacccggtgatgacggcatgagaggggaagatggtgaaattgggcctaggggcttgcctggggaagccggaccacgtggactgctcggaccaaggggcactcctggagcaccaggacaaccgggtatggcaggagtggatggaccaccaggacccaaaggcaacatgggtccgcagggagaaccgggacctccgggtcaacagggtaaccctggcccacagggcttgcccggaccacagggccctataggccctcctggcgaaaaaggacctcagggcaaaccgggattggcaggcctacccggtgccgacggccctcccggacatcctggtaaagaggggcagagcggggagaagggggcactcggccctccaggccctcaggggccaatcggataccccggtccacggggagtgaagggggctgacggggtgagggggctaaagggcagcaagggtgagaaaggggaggacggattcccaggttttaaaggcgatatgggtctcaagggcgaccgaggagaggtcggtcagatcggccctaggggggaggacgggccagagggtccaaaaggcagagctggacctaccggtgatccgggtccttcagggcaggcaggggagaaaggaaagttgggcgtcccaggactgcccggttaccccggaagacagggtccaaagggttccaccggattcccaggatttcccggagccaatggggagaaaggcgctcgcggagtggctgggaaacctgggccaagagggcaacgcggtcctaccggtcctcgcggatcacgtggcgctaggggcccaacaggcaagcctggacctaaaggtacgagcggcggagatgggccacctggcccaccaggcgagcggggtccccagggcccacagggccctgttggattcccaggacccaagggacctcctggacctcctggtaaggatggattgccgggacatccgggacagcgcggagaaaccgggttccagggaaagactggcccacctgggccaggtggcgtggtggggcctcagggaccaaccggcgaaacagggccaatcggcgaaagaggccacccgggacccccaggccctcctggggagcaagggctccctggagcagccggtaaagagggagctaagggagaccctggccctcaggggatttctggaaaggatgggccagctgggctgcgcggattccctggcgaacgtggcttgcctggagctcagggcgctccgggacttaaaggcggtgaaggaccacagggtccccctggcccagtcggatctcccggagaacgtgggagtgccggaactgccggtcccattggactgcccggtcgacctggaccgcagggtcctcccggtcccgctggggagaaaggggcaccgggagagaagggcccacagggtcccgctggacgcgatggagttcagggtcccgtgggcttgccaggacccgctggacccgctggttctccaggcgaagacggagacaaaggcgagataggtgaaccaggccagaaggggtcaaagggtgacaaaggagagaatgggccacccggacccccaggacttcaggggccagtcggggcacccggaatcgcaggcggagacggagaacctggcccaagaggccagcaaggcatgttcggtcagaagggggatgagggagcgagaggttttcccggtccaccagggcctatcgggctccagggcttgcctgggcctccaggagagaagggggagaatggagacgtcggtcctatggggccacccggtcccccaggtccaaggggccctcagggacctaacggggcagatggcccacaggggcctccaggtagtgtcgggtcagtgggtggagtgggggaaaagggtgagcctggcgaagccggtaatcctggtcccccaggtgaggccggagtgggtgggccaaagggagaacgcggagagaaaggggaggcgggtccacccggtgccgctggccctccaggcgcaaagggacctcccggagacgatggcccaaaagggaatcctgggccagtgggctttcccggagaccctggaccacctggcgagcccggaccggcaggccaggatggggtgggcggtgataagggagaagatggagacccaggccagccgggtcccccagggccatccggagaggccggtcctcccggaccccctggaaaacgagggccacctggcgctgccggagccgaagggcgacagggcgaaaaaggggctaaaggggaagctggagcagagggcccacctgggaagaccggaccagtgggacctcagggtcccgctggcaaacccggacccgaaggcctaagggggatccccggaccggtcggcgagcaggggttgcccggagcagcagggcaggacggcccacctgggccaatgggaccaccaggcctaccaggccttaaaggagaccccggaagcaagggggaaaaaggccaccccggacttataggtctgataggcccaccaggggaacagggcgagaagggagatagggggctccctggcacacagggttccccaggagctaagggggacggcggtattcccggaccagcaggccctcttggtccccctggacctccagggctgccgggtccgcagggccctaaaggaaataaagggagtaccggacctgcgggtcaaaaaggcgactctggcctcccaggccctcccggaagtccgggaccacccggagaggtcattcagcccctgcccatcctgtcatccaagaagaccaggagacacaccgaaggaatgcaggcagatgccgatgataatatactggactatagtgatggaatggaggagattttcgggtcactgaacagtctcaagcaagacattgagcatatgaagtttccaatgggcacccagaccaatcccgcaagaacatgtaaagacttgcaattgtcacaccccgatttccccgacggggagtactggattgatccaaatcaagggtgctctggtgactcattcaaagtttactgcaatttcacgtctgggggagagacatgcatctacccagataagaagtccgaaggtgttcgcatctcaagttggccaaaagaaaaaccaggaagctggttctctgaatttaagcggggaaagctcttaagctatctggatgttgagggtaattcaatcaatatggtgcagatgacttttcttaagttactgactgcctctgccagacagaactttacttatcactgtcatcagtccgccgcttggtacgatgtctcatccggctcttacgataaagctttacggttccttggctccaatgatgaagagatgtcctatgataataatcccttcatcaagaccctctacgacggctgtgcgtctaggaagggatatgagaagactgtcattgaaatcaacacacctaaaatcgaccaggtgcccattgtggacgtgatgattaacgatttcggggatcaaaatcagaagtttggttttgaagttggcccagtgtgctttctcggata

SEQ ID NO: 28099 - DNA, 3081 bp, synthetic construct
  misc_feature 1..3081: note = Description of Artificial Sequence: Synthetic coding sequence
  source 1..3081: mol_type = other DNA
atggtctctgaagtaagcagagacttaaaggttaagcgtgagaagctggtgaaactggcccaggagggcaaaatggctcttaaggaccccaaggtggagcaagctcaactggaaactcaggttctacaagtgaagcaggaaaagagggaaaacctagagtttcaagactaccaagatattcaagaagataaggtgcagcgcatcagtgatgtcataggatctaccgggtttcccggttttcctggggctaatggtgagaaaggagccagaggggtggcagggaagcccggaccacggggacagaggggacctacgggcccacgcggaagccgcggagctaggggtccaactggcaagcccggaccgaaagggacaagcggtggggacggccctcctggcccaccaggcgagaggggaccccagggtcctcaggggccagtagggttccccggaccaaaaggtccgccaggccctcccggaaaggacggacttccaggacaccccggtcagagaggcgagactgggtttcaggggaaaaccgggccacccggacctggcggagttgtagggcctcagggcccaacaggtgaaaccggcccaatcggagagcggggacatccaggccctcctggacctcctggggaacaggggctgccaggggcagctggtaaagagggggctaaaggcgatccagggcctcaaggcataagcggcaaggacggcccagccggactgagaggcttcccaggggagcgcggactccccggtgcgcaaggagcccctggactgaaaggcggtgaggggccacagggccctcccggaccagtgggctcccctggggaacggggatcagccggaactgcaggtccgatcgggttgcccggacggccaggaccccagggcccacccggaccagcaggcgaaaaaggagccccaggggagaagggaccccaggggcctgcgggaagggatggcgtgcagggcccagtcggtctcccaggtccagcagggcctgcaggatccccaggtgaggacggggacaagggcgagattggagagcctggtcaaaaggggagtaagggagacaaaggcgagaacgggccacccggtccccctggcttacaggggccagtgggggcacccggtattgctggtggagatggggagccaggccctagagggcagcagggaatgttcggccagaaaggtgatgaaggggctaggggctttcctggaccgcctggacccatcggacttcaaggcctgccagggccaccaggggaaaagggtgagaatggggacgtgggcccaatggggcctcctggaccgcctgggccaaggggtccgcaaggtccaaacggtgcggatggacctcaagggcctcctggctcagtgggctcagtgggaggagttggggaaaagggcgagcccggagaggcagggaatcctggccctccaggagaagcaggagttgggggaccaaaaggtgagaggggcgaaaagggggaagcgggtccccctggcgctgccggaccgcctggagcgaaggggccaccgggtgacgacggccctaagggaaacccagggcctgttgggtttcccggagatcccggaccacccggtgagccgggacctgcgggacaggatggcgtcggcggtgacaagggtgaggatggcgaccctggacaaccgggacctcccggaccttctggcgaggccggtccaccaggtcctccagggaagcgcggtccgcctggcgctgctggcgctgaaggcagacagggagaaaaaggcgcaaaaggtgaagcgggagccgaggggcctcctggaaaaacagggcctgtcggccctcagggccctgcgggaaaacctggtccagaggggttgaggggtattccaggaccagtgggagagcagggcttacccggagccgcaggacaggacggtcctcccggacctatgggtccacctggcctgccagggctaaaaggcgaccccggaagcaagggggagaagggacacccaggactgatcgggcttatcggcccaccgggtgagcagggtgagaagggcgaccggggtctccccggaacacagggctcgccaggggcaaagggcgatggcggaattccaggccctgctgggcctctcggcccacccggacctccaggattgcccggaccacagggacctaagggtaataaggggtctacagggccagcgggacagaagggcgatagtgggttacccggaccacctggctccccaggacccccaggagaggtgatacagccccttcctattttaagcagcaaaaagacaaggcgccacacagaaggaatgcaggctgacgccgatgacaacatcctagattatagtgacgggatggaagagatttttgggtccctgaactccttgaaacaagatattgagcacatgaagtttcccatgggaacccagacgaaccccgctaggacttgcaaggacctccagctcagccatccggatttcccagatggggagtactggattgatcccaaccaggggtgctccggcgactcatttaaggtatattgtaactttaccagcggcggtgagacctgtatttatccagacaagaaaagcgaaggcgtgcgtatttccagctggccaaaagagaaacccggatcatggtttagtgagttcaagcgcggtaaattactctcatatctggatgtagagggaaattccatcaacatggttcaaatgacctttctgaaattactgaccgccagcgctcgccagaatttcacatatcattgccaccagagcgctgcttggtacgatgtgagttccggctcttacgataaagcactgcgcttcctgggatcaaatgatgaggaaatgagttatgataacaacccatttatcaagactctgtatgacggttgcgcctcccgaaaaggctacgagaagacggttattgagatcaacactcctaaaattgaccaagtgcctattgtggacgttatgatcaacgattttggcgatcagaatcaaaagtttggctttgaggtgggtcctgtctgctttttgggttag

SEQ ID NO: 28100 - DNA, 5421 bp, synthetic construct
  misc_feature 1..5421: note = Description of Artificial Sequence: Synthetic coding sequence
  source 1..5421: mol_type = other DNA
atggagccatggagcagtaggtggaagacgaagcgctggctctgggacttcactgtcacaaccctggcactgacatttctgtttcaggcacgagaggttcggggagctgccccagttgatgtgctgaaagctctggattttcacaattcacctgaaggtattagtaaaacgacagggttttgtacaaaccggaagaacagcaagggctcagatacagcttaccgagtctctaaacaagcccagctgtccgctcccaccaagcagttatttccaggaggtactttccctgaggattttagcattctcttcaccgtgaagcctaagaaagggatccaatcttttttactgtctatttacaacgagcacggcattcaacaaattggagtcgaggttggcagaagccccgtgttcctcttcgaggaccacaccgggaagcctgctccagaggactaccctcttttccggaccgtgaatattgctgatggcaaatggcatagagtagcaatctccgtcgaaaaaaaaaccgtaacaatgatcgttgattgcaaaaaaaagacaacgaaacctttggatcgtagcgaaagggcgattgtggacaccaacggtatcactgtgtttggcacacggattttggacgaagaggtctttgaaggagacattcagcaattcctgatcacgggagaccctaaggcagcgtacgattactgtgaacactactcgcccgattgcgattctagcgctcctaaggccgcacaagctcaggaacctcagattgacgaatatgcccctgaagatatcattgaatacgactatgaatatggggaagctgaatacaaggaagccgagtccgtgaccgaaggtccaacagttactgaagagacgattgcacagacagaagccaatatcgtggatgattttcaggagtacaattacggaaccatggaatcctaccagacagaggcaccacggcatgtctctgggaccaacgagcctaatcccgtggaagagatcttcacagaggaatacctgacgggggaggactatgatagccagcggaaaaactcagaggacactctgtacgaaaataaggagatcgacggacgggatagcgatctgttagtggatggggatctcggggaatacgacttttatgagtataaagagtatgaagataagcccaccagccctccgaacgaagaattcggccctggggtgcccgctgagaccgatattactgagacatccatcaatggacacggcgcttacggggaaaaggggcagaagggagaaccagctgtggtggagcccggaatgcttgtggaaggtccccctggccctgccggtccggcaggaataatgggccctcctggcctccagggacccaccggccctcctggtgaccccggagacagaggaccacccggacgtcccggactgccaggggctgatgggctgcctggacctcccggtaccatgctgatgttgcccttcaggtacggaggggacggctcaaagggcccaacgatctcggcccaggaggcccaagcccaggctatcctccagcaggcaagaatcgctctcaggggaccacctggtcccatgggacttacagggcgtccaggccctgttggaggcccaggatcatccggtgccaagggcgaaagcggggatcccggtcctcagggcccaagaggcgtacaggggccaccgggaccaacgggcaagcccggaaagcggggtcggccaggagccgacgggggtcgcggaatgccgggagagcccggagcaaagggggatcggggattcgatggcctgccagggctgcctggcgacaagggccacagaggagagcgaggccctcagggaccccctggtcccccaggagacgatggcatgcgcggtgaagatggcgagatcggccctaggggcctgcccggagaggccggtcctcgcggtctgctgggcccacggggaaccccaggggcacctggtcagcccggaatggccggtgttgatggacccccaggacctaaaggaaacatggggccacagggggaaccaggccctccaggccagcaaggtaatcccggaccgcagggcctacctgggcctcaagggcctataggcccacccggtgagaaaggcccacagggaaagcccggtctcgctggactgccaggggctgacggaccacctgggcatccgggtaaggaaggacagtcgggggaaaagggagcactagggccaccagggcctcagggtccgatcggttacccaggccctaggggggtgaagggcgcagatggcgtaaggggcctcaagggcagcaagggagagaagggcgaggacggattccccggatttaagggtgacatgggcttgaagggagatagaggtgaggtggggcagattggccctaggggcgaagacggaccagaggggccaaagggtcgggctggaccaaccggtgaccctggaccatctggccaggccggagaaaaggggaaactcggagtacccggtcttccaggctaccctggcaggcaaggcccaaaaggcagtaccgggtttccagggtttccaggcgcaaacggggaaaaaggagctcgaggcgttgcaggtaagcccggtccgagaggacagcggggacctaccgggccaagaggcagcagaggagcccgtggaccgacgggaaaaccaggcccaaaaggcacaagtgggggagatgggcctccagggccacctggagagcggggaccgcagggcccacagggtccagtcgggttccctgggccaaaaggacctcctggccctcctggcaaagacggactacctggccaccctggtcagagaggagagacaggctttcaaggcaaaacaggcccacctgggccaggcggtgtagtcggcccacaaggtccaaccggcgagaccggacctataggggagaggggccacccgggacccccaggccctcccggagaacagggactgcctggcgctgccggaaaggagggagcaaaaggggacccgggacctcaggggatatctggcaaggatggcccagccggtctgcgtggctttcccggagagcggggtctgcctggcgctcagggtgcacccggactgaagggtggtgaaggaccccaggggcctcccggacccgtaggatcacccggagagcggggatctgccggaacggccggtcccattggattgcctgggagacctgggcctcagggccctccaggtcccgctggcgaaaaaggcgctccaggcgaaaaaggtccacagggcccagccggtcgggatggcgtccagggaccggtgggcctgcccggaccggcaggcccagcaggctctcccggagaagatggggacaaaggcgagatcggtgagcccggacaaaaagggagcaaaggtgacaaaggtgaaaatgggccacctggacctcccggactgcaaggaccagttggagcacccggaattgctgggggagacggagaacctgggcctcgaggccagcagggtatgtttgggcagaagggtgatgagggggcacgcggtttccctgggccacccggacctatcggcctccagggtttgcctggccctcccggtgagaagggcgagaatggcgacgttgggcctatgggccctcccggacccccaggaccaagaggtccacaggggccaaacggcgcagatggaccacaagggcctcccggatccgttggctctgtgggcggagttggcgaaaaaggcgaacccggtgaagcaggcaatcctgggccacccggagaggcaggagtgggaggcccaaaaggtgagcgaggcgaaaagggggaagccggacctccaggcgcagcgggaccgcctggcgcaaaggggccaccaggggacgacggacccaagggaaacccaggcccagtcggctttcccggagatccaggccctcccggtgagccgggacctgcagggcaggatggcgtcggcggagacaaaggcgaagatggagatcctggccagcccggacctccaggaccctctggcgaggccggtcctcctggccctcccggaaaaagaggaccacccggagcggctggagccgaaggccgtcaaggagaaaagggcgcaaaaggcgaggctggagccgagggacctccagggaagactggccctgtcggccctcaggggccagctggtaaacctggccctgagggcttgaggggcattcctgggccagtgggtgagcaaggtctgcctggggctgcaggccaagatggacctccagggccaatgggccctccgggactgcctggtctcaagggagatcccggaagcaagggagagaaggggcaccccggtttgattggactgattgggcctccaggagagcagggcgaaaagggagacagaggactgcctggcacacaagggagccctggcgcaaagggcgatggaggtattcccggaccagcagggcctttaggacccccaggccctcccggactgccgggacctcagggccctaagggcaataagggatctaccggaccagccggacagaagggcgactcggggcttccgggtcccccaggtagcccgggaccccctggcgaggtgatacagccactgcccatactaagctcgaaaaagacccgtagacacacagaaggcatgcaggccgatgccgacgataacattctggactattccgacggaatggaagaaatcttcggctcacttaactctctgaagcaggatatcgaacatatgaagtttcccatggggacacagactaaccccgctagaacctgcaaggacctgcagttgagtcaccctgatttccctgacggagagtattggattgaccccaaccagggttgttccggagactcattcaaggtgtactgcaacttcacctccgggggagagacctgcatttatcccgataagaaatcagagggggtccggatatcctcttggcccaaggaaaagcccggtagctggttttctgaatttaaaagggggaagctcttgagttatctggatgtggagggcaactccattaacatggtccagatgacattcctgaaactcttgacggcctcagccagacagaattttacctaccactgtcaccagtcagccgcttggtacgacgtcagttctggtagctacgataaagccctgagattcctgggtagcaatgacgaagaaatgagttacgataataatccctttattaaaactctttatgatgggtgcgcttctaggaagggttacgagaaaacggtgatcgagatcaacacccccaagatcgaccaagtccctatagttgacgtgatgattaacgacttcggagatcagaatcaaaaatttggtttcgaggtcggacctgtttgtttcttaggatac

SEQ ID NO: 28101 - DNA, 5073 bp, synthetic construct
  misc_feature 1..5073: note = Description of Artificial Sequence: Synthetic coding sequence
  source 1..5073: mol_type = other DNA
atggaaccatggtcgagtcgctggaagaccaaaaggtggctctgggacttcaccgtgaccacactggctctgactttcctgtttcaggctcgagaagttcgaggcgcagctcccgtggacgttctaaaagccttagactttcataatagcccagaaggcatctcgaaaaccacaggattttgtacaaatagaaagaacagcaaggggagcgacacagcttatcgtgtttctaagcaggctcagctgagcgcacccacaaaacagttgtttccgggaggaaccttccctgaagacttcagcatattattcacagtcaagcccaagaagggaatccagtctttcctgctctctatctataatgaacacgggatccagcagattggtgtggaggtaggaagatctcctgtatttctctttgaggatcacacaggtaaacccgctcctgaggattacccgctctttcgaactgtaaacattgccgacgggaaatggcatcgggttgcaatcagcgttgaaaagaagacagtgacaatgatcgtggattgtaaaaaaaagacaactaaacccctggatcggagcgaacgggctatagtggatacaaatggcatcaccgttttcggcaccaggattctggacgaagaggtgttcgaaggggacatccagcagttcctaatcacaggtgaccctaaagccgcatacgattattgcgagcattattcaccagattgcgattcatctgctcccaaggctgcccaggcccaggaacctcagatagatgagtatgccccagaggacatcatagaatacgattatgagtatggagaggctgaatataaggaagccgagagcgtgaccgagggaccaaccgtcacggaagagactatcgcacaaaccgaaatcaatggccatggtgcttacggcgaaaaggggcagaagggcgagccagccgttgtcgaacccggaatgttggttgaggggcctcctggccctgctggaccagccggaatcatgggtccaccaggtttacagggcccaactggaccacccggagatcctggagatcggggtcctcccggaaggcctggactccctggcgcagatgggctgccaggtccgcctggtactatgctgatgctaccatttcggtacggcggtgacgggagcaagggccctactatatcagcgcaagaagcccaagcacaggcgatcctgcagcaagctcgcatcgccctccggggaccacctggcccaatgggcctcaccggacgccctgggcctgttggcggtcccggtagtagtggcgctaagggagagtcaggcgaccctgggcctcaggggccaaggggagtgcaggggcctcctggacccactggtaagcctggtaaacgcggaagacccggagccgatggaggacggggaatgccaggcgagccgggtgctaagggggaccggggatttgacggtctaccaggcctccctggggataaagggcatcggggagagcgcggacctcaggggccacccggaccccctggggatgatggcatgcgcggtgaagacggcgagatcggaccgcgaggcctgcctggcgaagcagggcctcgcggactgctcggaccccgtggaacacccggtgcccctggtcagcctgggatggccggagtcgatggaccacctgggcctaaaggaaacatggggcctcaaggagagcccggacctcccggacagcagggaaatccagggccacaagggttgcccggaccacagggcccaataggccctccaggagagaaagggcctcagggcaaaccgggattggcgggtttaccaggcgcagacgggccacctgggcatcccggaaaggagggccaatctggggaaaaaggagctctgggccctcccggtcctcaggggccaatcggttatcctggcccacggggtgtcaagggcgctgatggagttcggggactcaaaggctcaaagggagaaaagggggaggacggcttccctggcttcaagggtgacatgggtctgaaaggcgataggggcgaggtggggcagataggcccaagaggggaggacgggccagaaggcccaaagggcagggcaggaccaactggcgatcccggaccctccgggcaggcgggtgagaaaggcaaactcggtgtccccggactaccaggctaccccggaagacagggacctaaaggttctaccggtttccccggattcccaggcgctaatggagaaaagggcgctcgtggcgtcgccggtaagcctggtccacgaggccagagaggccctactggacctcgcggtagcagaggagctcggggtcctacaggaaagcccggtcctaagggaacttccggaggggacggacctcccggtccacccggagagcgcggtccccagggaccgcagggcccagtcgggttcccaggtcctaagggaccccctgggccaccaggcaaagacggactgccaggacaccccggtcaacggggtgagacgggttttcaggggaagaccgggccacctggacctggtggggtggtcgggccacagggtcccacaggtgagacagggcctataggagagcggggacacccaggaccccctggccctccgggagagcaaggtctgcctggagcggctgggaaggagggcgcaaaaggcgacccagggcctcagggaatctccggaaaggacggccctgcgggactgcggggatttcctggcgagaggggcctacctggggctcagggcgctccaggtctgaaagggggagaaggaccacaagggccacccggtcctgttggttcgccaggggagagggggtcagccggaactgctggtcctataggactcccagggagacctgggccacagggccctcctggacctgcgggagagaaaggcgctcccggagagaaaggcccacagggtcctgcgggtagggacggggtacaagggccagtaggcctgcccggacctgcaggaccggctggtagccctggggaagacggggacaagggggagattggtgagccagggcagaaaggttctaagggcgataagggagagaatggccctccaggcccacctggactgcaaggccctgtaggtgctcccggtatcgccggaggagacggtgaacccggtccccgtggtcagcaggggatgttcgggcagaaaggcgatgagggcgctagaggttttccaggcccacccggacctatcggtttacagggccttcccggaccgcctggagagaagggagagaatggcgatgtgggcccaatgggtcctccagggccaccgggtccaagaggtccgcaaggcccaaatggggctgatggaccacaaggcccacctggatcggtgggctccgtaggaggtgtaggtgaaaagggggagccaggggaagccggaaaccctggacctcctggcgaagccggagttggaggcccaaagggagaacggggagaaaagggggaagcagggccacctggagccgctggccctcccggagccaaaggccctcccggagacgatggtcctaagggcaaccccggaccagtagggttccccggagatccaggccctcccggtgagcctgggcctgcgggacaggacggagtaggcggtgacaaaggcgaggatggtgatcccggacagccgggtccacccggtccttctggggaggcgggaccaccagggcctcccggaaagaggggccctcctggtgccgcaggcgctgagggcaggcagggcgagaaaggggcaaaaggtgaggccggagcagaggggcctcctgggaagacgggccctgtgggaccacaaggacccgctggcaaacccggtcctgagggcctacgaggaattcctgggcctgtcggggaacagggtctgccaggagccgctggccaggatggccctcccggtcctatgggccctccaggtttaccaggcctcaagggcgaccccggatctaaaggagaaaaaggccatccgggactgattgggctgattggcccacccggtgagcagggagagaagggagaccgcggtttgcctggcacgcagggcagtccaggagctaagggggatggcggtatccccggtccggcagggcctttggggcctcctggtccccctggactgcctgggccacaaggacctaaagggaacaaggggtccacaggtcccgcaggtcagaaaggtgacagcggcctgcccggaccccctgggtcccctggcccacccggagaggtgatacaacctctacccatactaagctctaaaaaaacaagaaggcacactgaggggatgcaggctgatgccgacgacaacatactcgactactctgatgggatggaggaaatctttggcagcctcaattcactcaagcaggacatcgagcatatgaaattccccatgggaactcagacgaaccccgctcgtacctgcaaagacttgcagctgagccaccctgatttccctgacggagagtattggattgaccctaatcaggggtgctctggagactcgttcaaagtgtattgcaatttcacaagcggaggagagacctgcatctacccagataaaaagagcgaaggagtgagaattagcagctggccaaaagagaagcctgggagctggttctcagagtttaaacgtggaaaattgctctcatacctggacgtcgaagggaactctattaatatggtacagatgaccttcctcaagctcctgacagccagcgctcgccaaaacttcacctaccactgtcatcagtctgccgcatggtacgatgtgagctccggatcctacgataaggccctgagatttttgggtagcaatgatgaagaaatgtcttatgacaataacccattcattaagacactctacgacggctgtgcctcccgcaagggatatgaaaagacggtcatcgaaataaacacaccaaaaattgatcaggtccccatagtggatgtgatgatcaacgacttcggcgaccagaatcagaaatttgggttcgaggtgggacctgtgtgtttcctgggctag

SEQ ID NO: 28102 - DNA, 4560 bp, synthetic construct
  misc_feature 1..4560: note = Description of Artificial Sequence: Synthetic coding sequence
  source 1..4560: mol_type = other DNA
atggcaccctatccctgcggatgtcacatcctgcttctgcttttttgctgcctcgcagccgcacgcgctaacttgcttaatttgaactggctgtggttcaacaacgaggacacatcacacgcagcaacgacaatccccgagccacaggggcctctccccgtgcagcctaccgccgatacaactacacacgtaacgccacgcaatgggagtaccgagccagccacagctcctggatcccctgagcctccatctgagctactcgaggacggccaggatacccccacttccgcagagtcacctgacgcgcctgaagagaacatcgccggagtcggagcagagattctcaatgttgcgaagggcattagatcatttgtccagctttggaacgataccgtgccaaccgaatccctggcacgggcagaaaccctggttcttgaaactccagtggggcctctggccctggctggaccttcatcgacaccccaggaaaatggtaccacactgtggccatctagagggattccgtctagcccaggggctcacacgacagaagccggtactctccctgcccctacgcccagtcccccatcccttggccgtccctgggcccctctcaccgggccaagcgtcccgccaccctcgtcagagcggatcagtgaggaagtgggcctgttgcagctgcttggagaccctccccctcagcaggtgacacagacagacgatcctgacgtcggcctagcatatgtcttcgggccagatgcaaacagcggtcaggtggcacggtatcacttccctagcttattttttagagacttttccttgctctttcacatccggcctgcaactgaaggcccaggagtactttttgcaattacggactccgcccaagctatggtgctgctgggcgtaaaactgagcggcgtccaggatgggcaccaggacatttcactgctgtacacggagccaggagctgggcaaactcataccgcagcctcatttcgcctgcccgcatttgtgggccaatggactcatctcgccctctctgtagctggcggattcgttgccctctatgtagattgtgaggagtttcaaagaatgcccctggcgagatcatcaaggggcctggagctggaaccaggcgcaggactctttgtggcccaagcgggaggcgctgatcccgataaatttcagggagtcatcgccgagctgaaggtgcgtcgggaccctcaagtatcaccgatgcattgtctggacgaagaaggtgatgactcagatggagcttctggcgacagtggctccggactgggtgacgcacgggagctgctgagggaggaaaccggggctgccctcaaaccaaggttgcctgccccacctcccgtgacgacgccacctttggcagggggaagtagtacagaggactcacggtcagaagaagttgaagagcaaaccacggtggctagtctgggcgctcagactctcccagggagcgatagtgtgagcacgtgggatggaagcgtgcgcacgccaggcggaagagtcaaagagggcggacttaagggtcaaaaaggagaacccggagttccaggccctcccggtcgagccggaccacctggatctccgtgccttcccggaccccctggtctgccctgtcctgtctctcccttgggccctgcgggacccgcattgcagaccgtccccggaccacaggggcctcctgggcctccgggaagagacggcacgcctgggcgtgatggagagcccggagatcccggagaagacggcaagcctggcgacaccggccctcagggtttccccggaacacctggcgatgttgggcctaaaggcgacaagggggatccgggtgttggagaacgaggacccccaggccctcagggaccaccgggaccgcctggaccgtcatttaggcatgataaactcacctttattgacatggaaggctctgggttcggaggagacctggaggctctgaggggaccaaggggcttcccagggcctcccggaccgccaggagtgcctggcctgccaggagagcctggcagattcggggtgaactcctcagacgtacccggtcccgctgggttgcccggagtcccgggtcgcgaaggaccacctgggttcccgggactgccaggaccacccggtcccccaggcagagagggcccaccaggacggactgggcagaagggaagcctgggcgaggccggtgctccagggcacaaggggagcaagggcgctccgggacctgccggtgcccgtggggaatcgggactggccggtgctcccggaccagccggacccccagggcctcccggaccacccggtccgcctggtcctgggctcccagctggattcgacgatatggaggggtcgggcggaccgttctggtcgacagctagatctgccgatggtccacaggggcctcccggtttgccaggtttgaagggcgatccgggagtgcctggtctgccaggcgctaagggagaggttggggctgacggcgtgcccggttttcctgggctcccaggccgagagggtatcgcaggaccacaagggcctaaaggcgataggggcagcagaggggagaaaggagatccaggcaaagatggagtcggccagcccggtctgcctggaccccctggccctcccggtccggtagtgtacgtctccgagcaggatggcagcgtgttgagtgttcccggacctgaagggaggccaggattcgctggcttccccggtccagctgggccaaaaggcaacctggggagcaaaggggagaggggctctccaggaccaaaaggtgagaaaggcgaacccggatccattttttctcccgatggcggtgcgctaggccctgctcaaaaaggtgctaaaggagaacccggatttaggggccctcccggaccctacggcagacccggatataagggggagataggcttccctggcagacccggtaggcccggaatgaatggtttaaaaggtgagaagggggaacctggcgacgcttcgctcggctttggaatgcgtggcatgcctggcccacctggtcctcctgggccaccaggacctccgggtactccggtgtatgacagtaacgtctttgcagagtcatcccggcctgggccacctggactcccgggtaaccagggacctcctgggccaaagggagccaagggcgaagtcgggcctcctgggcctccgggtcagttcccattcgacttcttgcagctggaagcagagatgaaaggcgagaagggggatagaggcgacgctggccagaagggggagagaggtgagccaggtggcggaggcttttttggctcaagcctccctggaccaccaggcccacctggcccacccggacctcgcggatatccagggatccctgggcctaagggagaaagcattcgcggtcagcctgggccaccaggcccacaaggaccccctggcattggttacgaaggcaggcagggccctccagggcctcccggtccacctgggccaccatctttcccaggaccccatagacagaccatatccgtgcccggaccccctgggccaccgggaccgccagggcctccagggaccatgggcgcttcgtccggcgtcaggttatgggccacacgtcaagcaatgctaggtcaagtgcatgaggtgccagagggatggttaatttttgtcgccgagcaagaggaactatatgttagagttcagaatggctttcggaaggtgcagcttgaggccagaacacctttaccaagagggacagacaatgaggtggccgcactccaaccccctgtggtgcagttacatgactcaaatccatatcctcggagggagcaccctcatcccacagccagaccatggcgtgccgacgacatcctcgcatcgcctccgcgactgcctgaacctcagccttaccctggagcccctcaccacagcagttatgtgcatctgaggcctgcaagacctaccagtccccctgcgcatagtcatcgtgatttccaacccgtcctgcaccttgttgcattaaattctcctctgtcaggaggtatgagagggattcgcggagccgattttcagtgctttcagcaggcccgagccgttggattagctgggacctttagggccttcctgagctccagactgcaagatctgtattccatcgtacggcgagctgaccgcgcagcagtgcccatagtcaacctgaaagacgagctgctgttcccttcctgggaggctttgttttctggttcagaggggcctctgaagccgggtgctcgaattttctccttcgatggcaaagacgtgcttcggcatccaacttggccccagaagtcggtgtggcacggtagcgaccccaacgggagacgtctgacagagagctattgcgagacatggcgcaccgaggcaccatctgccacagggcaagccagtagcctccttggcggacgcctgctgggccaatctgctgctagctgtcatcatgcttatatcgtcctgtgcatcgagaactccttcatgaccgcaagtaagtag

SEQ ID NO: 28103 - DNA, 5264 bp, synthetic construct
  misc_feature 1..5264: note = Description of Artificial Sequence: Synthetic coding sequence
  source 1..5264: mol_type = other DNA
atggctccctatccctgtggctgccatatcttactgctgttgttctgttgtttagctgctgcccgagctaacctcctgaatttgaactggctgtggttcaataatgaggacacatcacatgccgctaccaccattcccgaacctcagggacccctaccagttcagccaactgcagacacaaccactcacgtaactccgagaaacggctcaacggaacctgctaccgctccaggcagtccagagccaccttctgagcttctcgaggacgggcaggacacgcccacttcggcagaatctcctgacgcccctgaggagaacattgccggagtgggagccgagattctgaatgtcgcgaagggaattagatcctttgtccagctttggaacgacacagttcccacagaaagccttgccagggctgaaaccctagtgttggagacacctgttggacctttagccctagctggcccaagctccacgcctcaggaaaatggcaccaccctctggccatcccgcggaatcccttcaagccccggagcacatacgacagaagccggtaccctgcccgcacccactcctagtcctccctcattgggaagaccttgggccccactcactgggccaagcgtgccacccccatcttccggcagggccagtctttcgtcgctactcggcggtgccccaccatggggaagcctgcaggaccccgactcgcagggcttaagccctgcagccgcagctcccagtcagcagctgcaacggccagacgtgcggctgcggacacccctacttcacccactcgtgatggggagtctgggtaaacacgccgctcccagcgcatttagcagtggacttccaggcgctctttcccaggtcgcggtcactaccctgacacgagactcaggtgcttgggtttcccatgtcgccaactcagtgggcccaggactcgctaataacagcgcactcctcggggcagacccggaggccccagcgggacgctgtctgcccttaccccctagtcttccagtctgcggccatctcggaattagccggttttggctgcccaaccacctacatcatgagagtggcgagcaggttagagctggcgctcgagcatggggaggtctgctccaaactcactgtcacccctttctggcctggttcttttgcttgttactagtccccccttgtggaagcgtcccccctcccgcacctcccccttgttgtcagttctgcgaggcactccaggacgcttgttggagccgcctgggaggaggtaggttacctgttgcgtgcgcgtcactccctactcaggaagatgggtactgcgtcttaattgggccagccgctgagcggatttcagaagaggttggcctactgcagctactgggggatccccctccccagcaggtgacacagaccgacgatcccgatgtgggccttgcttatgtgttcggccctgacgctaatagcggccaagtggcgagatatcattttccctccctgttcttccgtgactttagcctcctcttccacatccggccagctacagaagggccaggtgttttgttcgccattaccgacagtgcccaagctatggtcctgctgggtgtaaagttgagcggcgtgcaagacggccatcaggacattagcctcctgtacaccgagcccggtgctggccaaacacataccgctgcatccttcagactaccggcattcgtcggccagtggacgcatctggccctttcggttgctggaggttttgtggcactgtacgtagactgcgaggaatttcagcgcatgcccctcgcacgtagcagccggggactggagctggaacctggagccggactttttgtggcccaggcaggcggagccgaccccgacaagttccagggagtgatcgcggagctgaaagtgagaagggatccccaggtctctcctatgcactgcctggatgaggagggggatgattctgacggagcttccggagactctggctcaggtctgggcgacgctcgggagctgcttcgggaagagacgggtgctgccctgaaacctagactgccagcccctccacctgtgacaactcctcctctggctggcggaagtagtactgaagactcaagatcggaagaagtggaggagcaaacaaccgttgcgtccctgggcgctcagacgttacccggatcggatagcgtgtctacatgggacggctcagttagaacacctggcggacgggtcaaggaggggggtctgaaaggccagaagggagaacccggagttccagggccacccggtcgggctggtcctcctggcagtccgtgccttccaggccctcccggtctcccctgtcccgtgtcaccactaggccctgccggaccagctctccagaccgtgcccggtccccagggcccacctggcccacccggacgggatggcactcccggtcgcgacggagaacccggagacccgggagaggacggaaaaccaggcgatacagggccacagggattccctgggacccccggagatgtgggtccgaagggcgataaaggagatccaggtgtcggggagcggggtcctccgggtccacagggcccacccggaccccctgggccaagtttccgtcacgacaaacttacctttattgacatggaagggtctggtttcggaggtgacctcgaggccctgcggggtccccgaggcttccctgggcctccgggaccccctggtgtgccagggctgccaggggagcccggacggttcggcgttaactctagtgacgtgcccggacccgctgggctgccaggggtgcccggtagggaagggccacccggtttcccgggactccctggtccacccggaccccctgggagagaggggcctccgggtcggaccggccagaagggctcacttggcgaagcaggagcaccgggacacaagggttctaaaggagcaccagggcctgccggagcaagaggagagagcggcctggccggagctccaggtccggcaggaccacccggtccccctgggccaccgggtcctcccggacccggattaccggcagggtttgacgatatggagggcagtggcggtcccttctggagcaccgctcgctccgcggatggacctcaaggacctccaggcctccccggacttaaaggagacccaggcgttcccggactgccaggcgctaagggcgaagtcggtgctgacggagtgccagggtttccaggactcccaggccgtgaggggatcgcagggcctcagggacccaaaggcgacagaggttcgcgaggggagaagggggatccgggaaaagacggcgtggggcagccaggactccccggaccccctggccctccagggccagtcgtgtacgtttccgagcaagatggctccgtgctgtcagtgccaggacccgagggacgccctggatttgccggttttcctggccctgccggacccaaaggaaacctgggttccaaaggcgaacgcggatcccctgggccaaaaggggagaagggggagcctgggtcgatcttcagtccagatggcggtgcactgggacccgcacagaagggagcaaagggggagcccggattccggggtccacctggtccgtatggacgtcctgggtataaaggtgagatagggttccccggtcgccctgggcgaccaggcatgaacggactcaaaggcgaaaagggcgagccgggtgacgccagcctgggctttggaatgcgaggcatgcctggccctcccggtccgcctgggccacctggaccaccaggcacccccgtctacgattccaatgtcttcgccgagtcctctcgacctggtcccccaggactgcctggaaaccaggggcctccagggccaaagggcgcaaagggcgaagtcggacccccaggaccacccggacagtttcccttcgatttcctgcagttggaggccgaaatgaaaggcgagaaaggcgaccgtggagacgccggtcagaaaggagagcgcggagaacccggtgggggaggctttttcggatcttctctcccagggccacccggacctcccggaccgcctggccctagggggtacccaggaattccaggccctaaaggcgaatcaattcggggacagccagggcctcccggtcctcaagggcctcctggcattgggtacgaaggcagacagggaccccctggtcccccaggaccacctggacctccctccttccccggtcctcatcgtcagactatttctgttccaggccctccaggccctccagggccacccggtcccccaggcacaatgggagcttcatctggggtgcgcctgtgggccaccaggcaggcgatgctggggcaggtacatgaagtcccagaaggatggctgatcttcgtggcggagcaggaggagctctacgtcagggtccagaacggattcaggaaggtccagctcgaggccagaacccctttgcccagggggacagataacgaggtggccgctctgcagcctccagttgtgcagctgcatgacagcaacccctatccgagaagggagcacccccacccaaccgctcgtccctggcgggcagatgacatcttggcctcgccccctaggcttcccgagccacagccctatcccggagcaccacatcattccagttatgtccatctccgtcctgctcgtcccacttctccacccgctcattctcaccgagattttcaacccgtgttgcacctcgtcgctctaaactccccactcagtggcggtatgcgaggcattcggggagcagattttcagtgctttcaacaagcccgagccgtcggccttgcaggtacttttcgggctttcctatcaagcaggctccaggatctatattctatcgtacgaagagcagatagggctgcagtgcccattgtcaatctgaaagacgagctactgttcccatcctgggaggctctcttctctggttccgaagggcctttgaaaccaggggctcgcatattcagcttcgacgggaaggatgttctcagacatccaacttggcctcagaaaagcgtttggcacggaagtgaccctaacgggcgtcgcttgacagaatcctattgcgagacctggcggaccgaggcgccatcagcgactggccaggcatcaagtctgcttgggggtagattgctgggacagagtgccgctagctgccaccatgcatatatcgtgctctgcatcgaaaactcttttatgactgccagcaagta

SEQ ID NO: 28104 - DNA, 4020 bp, synthetic construct
  misc_feature 1..4020: note = Description of Artificial Sequence: Synthetic coding sequence
  source 1..4020: mol_type = other DNA
atggcacctcgttgtccctggccttggcctagacgtcggagattattggatgtgctggccccactcgttctcctgctcggcgtccgggctgcctccgccgaacccgagcggatttccgaggaagtgggactcttacagcttctcggagatccacccccacagcaggtgacccagacagacgaccctgacgtaggacttgcctatgtcttcggcccagatgcaaactcaggtcaagtggccaggtatcacttcccaagcttgttttttagggacttcagccttctcttccacatcagacccgctaccgagggccctggcgtcctcttcgctataacagattctgcgcaagcaatggtcttactcggggtgaaattaagtggagtgcaggatggacatcaagatatatcgctgctgtatacagaacctggagcaggccaaacacatacggctgccagtttcagacttcctgccttcgtgggacagtggacacatctggccctgtccgtggcgggtggtttcgtggcgctgtacgtggattgcgaggagttccaaagaatgccactcgcgcgtagctctagaggcctggaattggagccaggagctggtctcttcgtagcacaggcaggaggcgcagaccccgacaaatttcagggggtcatagctgaactcaaagtccggagggacccacaggtatcccctatgcactgcttagacgaagagggggacgactcggacggcgcttccggagactccggctctggtctcggagacgcccgagaacttttaagggaagaaaccggagccgcactgaagccacgactgccagcaccaccgccagtgactactccacccctggcgggaggctcgagcacagaagactccaggagcgaggaagtggaggagcaaaccaccgtggctagtctgggagcacagaccctgcccggttcagacagcgttagtacgtgggacggctccgtaagaacacctggcggtcgagtcaaagagggtgggctgaaaggtcaaaagggcgaacccggagtgcccggaccccctggccgagctggccctcctgggtcgccgtgcctcccaggaccaccgggacttccctgccctgtctctccattggggcctgcgggtcctgcgttgcaaaccgtgccaggcccacaaggaccaccgggtccccctggacgggacggcacacctgggagagatggcgaaccaggtgatcccggagaggacgggaagccaggggataccggccctcaggggttccccggtacccctggggacgtaggtcctaagggtgacaagggcgatccgggagtcggggagcgagggcctcccggtccccagggacctcctggcccacctggtccatcattcaggcacgataaactcacttttatcgatatggaaggatccggatttggaggcgacctggaggctctccggggaccgagaggcttccctggcccacctggaccccctggcgtgccagggcttcccggagagcccggaagatttggggtcaatagtagtgacgtgccgggtcccgcagggcttcccggagttccaggtagggaggggccacccggtttcccgggacttcccggaccacctggcccaccagggcgtgagggccctcctggcagaacgggtcagaagggcagcctgggagaagccggtgctcctggacacaaggggtccaaaggtgctcccggacctgctggcgcacggggtgagtccggccttgcaggggctccaggtcctgcgggtcccccaggcccacccggacctccgggtcctccgggtccagggcttcccgctggattcgacgacatggaggggtccgggggacctttttggagcactgcccgttccgcggatggccctcaagggcctcccggtttaccagggctgaagggggaccccggagttccaggcctacccggagccaagggtgaagtcggggcagatggcgttccgggtttccccggtctcccgggacgggagggaattgccggaccgcaagggcctaagggcgatagggggagccggggagaaaagggggatcctggcaaagatggcgtcgggcagcccggactgcccggtccccctgggcctccaggtcccgttgtatatgtttcagagcaggacgggagcgtgctgagtgttccgggacctgaagggaggccaggctttgctggatttcccggaccggcaggccctaaaggcaatcttggcagcaaaggggagagaggttcgccgggacccaaaggggagaaaggagaaccaggatctattttttcccccgatggcggagccctgggcccagctcagaaaggcgcaaaaggggaacctggcttcaggggcccacctggtccctacggccgaccagggtacaagggggagatcggattcccaggccgtcctggcagaccaggtatgaacggtctaaaaggggaaaagggggagccaggtgacgccagcctggggtttggaatgaggggcatgcccggtccccctggccctcctggcccacctggtcctcccggaacacctgtatacgatagcaacgtattcgcagagagcagcagacctggcccacctggattgcctggcaaccagggacctccagggcctaagggcgcaaagggagaggtggggcctcccggacctcctggccagttccctttcgacttccttcaactcgaggccgagatgaaaggcgagaaaggcgatcgcggtgacgccggacaaaaaggggagagaggtgaacctggaggtggaggatttttcggctcatctctgccaggccctcctggtccaccaggaccacctggcccaagggggtatccagggattcctggacccaaaggcgagtccattagaggacagcctggcccaccaggcccacagggcccacctggcatcgggtatgagggcaggcaggggccacctgggccacccggtccccctggaccaccttccttccctggcccacacaggcaaacgatatccgtgccaggccctccgggtcctcccggtcccccaggtccccctgggaccatgggcgcaagcagcggcgtgcgactgtgggccacgagacaagccatgctcggacaagttcacgaagtcccggagggctggctgatctttgtggcggaacaagaggaactgtatgtccgcgtgcagaatggatttcgtaaggttcagttagaggctagaaccccactcccgcgaggaacagataatgaagtggccgctcttcagcctcctgtggtccaactccatgactcgaacccctatcccagaagagagcatcctcatcctaccgccaggccgtggagagccgacgacatactcgcctcccctccgaggctgccggaacctcaaccctaccctggcgctccccaccactcctcctacgtacacctcaggccggcacgtcctacatcccctccggcacactcccaccgcgacttccaaccagttctgcatctcgtggccctgaacagccccctcagtgggggaatgcgcggtattcggggtgcagattttcagtgcttccaacaagccagggcggttggactggcgggaacatttcgtgcttttttatccagcaggctccaggatctgtactctatagttcgcagagctgaccgggcagcagtgcccatcgtgaatctgaaggatgagctcctcttcccctcctgggaggctctgttcagcgggtcagaggggcctttaaagcctggggcacggattttcagctttgacggtaaggacgtgctgagacaccctacgtggccgcagaagtccgtgtggcatgggagcgatcccaatggccgaagactgacagagagctactgcgagacctggcggacagaagccccatcagcaactggccaagccagctcactcttgggcggtaggctgcttggacagagcgccgctagttgtcatcacgcgtacatagtgctgtgcatagagaatagcttcatgacagctagcaagtag

SEQ ID NO: 28105 - DNA, 4020 bp, synthetic construct
  misc_feature 1..4020: note = Description of Artificial Sequence: Synthetic coding sequence
  source 1..4020: mol_type = other DNA
atggcacctaggtgcccttggccttggcccaggagacgcagactgctcgatgtcctcgcacccctggtcttgctccttggggtacgggcagcttctgctgaaccagagagaattagtgaggaagtgggactgctccagcttcttggagacccgccaccacagcaggtaacccagaccgatgatcctgacgtgggtctggcttacgtcttcggcccagacgctaattcagggcaggtggcaaggtatcatttcccctccctgttttttcgggatttttcccttctgtttcatatcaggccagccaccgaaggccctggcgttctgttcgcaatcaccgatagcgcacaagctatggtgctgcttggcgtgaaactcagtggagtccaagacggccaccaggacattagtcttttatacacagaacccggagccggacagacacacaccgctgcctcttttaggctcccggctttcgttggccaatggacccacctggcactgtctgtggccggaggcttcgtggcactttacgtcgattgtgaggaattccagcggatgcccctggccaggtctagtaggggccttgaactggagcccggtgcgggactctttgtcgcacaggctgggggagcagatccggacaaattccagggcgtgattgctgagttgaaggtgcgtcgtgatcctcaggtgtcaccaatgcattgcttggacgaagagggcgacgactcagacggggctagcggagactccggctctggtctgggcgatgccagggagctgctccgggaggaaactggcgctgctctgaaaccgaggcttcccgctcctccccctgttacgacaccccctctagctggaggttctagcaccgaggactcccgcagcgaagaggtagaagaacagacaaccgtggccagtttgggagcccaaacacttcccggatctgactccgtctcaacctgggacggatccgtaagaactccgggtggcagagtaaaggaaggcggattgaaaggccagaagggtgaacctggagtgcctggaccgccagggcgtgctggccctcctggttccccctgtctaccaggtccacccggtctgccgtgtcctgttagccctttgggaccagccggaccagccctgcagaccgtccctggaccccagggtccgccagggcctcccggacgggacggcactcccggtagggacggggagccggtgagtccccatgtgccgccatcaccaggtgacactggaccacaggggttcccgggaacaccgggagacgtgggcccaaaaggtgataagggagatccaggagtcggagaacgcggacctcccggtccacagggtccgccaggtcctcctggaccttcattcaggcacgacaagctaacttttatcgacatggaggggagtgggtttggaggcgatctggaagcccttcgtggcccacgcggttttccaggacctccgggacccccaggcgtacctgggctgcctggcgagccaggacgcttcggcgtgaacagctcagatgtccccggtccagccggtctgccaggggtcccaggcagggagggtccccctggatttcctggtctgccaggacccccagggcctcccggacgggaaggccctcccggtaggacaggtcaaaaaggctctctacagggagcgggtgctcctggcgtgcaggggtcaaaaggggctccgggacccgctggcgcaagaggggaaagtggactagccggagctcctggtcctgctgggccacctggtccacccggacccccaggacctcccggaccaggactccccgcaggcttcgatgacatggagggcagcgggggtcctttttggagtactgccagatctgccgatggaccccaggaaccacccgcactccacgggattggaggcgaccctggtgttcccggtttaccgggagctaagggagaggtgggcgctgacggcgtccctggtttcccagggctacctggtcgcgaaggtatagccggacctcaggggccaaaaggtgaccggggaagtagaggcgagaagggagatcccggtaaggacggcgtgggccagccaggattgcctggacctcccggtcctcccggaccagtggtctacgtgagcgagcaggatggctcagtcctcagcgtcccgggtccagaggggagaccgggatttgccggttttcccggacctgctgggccaaagggtaacctgggctcaaaaggagagcgcggttccccaggacccaaaggtgaaaaaggggagcctggaagtatcttctcgccagatggcggagccctgggaccagcacagaaaggcgctaagggcgaacctgggttcagagggcctcccggaccctacggtcgacctggttataagggcgagatcggctttcctggacggccaggaagacctgggatgaacgggttgaagggagaaaaaggcgaacctggggacgctagtctaggctttggaatgcgagggatgcccggaccaccaggccctcctggccctccaggacccccaggtacaccggtctacgactcaaacgtgtttgctgaaagctcccgacccggacctcctggtctgcccggaaatcaaggccctcctgggccaaagggtgcaaagggcgaagtgggcccacctggccctccagggcagttcccttttgatttcttacaacttgaagctgagatgaaaggcgaaaaaggtgacagaggcgatgctgggcagaagggcgaacggggagagcccggaggcggaggcttctttgggagctctctcccgggacccccaggaccccctggaccaccgggacctcgcggttatcctgggatccccggaccgaagggcgagagtataagaggccagcctggcccacccggacctcaggggcctccagggatcggatacgaaggacggcagggccctccgggtcctcctgggcctcctggaccaccttcttttcctgggcctcatcgccagacaatcagtgtgccaggtccccctggaccccctggacctccagggccaccgggaactatgggcgcaagtagcggcgtacgcctctgggcaacccggcaggcaatgcttggtcaagtgcatgaggtccctgagggctggctgatctttgtggccgagcaggaagaactgtatgtcagagtccagaacgggtttaggaaagtgcaattagaggccagaaccccactacctagaggtacagataacgaggtcgcggctctacagcccccagtcgtccagctccatgattcgaacccctatccgaggcgagagcatccccaccccacagccaggccttggcgggcagacgatatcctcgcctccccacccaggttacccgaacctcagccttatcctggcgcaccccatcacagttcctatgtgcacttacgcccagcacggcctacatctccccctgcgcacagccatcgcgactttcagcccgtgctccacctggtggcactgaacagtcctctcagcggcggaatgagggggattcggggagccgatttccaatgctttcagcaggccagggctgtgggtctagccggaacattccgcgcattcctctcatcaaggctgcaagacctgtacagcattgtaagacgagcggaccgggctgccgtgccaatcgtgaatctcaaagatgagctgttgtttccatcgtgggaggcactgttctctggtagtgagggcccactgaaacccggagcacgaattttctcctttgacggaaaagatgtgcttagacatcctacatggcctcaaaagagtgtttggcacggatccgatccaaacggacggcgacttacggagtcttactgtgagacgtggcgcacagaggcaccatctgccactggccaggcaagctcactgctagggggtcggctcctcggccaatctgcggcttcctgccatcacgcctatatagtgctttgcatcgagaacagcttcatgaccgccagcaagtag

SEQ ID NO: 28106 - DNA, 5264 bp, synthetic construct
  misc_feature 1..5264: note = Description of Artificial Sequence: Synthetic coding sequence
  source 1..5264: mol_type = other DNA
atggctccttatccgtgtggttgtcacattctgcttctactgttctgctgcctggcggctgccagagccaacttgttgaacctcaattggctgtggtttaacaatgaagatacctctcatgctgcaacaactattcccgaacctcaaggccctcttccggtccagccgactgccgataccaccacacatgtgacccccagaaacggcagcacagaacctgcaacagcaccaggtagcccagaaccgccaagtgagctgctcgaagacggacaagacaccccgacgtcggcagagtctcccgacgcccctgaagagaacatagccggagtgggcgcagagattctgaatgtggccaaggggattcgcagtttcgtgcagctgtggaatgacacagtgcccacagaatccctcgctcgggctgagaccctggtgctagagacccccgttggaccactggctctagccggtccgtcatcaacacctcaagaaaatggtacaacgctctggccatcccgaggtataccctccagtccaggcgctcacacgaccgaagctgggactctgccagcccctactccttctcccccaagcctgggtcggccatgggcacctctcaccggcccaagcgtgcccccaccctcttctggcagagcctcattgtcatccctgcttggcggtgcgccaccctggggctcactccaggatcctgactcacagggtctgagcccagcagcagccgctccgagccagcagctccagcgcccagatgtgcgactccgcacccctttacttcacccccttgtcatggggtcccttggcaagcatgcggctcctagtgcatttagctccggacttccaggagcacttagccaggtggctgttacaactctgacacgtgacagtggcgcttgggtgagccacgtggccaatagtgtggggcctggactcgccaataactccgcactgctgggggcagatcccgaagctccagctgggagatgtctgccactgccccctagtctgcccgtatgtggtcaccttggtatctcaaggttttggctgcccaaccatctgcatcacgaaagcggagagcaggttcgcgctggagccagggcctgggggggtttactacagacccactgccacccgttcttagcttggtttttctgtctgctgctggtgccaccgtgcggatcagtaccacccccagcccctccgccttgctgccagttctgcgaggctttgcaggacgcttgctggagccgcctcgggggtggaaggctgcctgtggcttgtgctagtcttccaactcaggaggatggatactgtgttctgattggacccgctgctgagaggatcagtgaggaagtgggattattacaattgctcggcgacccgcctcctcagcaggtgacccagaccgatgatcctgatgttggcctggcgtacgtgttcggcccagatgccaattctgggcaggttgcaaggtaccatttcccgtcactcttcttcagggattttagcctgctatttcatatcagacccgctactgaaggacccggagttttgtttgcgataacagattccgcgcaagcaatggttctgctgggtgtgaagctgtctggggtgcaggatgggcaccaggacatctcactgctttatactgaacccggagctggccagacccacaccgccgcttcctttagattacctgcttttgtgggacagtggacccatctcgcgttaagcgtggccggtggcttcgtcgcactttatgttgattgtgaagagtttcaacgcatgcctcttgctcgctcatcgcggggattggaacttgagccaggcgcaggcttatttgtagctcaggcgggaggggctgatcctgataaatttcagggcgtgattgctgagctcaaagttaggagagatccccaagtgtcacccatgcattgcctcgacgaggaaggtgacgactctgacggtgcctctggcgactctggtagtggactgggcgatgcacgagaactcctgcgtgaagagacaggcgctgccctgaagcctcgcctgcccgctccaccaccagtgacaacgccgccactggccggaggatctagcacggaagatagcaggagtgaggaggtcgaagagcagactacggttgcaagcttgggtgcacagactctgcccggaagtgacagcgtgagcacttgggatggatccgtccgtaccccaggaggtcgcgtcaaggagggcggtctcaagggccagaaaggagagccaggtgtgccaggaccacctggacgagccggaccaccaggtagcccttgcctacccggaccacctggactcccttgccccgttagtcccttggggcctgccggacctgccctgcagaccgttcctggacctcaaggccctcccggtcccccagggagggatgggaccccaggccgtgatggcgagcctgtctctccgcatgtgccgccttcaccaggggataccggtccacaagggttccccggaacacctggcgatgtggggcctaagggggataagggggacccaggcgtcggcgaacgagggccacctggcccacagggcccaccgggaccgcctggcccttccttcagacacgacaagctcacctttattgatatggaaggttctggctttggaggtgatctagaggcactcaggggaccaaggggattccccggaccaccgggacctcccggagtccctgggcttccgggtgaacccggacgattcggagtcaatagtagtgatgttccaggtcctgccggtcttcccggagtcccaggacgcgaagggccacctggttttccgggtttgcccggacctccaggaccaccaggaagggaaggccctcccggacgtacagggcaaaagggatctctccaaggagccggagctccaggagtgcaaggaagtaaaggcgctccgggtcctgccggtgctaggggagagtccggcctggccggagcaccaggccctgctggtccacctggcccaccagggccaccaggccctccaggtcctggactccccgcagggttcgacgacatggaggggagcggcggaccattttggagcaccgcacgttcggcagatgggccacagggcccacccggtctgccagggcttaagggcgatcccggagtacccggactcccgggagctaagggcgaggtaggcgcagacggagtcccgggattcccaggtctaccaggcagggagggaattgccggtcctcagggtccaaaaggcgataggggcagccgcggtgagaagggagacccaggaaaagatggcgttgggcagcccggactgcccggaccacctggcccaccagggcctgtcgtgtacgtgagtgagcaggatggcagcgtcctgtccgtcccaggacccgagggcagaccaggattcgctgggttccctggcccagcaggccctaagggcaatctgggaagcaagggggaacgtggatcacccggtcctaagggtgagaagggtgaaccaggaagtattttcagccccgacggcggtgctttaggacctgcccaaaagggagcgaagggggagcccggttttcgtggccctcccggaccctacggacggcctggatacaagggagagattggcttcccaggtcgccctggtcgccctggcatgaacgggctcaagggagaaaagggggaacctggtgatgcctcgctggggttcggtatgcgcggaatgcctggaccacccggacctccgggaccgcctggcccacccggaacgcctgtgtacgacagcaacgtgttcgccgagtcttccaggcctggtccacccggtttgccaggtaatcaaggaccccctggtcccaaaggcgcaaagggtgaagttggcccacccggaccaccaggacagtttccatttgacttcctccagctggaggccgagatgaagggggagaagggcgatcggggagacgctggacagaagggggagcgtggggagccaggcggtggtggctttttcggcagtagtctgcccggaccccctgggcctccaggccctcctgggcctagaggctacccaggaattccaggtcctaagggagaaagcatccgtgggcagccaggccctcccggtccacaaggaccccctggtatagggtatgaaggaaggcagggccctccgggacctccaggtcccccaggaccgccttcattcccgggaccacacaggcagacgatttcagtgccagggccaccaggccctccaggcccacctgggcctccaggcactatgggcgctagctccggagtcaggttgtgggctaccaggcaggctatgttggggcaagtacatgaagtgcccgaaggctggcttatcttcgttgccgagcaagaggagctgtacgtgcgggtgcagaatggcttcaggaaggtgcagcttgaggcccgtaccccgctcccccgtggcaccgacaatgaagtagctgccctgcagccacccgtggtccaactccacgattctaacccctatcctagaagggaacaccctcaccccaccgccagaccgtggagagcagacgatatcctcgcatccccccctagacttcctgagccgcagccgtaccctggcgcacctcatcactcttcttacgtgcacttgagacctgccagaccaacatccccgcctgcacattcccacagagactttcagccagtacttcacctcgtagcccttaattctcccctgagcggcggtatgcgtggcatacgcggagccgactttcagtgcttccaacaggcccgagcagtgggactcgcaggcacttttagggcatttttgtcaagcagacttcaggacctgtactccatcgtgaggcgggcagaccgtgccgctgttcctattgtgaacctcaaggatgaactactcttcccaagttgggaggcactgttctccgggtcagaggggcctctgaagcccggagccaggattttcagctttgacgggaaggacgttctccgacaccccacctggcctcagaagtctgtgtggcacgggagtgatcccaatggacgcagactgacggagagttattgcgaaacgtggaggacagaagcaccttcggccacggggcaggcaagtagccttctcggtgggagattgctgggccaatcagctgcaagttgccatcatgcttacatcgtcctgtgtattgaaaacagtttcatgacagcttccaaata

SEQ ID NO: 28107 - DNA, 1623 bp, synthetic construct
  misc_feature 1..1623: note = Description of Artificial Sequence: Synthetic coding sequence
  source 1..1623: mol_type = other DNA
atgggtcccggtgagcgtgccggtggcggtggggacgctggcaagggcaatgcagctggcggagggggaggtggacgcagcgccacaaccgcaggctccagggctgttagcgccttatgtctcctcctatccgtcggctccgccgctgcatgcctgctgttaggagttcaggcagccgcactgcagggacgggtggccgcacttgaagaagaacgcgaactcctgcgcagggcaggacctccaggagcgctcgacgcatgggccgagccacatctcgaacgccttctgcgagagaagctggacgggctggcaaagataaggaccgcccgtgaagctccgagcgaatgtgtctgtcctccaggtcctcctggtcgcaggggaaagccagggagaagaggcgaccctgggccaccagggcagagcggccgagacggttacccaggaccactgggcttggacggtaagcctggtctgcccggtccaaagggggaaaaaggggctcccggtgacttcggacccaggggcgatcagggacaggacggagccgcaggcccaccaggtccccctggacccccaggagcccgagggccacccggagacaccggtaaggacggacctaggggggctcagggaccagcgggaccgaagggagagcccggacaggatggagagatgggcccaaagggtccgccagggccaaaaggagagccaggcgtgccaggcaaaaaaggcgatgatgggacccccagtcagcccggaccaccaggcccaaaaggggagcctgggtcaatgggtcccaggggtgaaaacggagtggacggcgctccagggccaaaaggtgagcccggacatcggggaactgatggagccgcaggtccgaggggcgctccaggtttaaaaggtgagcaaggggatacagtggttatcgactatgatggaaggattcttgacgcgctcaaagggccaccaggtccccagggaccaccagggcctcccggtatcccaggggcaaaaggtgagctgggactccctggagctcctggaatcgatggcgagaagggccctaaaggacagaagggcgaccctggagagcccggacctgctggactcaaaggcgaggcgggagagatgggtctgtccggcctgcctggggcagacgggctcaagggtgaaaaaggcgagtcagcatcagactccctgcaggaatcactggctcagttaatcgttgaacctggtcccccaggccctcccggtccgcctggccctatgggtcttcagggaattcaggggccaaagggcctggacggggctaaaggtgaaaaaggggcaagcggtgaacgcggtcctagtggactcccaggtcccgtcggccctcccggtctgattggactcccagggactaaaggagagaagggtcggcctggggaaccgggtctcgacgggtttccgggacccagaggggaaaagggcgacagatcggagcgcggagagaagggcgagaggggcgtgccagggaggaagggtgtgaaggggcaaaaaggcgaacccggtccccctggcttggatcagccctgccccgtgggtccagatggtttgcccgtccctggttgttggcacaagtag

SEQ ID NO: 28108 - DNA, 930 bp, synthetic construct
  misc_feature 1..930: note = Description of Artificial Sequence: Synthetic coding sequence
  source 1..930: mol_type = other DNA
atggagtcacgttccggaattcaggctggtgtgagatgtcgggaccttgggagcctgcaaccacctccccttgcgcttaagcagtttagtagtttgtccctcccatcatcttgggactatcgaagactcccacctcggtgcggctttctattcgaagtatcagagacaacaaatcctccagctgggaccaattcccggcacacgctcaccgtgaagctcgatggactggccaagattaggacagctcgggaggcaccttccgagtgtgtgtgtcctcccggacctcccggaagacggggtaagccgggtagacgcggtgaccccggaccccctggccctctgggtctggacggaaagcctggactgccagggccaaaaggagaaaagggcgctcccggagactttggaccgaggggggatcaaggccaggatggagccgctggcccacctggaccgccaggaccacccggtgctcgagggccaccaggagacaccgggaaagacggacccagaggcgcacaaggacccgcagggcctaagggcgagcctggccaggatggagagatggggcctaagggaccccctggaccaaaaggagaacctggagtacccggaaaaaagggggatgatggtacaccttcacagcctggcccaccgggtcccaagggcgagccaggcagcatgggcccacgcggagaaaacggcgtggacggcgcaccaggccctaagggagagcctgggcatcgagggacagacggggctgcaggaccaagaggcgacgtacgagatcccggactgggatcggtttctagctgttcacagcgccttgccagcagttcaaagaagaacggatccgagcccccacctggatgtgctggctgtccaaggccacaaggtagggcaggcagacacagtggagacagactgtag

SEQ ID NO: 28109 - DNA, 1665 bp, synthetic construct
  misc_feature 1..1665: note = Description of Artificial Sequence: Synthetic coding sequence
  source 1..1665: mol_type = other DNA
atgactgcccctggagcagcaggacgttgcccccctacaacatggctgggatctcttctacttttggtctgcctgctagcgtctagatctatcacagaggaagtgtcggagtattgttcacatatgattggctccggccacctccagagtttgcagagattaatagattcacaaatggaaacaagctgccagattaccttcgagttcgtcgatcaggaacagctcaaggacccggtctgctatctcaaaaaagcatttcttctagtgcaggatataatggaggataccatgcgcttccgcgacaacacacctaatgctattgccatcgttcagcttcaggagctctccttgcggctgaagagctgtttcaccaaagactatgaggagcacgacaaggcatgcgtaagaacattctacgaaactccacttcagttgctcgagaaggtgaagaatgtgtttaacgaaacgaagaatctcctggataaggattggaacattttctcaaagaactgcaacaattccttcgccgaatgctctagccaggatgtggttacaaagcctgattgcaactgcctctaccctaaggcaatcccatcctccgatcccgcttccgtgtcaccccaccagcctctggccccatcgatggctccagttgctggtctaacatgggaagattccgaggggaccgagggcagtagcctcctgcctggagagcagcctctgcacacagtcgaccccggaagtgcaaaacagcggcctccccgtagcacatgtcagtcattcgaacctcccgagacccccgtggtgaaagatagcacaattggcggtagcccccagccacggccttcagtgggagcctttaatcccggtatggaggatattctcgatagcgctatgggcacaaattgggtccctgaagaagcttccggcgaggctagtgagatcccggtgccacaggggaccgaattatccccgtcccgccctggaggagggtcaatgcaaaccgagccagcaagaccatctaactttctgagtgcttctagtccactgccagcgtctgccaaaggtcagcagcctgctgacgtgacaggcactgcactcccaagggtaggtccagtgagacccactggccaggactggaatcacactcctcagaaaactgaccacccctcagcgctgctgagagaccctcccgagcctggtagccctcgaatctcttcccttagacctcaaggcctgtccaacccgagcaccttgtctgctcagccccagctctctcgatctcacagctcgggcagtgtattgccactgggagagctggagggtcgacgttccacccgggatcggagatcaccggcagaaccggaagggggacccgctagcgaaggcgcagccagacctctgcctaggtttaattctgtgccgctgacagacactggacacgagagacagtctgaggggagtttctcaccccagctccaggagtcagtgttccacctactcgtgccctcagtgattttagtattactggcagtcgggggtttgctcttttaccgatggaggcgtcgaagccaccaggagccacagagggcggactcccccctcgagcagcctgagggtagccccttgacccaggatgaccgacaagttgaactgcccgtctag

SEQ ID NO: 28110 - DNA, 1317 bp, synthetic construct
  misc_feature 1..1317: note = Description of Artificial Sequence: Synthetic coding sequence
  source 1..1317: mol_type = other DNA
atgactgctccgggagctgctgggaggtgtcctcccacaacatggttaggatcgctgctactgcttgtctgcctacttgctagcagaagtattactgaggaggtatccgagtactgctctcacatgatcggaagcggacatctgcaatccctacaacgcctcatagattcccagatggaaacatcatgtcagataaccttcgagtttgtggatcaagagcagttgaaagatcctgtgtgctatctcaagaaggcattcctcctggtacaggacataatggaagacacgatgcgattccgagacaacacaccgaatgctattgcaattgttcaactccaagagctatccctgcgcctgaaatcctgctttactaaagattatgaggagcacgacaaggcctgcgttcgcacgttctatgagacacctctgcagttgttggaaaaggtgaagaatgtttttaacgaaacaaagaaccttctggataaggactggaacatcttctcaaaaaattgcaacaactcctttgcagagtgttcctctcaggacgtagtcacaaaaccggattgcaattgcctgtacccaaaggctattcctagctcggatcctgcctcggtgtccccgcaccagcccctcgcgccatcaatggccccagtggctggactcacctgggaggacagcgaaggcaccgaaggcagctcgcttttacccggagagcagccccttcatactgttgatcccggtagtgccaaacagcgccctccccgaagtacgtgtcagagttttgagccgccagaaactcccgtagtgaaggatagtacaattggtggctcacctcagcccagaccgtccgtgggcgcatttaatcctggaatggaagacattctcgacagcgctatgggaactaattgggttccagaggaggcatctggggaggctagtgagatccctgtgccgcagggtacggaactcagtccttcgaggccgggaggcggatccatgcaaacagagccagcacgcccatcaaattttctttctgcctcatcacccctcccggcttccgccaagggtcagcagcccgctgacgtgactggacacgaacgccagagcgagggctcattctcgccccagctgcaggaatccgtgttccacctcctggtccctagtgtgatcctggtcttgttggccgtggggggtctactgttttatcgctggaggaggcggtcgcatcaagagccccagagagccgattctcctttagaacagcctgaggggtctccgttaacacaggatgatcggcaggtagaactacccgtttag

SEQ ID NO: 28111 - DNA, 360 bp, synthetic construct
  misc_feature 1..360: note = Description of Artificial Sequence: Synthetic coding sequence
  source 1..360: mol_type = other DNA
atgacggctccaggggcagctgggaggtgcccccctaccacttggctcggctctctgctcctgctggtgtgcctattagcaagcaggtcgataactgaagaagtgtcggaatattgctctcatatgatcgggtccgggcacctgcagtctttgcagaggctcattgactcgcagatggagacctcctgccagatcacgttcgaatttgtggatcaggaacaactgaaggatcccgtttgctatcttaagaaggccttcctgttagtgcaagatatcatggaagacactatgagattccgggataataccccgaacgccattgcaatcgtccagctccaggaactgtccctaaggttatag

SEQ ID NO: 28112 - DNA, 1317 bp, synthetic construct
  misc_feature 1..1317: note = Description of Artificial Sequence: Synthetic coding sequence
  source 1..1317: mol_type = other DNA
atgactgctccaggagccgcaggtcggtgtcctcctacgacctggcttgggagtcttcttttgttggtgtgtctactcgccagccgatccattactgaggaggtgagtgagtattgctcccatatgatcgggtccggacatttacaaagcctgcaacggctcatcgactcacaaatggaaacaagctgtcaaataacatttgaatttgtcgaccaggagcagcttaaagacccggtgtgttatcttaagaaagcattcctgctcgtccaggatatcatggaggatacgatgaggttccgtgacaacacccctaacgccatagctatcgttcagctgcaagaactgagccttcgcctaaagtcttgttttaccaaggactatgaagagcacgacaaggcctgtgttcgcacattttacgagacacccctgcaactgttagagaaggtgaaaaatgtgtttaacgagacaaagaatctccttgataaggactggaacatcttcagtaaaaattgtaacaattcctttgccgagtgttcgagccaggacgttgtgacaaagccagactgcaactgcctgtacccaaaagctataccatcaagcgatcccgcatccgtgagtccccatcaacctctggcgccatccatggccccagtcgctggcctgacatgggaggactccgaagggaccgaaggatcatccctccttccaggggagcagcctctgcacaccgtcgatcctggcagcgccaaacagcgtcctccacgctcaacctgccagagtttcgagcccccagaaacccccgtcgtgaaagatagcactatcgggggaagcccacagccgagaccctctgtgggcgcattcaatcccggtatggaagatatcctggacagtgcaatggggaccaactgggtaccagaagaagcttctggcgaggcaagcgaaatcccagtgccccagggcaccgaactgtcacctagtagacctggcggaggcagtatgcagacggaaccagccaggccgagtaactttcttagtgcctcatcacccctgcctgcaagcgccaaaggacaacagccagccgacgttaccggtcatgagcggcagtccgaaggatcattcagccctcagctgcaggaaagtgtgttccatctgctcgtcccttctgtcattctggtgttactggccgtgggtgggcttcttttctaccgatggcgcaggcggtcccaccaggaaccccagcgagcagacagtcccctggaacagccagaaggctctccactgacacaggatgatagacaggtggagctcccggtctag

SEQ ID NO: 28113 - DNA, 1665 bp, synthetic construct
  misc_feature 1..1665: note = Description of Artificial Sequence: Synthetic coding sequence
  source 1..1665: mol_type = other DNA
atgaccgctccaggcgcagccggtaggtgtcccccaactacctggcttggctccttattactgctggtttgccttttggcaagccggtcaatcaccgaggaggtaagcgagtattgttcccatatgatagggagtggacacctgcagagcctgcagaggctgatagacagccagatggaaacctcctgccagattacattcgaatttgtggaccaggagcagctcaaagacccagtctgttacttgaaaaaggcgtttcttctcgtgcaggacatcatggaggacacaatgcgcttcagagataatacgcctaatgctattgccatcgtgcagctgcaggagctttcgctcagactgaagtcttgtttcacgaaagattatgaggagcatgacaaggcttgcgtcaggaccttctacgaaactcctttgcagctgttggaaaaggtgaagaatgtgtttaacgagactaaaaatctgctagacaaggattggaacattttctctaagaattgcaacaatagcttcgccgaatgcagctctcaggacgtggtcaccaagccggattgtaactgtctgtacccaaaggcaattccatcatctgatcccgcttccgtgagcccgcatcaacctttagcacccagcatggcacccgttgcaggcctgacatgggaagactcagagggcacagaaggctcatcactgctaccaggcgaacaaccactccacactgtggatcccggttcggcgaagcaacggccacctcggagtacgtgccagtcctttgagcccccagagacccctgtggttaaagatagcacaatcggcggaagcccacagccaaggccctctgttggagccttcaatccaggcatggaagatatcttggatagcgctatgggaacgaattgggtacccgaggaggcgtcaggggaggcctcagaaatcccagtgccccagggaacagaactgagcccatcaagaccaggaggcggtagcatgcaaacagaaccagcccgacctagcaacttcttgagtgcatcctcacctctgccggcatccgcaaagggccaacagcctgctgatgtgactgggaccgccttacccagagtggggcctgtgcgcccaactgggcaggattggaaccatacccctcaaaaaacggatcaccctagtgcactcttgcgcgaccctccagagcccggatccccacgtatttcgagtctgcgcccacagggactctccaatccttccaccctgagtgcccagccccagctatcaaggagccatagcagcggcagcgttctcccactgggggagctagagggccgacggtctacgcgggacaggagaagtccagccgagccggagggcggacccgcatcggaaggtgctgctcgcccactgccccgttttaatagcgtgccgctgacggacaccggtcatgaaaggcaaagcgaaggatcttttagcccacagctccaagagtctgtgttccacttactggtgcccagtgtcattctggtgcttctagccgtcggaggcctcctgttctaccgctggagacgacggtctcatcaggagcctcagcgagctgatagccccctagagcagcctgaaggcagccccttgactcaggatgaccggcaggttgaactgccagtgtag

SEQ ID NO: 28114 - DNA, 771 bp, synthetic construct
  misc_feature 1..771: note = Description of Artificial Sequence: Synthetic coding sequence
  source 1..771: mol_type = other DNA
atgacggcacctggcgctgcagggaggtgtcctcctacaacttggttagggtcacttctgcttctggtctgcctgctcgcttctcgcagcataaccgaagaagttagcgagtactgttcccacatgataggaagtggacacttacagagcctgcaaagactgattgacagtcagatggaaacttcctgtcaaatcacattcgaattcgttgaccaagaacagctgaaggatccagtgtgctacctgaagaaggcctttttactggtgcaggacataatggaggacaccatgcgattccgagataatacccccaacgccatcgctattgtgcagttgcaagaactgtcactcaggcttaagagctgctttacgaaggactatgaagaacacgataaagcctgcgtgaggactttttatgagacacctcttcagctgcttgagaaagtcaagaatgttttcaatgagacgaagaaccttcttgataaggattggaatattttctccaagaactgcaataacagctttgccgagtgttcaagccaaggccatgagagacaatcagaaggcagctttagcccacagttgcaggaaagtgtctttcaccttctggtgccgagcgtgatcttagtgttgttggcagtggggggactcttgttttataggtggcgccgacgcagccatcaggagcctcaacgagctgattcccctctggagcagcccgagggttcccccttgacacaggacgaccgccaagtggagctgcccgtatag

SEQ ID NO: 28115 - DNA, 828 bp, synthetic construct
  misc_feature 1..828: note = Description of Artificial Sequence: Synthetic coding sequence
  source 1..828: mol_type = other DNA
ggaagccccggtatggcaggagcactgtgcgccggtcacattgccggtctttacggagaccggggtttggttccctcgactcgcagagaggagcgaggcggacgcaaaacgtggcaaactggtgcagctcgccctcaagggggagctcggggagctggaggaccctggcaccccgatagacaccccaggccgaaggagacccgtggaaatctggggccactggaaacgccggctcgctgggcaacgcagggacccgctgctcctagcgaaccaattcccggaatcaaggggaccaaggggagtcccggaaacatcaaggaccagccgagacccgcattctcagccattcgcaggaaccctaacggaggacagcggggacattcgactcgatcctcccccacccgcaagaatcgtacgagaactacaccggcagattccagcgccctttatccagccacaacaacttcacccagccgctgttgtccaagtggtaagtcagcctgtccatcaagtcccccacagggcgctaggtcagatgctccctgggcaagcgtcaccccccctacccggggttcttcacgatggtgtcagggagcctggtgtttctcctgtagccgagtgactagatcaggcctgaagaaaacaccaaaaagggtaacattcaccagggcccttcgcccaacagctagttcggctgcctcatcaagtagccacctccctgagccaggcaaagacccactaccacatcctccactttggctgccgtgttccgcctgcaaaatgggagctctcctattacagctactgaagggaggcggatggctctag

SEQ ID NO: 28116 - DNA, 738 bp, synthetic construct
  misc_feature 1..738: note = Description of Artificial Sequence: Synthetic coding sequence
  source 1..738: mol_type = other DNA
atggaaggcccaagggggtggctggtgctgtgtgtgcttgctatatcacttgccagtatggttacagaggacctctgtcgcgctcccgatggcaaaaaaggggaggcgggtcgccctggcaggcgcggacgccctggattgaaaggagaacagggcgaacccggtgccccaggcatccggaccggaatccaaggactcaagggtgatcaaggtgagcccggtccgtccgggaacccgggaaaggtgggttaccccggaccaagcggacctctgggtgctcgtggcatcccagggattaaggggaccaaaggctccccgggtaacattaaagatcagcctagacctgccttttccgcaattcgtcgaaaccctccaatgggtgggaatgtggtaatattcgacacagtgatcactaatcaggaggagccttatcaaaaccactctgggaggtttgtgtgcaccgtgccagggtactactattttacctttcaggtcctgagccagtgggagatatgcctgtcgatcgtgagttcctctcgtgggcaggtaagacggagcctgggtttttgtgacaccacaaataagggactgtttcaagtggtttccgggggtatggtgttgcaactgcagcagggagaccaggtgtgggtggaaaaggatcccaaaaagggtcacatctaccagggaagcgaggcagattcagtgttctccggattcttgattttccccagtgcttag

SEQ ID NO: 28117 - DNA, 738 bp, synthetic construct
  misc_feature 1..738: note = Description of Artificial Sequence: Synthetic coding sequence
  source 1..738: mol_type = other DNA
atggaaggcccaaggggttggctagtgttatgcgttctggcgatttctctggccagtatggttaccgaagatctgtgtcgcgctcctgacggtaaaaaaggagaagccggaagacccggacgccgaggcagacccggattgaaaggcgaacaaggcgagccaggcgcacctgggattcggacgggcatacagggactcaaaggagaccaaggcgaacccggacctagtggaaaccccggaaaagtaggctatcctgggcctagcggccctttgggcgcaagaggcattcccggaataaagggcaccaaaggctctcctggtaatatcaaagaccaacccaggcccgctttttccgcgattcggaggaacccacctatggggggtaatgtggttatcttcgatacagtgatcactaatcaagaggagccatatcagaatcactcaggtcgctttgtgtgcacagtgccaggatattactacttcaccttccaggtgcttagccagtgggaaatctgtctcagcatcgtgtcctccagcagaggacaggtgcgacggagcctggggttctgtgacacgaccaataaagggctgttccaagtggtgagcggcggaatggtcctgcagttacaacagggcgaccaagtttgggtagagaaagatccgaagaaagggcacatctaccaaggaagtgaagctgattctgttttttctggtttccttatctttccctccgcttag

SEQ ID NO: 28118 - DNA, 666 bp, synthetic construct
  misc_feature 1..666: note = Description of Artificial Sequence: Synthetic coding sequence
  source 1..666: mol_type = other DNA
atggagggaccccgtggatggttggttttgtgtgtgttagcaatctctcttgcaagcatggttacagaagatctgtgccgagcccctgacggtaagaaaggagaggcaggaaggccaggtcgcagggggagaccagggttgaagggagaacaaggggagccaggagctcccggaataaggaccgggattcagggcctgaaaggagaccaaggggaaccagggccatctggaaacccaggtaaggtcggatatcccggacccagcggcccattgggggcacggggtattcctggaatcaagggaactaaaggcagcccgggtaacatcaaggatcagccaagacctgccttcagcgccattcgcaggaatccacctatgggaggcaatgtggtgattttcgacacagtcattacaaaccaggaagagccgtaccaaaaccattccgggaggtttgtgtgcaccgtccctgggtattattacttcacttttcaagtgctgtctcaatgggaaatctgcctctccatcgtgagctcttctcggggtcaggtgagaagaagcctgggattctgtgacaccaccaataagggcctcttccaggtagtttcaggtgggatggtcctccagctgcaacaaggggatcaggtatgggttgaaaaggacccctag

SEQ ID NO: 28119 - DNA, 1050 bp, synthetic construct
  misc_feature 1..1050: note = Description of Artificial Sequence: Synthetic coding sequence
  source 1..1050: mol_type = other DNA
atgacagcagcttctatggggccagtgcgagttgcttttgtggtcctactcgccctctgtagtaggcccgctgtggggcagaactgcagtgggccttgtaggtgccccgatgaacccgcaccacgctgcccagccggtgtgagtttagtactcgatgggtgcgggtgctgccgggtttgtgcgaaacagctgggggaactgtgcacggagcgagacccatgcgatccccacaaaggacttttctgccacttcggctctcctgctaatcgaaagattggcgtgtgtacggccaaggacggagccccatgtatattcggcggaacagtgtaccggtctggagaatcatttcaatcatcttgtaaatatcagtgtacatgccttgatggtgccgtgggttgtatgccattgtgtagtatggatgtccgcctgccgtccccagactgtcctttccctaggcgcgtgaaacttcctgggaaatgttgcgaggagtgggtgtgcgatgagcctaaggatcaaactgtggtggggcctgcactggccgcatacagactggaagacacctttgggcctgaccctaccatgatcagagccaactgtttagttcagacaactgaatggagcgcctgttccaagacatgcggaatgggcattagtactagggtgaccaacgacaatgcttcctgccggttagaaaaacagtccagactgtgtatggtcagaccgtgcgaagccgatctagaggaaaacattaagaaaggcaagaaatgtatccgtaccccgaagatcagcaaaccaatcaagtttgaactgtccggatgtacttcaatgaaaacatatagggccaaattctgtggcgtatgcacagatgggaggtgttgcaccccccacaggaccaccaccctgcccgtcgagtttaagtgtcctgacggcgaggtgatgaagaagaacatgatgttcattaaaacatgtgcctgtcactacaactgtccaggggataatgacatttttgaaagcctgtattatagaaagatgtatggcgatatggcctag

SEQ ID NO: 28120 - DNA, 2238 bp, synthetic construct
  misc_feature 1..2238: note = Description of Artificial Sequence: Synthetic coding sequence
  source 1..2238: mol_type = other DNA
atggaacgtccaccgggtctgagaccgggtgccggtggcccttgggaaatgcgggaacggctgggcaccggcggattcggcaacgtctgtttataccagcatcgcgaacttgatctgaaaatcgccattaaatcatgtcgcctggaactttccacaaaaaatcgcgaacgttggtgccatgaaatccaaatcatgaagaaattgaatcacgcaaacgtcgtcaaggcctgtgatgtgcccgaggagctgaacatacttatccatgatgtccctctgttagctatggagtattgcagcgggggagaccttaggaaactgctcaataaacccgagaattgttgtggcttgaaagaatcccaaattctgtctttactgagtgacatcggctcaggcattcgatatcttcatgagaacaagatcatacacagagacctcaaaccagagaatatcgtcctgcaggatgttggagggaagatcatccacaagattatcgacctaggctacgctaaagatgtggatcagggctctctttgcacctccttcgtgggaaccctgcaatatcttgcacctgagctgtttgagaacaagccatacaccgccactgtggattactggtctttcggtacaatggtgtttgaatgtattgcaggctacagaccctttctccaccacctgcagccctttacctggcatgagaaaattaagaagaaggatcccaagtgtatatttgcttgtgaagaaatgtccggtgaagtgagattttcgtcccacctgccacaacctaactctctttgctcgctggtggtggagccaatggagaattggctgcagttaatgctgaactgggatcctcagcagaggggaggccctgtggatctcactcttaaacagcctcggtgctttgtgctcatggaccatatcttaaatcttaaaattgtgcacatcttaaacatgacaagcgccaagattatttcattcttactgccaccggatgaaagcctgcattctttgcagtctcggatcgagagggagaccggaatcaatactggaagtcaggagctgctgtccgaaactggtatctctctggacccaaggaagccagcatcccaatgcgttttagatggcgttagaggatgcgactcctacatggtttacttgtttgacaagagcaagaccgtctatgaaggcccattcgcgtctaggtcccttagcgactgcgttaactacatcgtgcaggactcgaaaatccagttgccaataattcagctgcgcaaggtatgggctgaggccgtccattacgtgtctggcttgaaggaggactactctcggctgttccagggtcagagggccgctatgttgagcttgctgcgatacaatgccaacctgacaaaaatgaaaaatactctgattagcgcctcccaacagctgaaagctaagcttgagttttttcacaaatccatccagctcgacctcgagcggtattctgagcagatgacctacggtatatcaagcgagaaaatgctgaaagcctggaaagagatggaggagaaggccatccattacgctgaagttggtgtaattggctatttggaagaccagatcatgagtctccatgccgagatcatggagctacagaagtcaccgtatggccgtagacagggagatttgatggagtcactggagcagagggccattgacttatacaaacagctgaaacacaggccttctgatcactcatattcagactctacggagatggtcaaaattattgtgcacactgtgcagtctcaggaccgcgtgctaaaggaattgttcgggcacctgtcaaagctcctggggtgtaaacagaaaataattgacctactgcctaaggtagaggtggcattgtcgaacatcaaggaggctgataataccgtgatgttcatgcagggtaagcggcaaaaagagatttggcatctactaaaaattgcatgcacccagtcatccgccaggagcctcgttggtagctcactcgagggagcagtcactccccaaactagtgcgtggctgccaccaacatccgcagaacatgaccattccctgtcatgcgtagtcactccacaggatggggaaacgtccgcccagatgatcgaggagaatttaaattgtttgggccacctgtctacgatcatccatgaagcgaacgaggagcaaggaaatagtatgatgaacttggattggagctggctgactgagtag

SEQ ID NO: 28121 - DNA, 1653 bp, synthetic construct
  misc_feature 1..1653: note = Description of Artificial Sequence: Synthetic coding sequence
  source 1..1653: mol_type = other DNA
atgtggaaagcgagcgctggtcacgccgtctctatcgcccaagatgatgcaggagctgacgattgggaaacagatccagacttcgtgaacgacgtgtcggagaaggaacagcgctggggagccaagacagttcaaggctcgggacatcaggaacatatcaatatccacaagctccgagaaaacgtctttcaggagcaccagaccctgaaggaaaaggagctggagacaggacccaaagcctctcatggttatggcggaaagtttggggtggagcaggacagaatggacaaatctgctgtgggccacgagtaccagtccaaactttcaaagcattgttcccaagtcgatagcgttaggggatttggcggtaaattcggagtgcaaatggatcgcgtcgaccagtccgctgtcgggttcgagtatcagggaaagaccgaaaagcatgctagtcaaaaagattactctagtggatttgggggaaagtacggtgtccaggccgaccgggtggataagtccgctgttggcttcgattaccagggtaaaaccgagaagcacgaatcacagagagattacagtaagggttttggaggaaagtatggcatcgataaggacaaggtagataagtcagcagtaggcttcgagtatcagggcaaaacggagaagcatgagagccagaaggactatgtcaagggctttgggggtaaattcggagttcagactgacagacaggataaatgtgctctcggctgggaccatcaggagaagctccaactgcacgagtcccaaaaagactacaagacagggtttggcggtaaatttggagttcagtcagagagacaagatagcgcagccgtcggattcgactacaaggagaaactggctaaacatgagagccaacaggattactcaaaggggttcgggggaaagtatggcgtgcagaaagaccgaatggacaagaatgcgtcaaccttcgaggacgtcacacaggtgagcagtgcttatcagaaaactgttcctgtggaggcggttacaagtaaaacttccaacatccgtgccaacttcgaaaacttagctaaagaaaaagagcaggaggacagaaggaaggcggaagcggagcgagcccagcgcatggccaaagaaaggcaggagcaagaggaggccaggagaaagctggaagagcaagctcgagccaaaactcaaactcctcctgtgtccccggcaccacagccaacagaggagaggctaccctcctccccagtttatgaggacgccgctagctttaaggcagaactcagctacagaggtcctgtgagcgggacggagcccgaaccagtctacagcatggaagccgctgactaccgggaagcaagcagtcagcagggactggcttacgccaccgaggccgtttatgaaagcgcagaggcccctgggcattacccagccgaagattcaacctatgatgagtacgaaaacgatctggggattaccgccgtggccctctatgactaccaggccgcaggtgatgacgagattagcttcgatccagacgacattatcaccaatatcgaaatgattgacgacggttggtggcggggagtgtgtaagggcaggtacgggctgttccctgcgaattatgtggagctgcgccagtag

SEQ ID NO: 28122 - DNA, 1542 bp, synthetic construct
  misc_feature 1..1542: note = Description of Artificial Sequence: Synthetic coding sequence
  source 1..1542: mol_type = other DNA
atgtggaaagcctccgctggccatgcagtgtccatcgcgcaagacgatgcaggtgccgacgactgggagacagatcccgacttcgttaacgacgtgtccgagaaggaacagcggtggggtgcaaaaactgtgcagggaagcggccatcaggaacatataaacattcataaactgcgggaaaacgtttttcaggagcaccagaccctcaaagaaaaagagctggagactgggcctaaggcatcccatgggtacgggggaaaatttggagttgagcaggatcgaatggacaagagcgcagtcgggcatgaatatcaaagcaaactctcaaaacattgctcacaggtcgacagcgtgagagggttcggagggaaattcggcgttcaaatggaccgggtggatcaatccgccgtgggtttcgaataccagggtaagacggaaaagcatgcaagtcagaaggattattctagtggcttcgggggtaagtatggtgtccaagccgaccgggtggacaaaagcgctgtgggtttcgattaccagggaaaaacagagaaacacgaaagtcagcgtgactattccaaaggctttggtggcaagtatggcatcgacaaagacaaagttgacaaaagcgcagtcggcttcgagtaccagggaaaaaccgaaaaacatgaatcccagaaggattatgtgaaaggttttgggggaaagttcggagtccaaactgacagacaagacaaatgtgcattaggatgggaccaccaggaaaagctccagctccacgagagtcagaaagactacagtaaaggctttggaggcaaatacggagtacaaaaggatagaatggataagaatgcgtccacgtttgaggacgtgacccaggtctcttccgcctaccagaagactgttcctgtcgaggccgttacaagcaagaccagcaacattcgggctaacttcgagaatctggcaaaggaaaaggaacaggaagatagacggaaagcagaagccgagcgcgctcagcgaatggcgaaagagcgccaggagcaggaagaagcgcgaaggaagcttgaagagcaggctcgggctaaaacacagacccctcccgtgtccccagctccacagccaactgaggagcggctaccttcttcacccgtgtatgaggatgccgcatcttttaaggctgaattaagctatcggggacctgtttccggaaccgaaccagagcccgtgtactccatggaggcagccgactatcgcgaggctagcagccagcaggggctggcgtatgctacagaagccgtatatgagtcagcagaggctcccggtcactaccctgccgaagacagtacctatgacgagtacgagaacgatctgggcattaccgccgtcgcactctacgactaccaggccgctggagatgatgaaattagttttgaccctgatgatatcataaccaacatagaaatgattgatgacggctggtggcgcggtgtgtgcaaaggtcgctatggtctctttccagcgaactatgttgaactgaggcagtag

SEQ ID NO: 28123 - DNA, 1905 bp, synthetic construct
  misc_feature 1..1905: note = Description of Artificial Sequence: Synthetic coding sequence
  source 1..1905: mol_type = other DNA
atgtggaaagcgtctgctggacacgctgtctccattgcgcaggacgacgctggcgctgatgattgggaaactgatccggacttcgtgaacgatgtcagtgaaaaggagcagcggtggggcgctaagactgttcagggttcagggcaccaagagcacatcaatattcataagcttcgggaaaacgtctttcaagagcatcagactctgaaggagaaggagctagaaacgggcccaaaagccagccatggatatggtggcaaatttggcgtagagcaggatagaatggataaaagtgcagttgggcacgagtatcagtccaagttgagcaaacattgtagccaggtggactcagtacgcggattcggcggaaagttcggcgtgcagatggaccgtgttgaccagtcagccgtggggttcgagtatcaggggaaaaccgagaagcatgccagtcagaaggattactcgtccgggtttggagggaagtatggtgttcaggctgatcgggtggacaaatctgctgtgggctttgattatcaaggcaaaacggagaagcatgagtcccaacgggactacagtaagggcttcggcggtaaatatggtattgataaggataaagtggacaaatccgccgtggggtttgagtaccagggaaagactgagaagcacgagagccagaaagattacgtgaagggcttcggcggtaagtttggagtccaaaccgatcgacaagataagtgtgcattgggctgggatcaccaagaaaaactccaactgcacgagtctcagaaggattatagcaagggatttgggggtaagtatggtgttcaaaaggatcgcatggacaagaacgcgagtacgttcgaggacgttactcaggtctcttcggcctaccagaaaacagtgccagtcgaggccgtcacgtcaaaaacctctaatattcgagctaacttcgagaatctggctaaagagaaggaacaggaagatagacgcaaggccgaggcggagagagctcagagaatggccaaagagcggcaggagcaggaggaggcccgaaggaagctagaagagcaagctagggcaaagacacagactccaccagtatccccagccccacagcctacagaggaacgacttccgagttcaccagtttatgaagacgccgcatcattcaaggccgagctatcctacagaggacctgtatcaggcacagaacccgaacccgtgtattctatggaggctgcagattacagagaagctagttctcagcagggacttgcttatgccactgaggctgtctacgagagcgccgaagctcccggacactatcctgccgaagacagtacctatgatgagtatgaaaacgatctggggattactgctgttgccctgtatgattaccaagcggcaggggatgacgagatcagtttcgacccggatgacataattactaacatagagatgatcgacgacggctggtggcgaggggtgtgtaagggaaggtttcgtgaactcgcctttagttgtgtcagggttgctctggtgcccatcaagtgttctagagatctgccaggacaggccaggggattgagaagcgccttatggcgggtgggtagaaaggactgtcctagacggggagcgtcctcgcgagtatccctcttaggcagaagaggtttgggtctcatggaggtgaatcccgagctgagccaccctgagcacaggtcctgccacgtcaggtgggagatctgtctgtgtcataccgtcacagcccgtagaattcgcaaactaatttccttccttagatcgagggaggccggacccgttccttcttgctcacaagtaggaggggtctcattccagaaggtcacctggaagtgtctaggcacgtgggttcctgagtgtccgtag

SEQ ID NO: 28124 - DNA, 945 bp, synthetic construct
  misc_feature 1..945: note = Description of Artificial Sequence: Synthetic coding sequence
  source 1..945: mol_type = other DNA
atggataaaaacgcctccacattcgaggacgtgactcaggtgagcagcgcatatcagaaaacagtgcctgtggaggcagtgaccagtaaaacatcaaatatccgagccaactttgaaaatttggccaaggaaaaagagcaggaagataggaggaaggcggaggccgaaagagcccagcgaatggcaaaagagcgccaggaacaggaggaagcccgaagaaaactcgaggagcaggctcgagccaagacccagacaccccctgtgagtcccgctcctcaacctaccgaggaacgcttacccagctcaccagtgtacgaggatgctgcttcttttaaggcagagctaagttatcgtggtccagtgagcgggacagaacccgaaccagtctacagcatggaagccgcagactaccgggaagccagctcacagcagggactggcctacgctacagaggcggtttatgaatccgcggaggcacccggtcattacccggctgaagacagtacctacgacgaatacgagaatgatctcggcatcaccgccgtagctctctatgattaccaggccgcaggtgacgatgaaatctcttttgatcccgatgatattattaccaacatagaaatgattgacgacggttggtggagaggtgtgtgcaagggcaggttccgagaactggcgttttcatgtgtgcgtgtcgcattggtccccattaagtgctcccgagatcttcccggacaagctcgtgggctccggtcagcactttggagggtcggaagaaaagactgtcctagacggggagcttcctccagggtgtccctcctcgggaggcggggtctgggcttgatggaggtgaaccccgagctttcccacccggagcatagaagctgccacgtgagatgggaaatttgcctctgtcacacagtgactgccagaaggattcgatag

SEQ ID NO: 28125 - DNA, 1761 bp, synthetic construct
  misc_feature 1..1761: note = Description of Artificial Sequence: Synthetic coding sequence
  source 1..1761: mol_type = other DNA
atgggcgttaacgctgtgcactggtttcgtaaagggctgcgcctgcacgataatccagctttgaaagaatgtatacagggagctgacactatcaggtgcgtgtacattcttgatccttggtttgccggatcctctaacgtggggatcaaccgatggcggtttctccttcagtgtcttgaggacctggacgcaaacctgaggaaactgaactctcgactctttgtcatacgaggtcaacctgctgatgttttcccccgactcttcaaagaatggaacatcactaagctgtctattgaatacgattcagaaccctttggaaaggagcgcgatgcggcaatcaagaagcttgctaccgaggccggtgtcgaagtgatagttagaataagccataccttgtacgacctcgataagatcatcgaactgaatggcggacagccacccttgacctataaaaggtttcagaccctgatttccaagatggagcccctcgaaatacctgtcgagactatcacatccgaagtgatcgaaaaatgtactacgcctctgtcggatgatcacgatgaaaagtacggggtgccttcccttgaggaactgggctttgatacagacggactgtcatccgcagtctggccaggcggagaaaccgaggccctcaccaggctggagcgacatttggaacggaaggcatgggtggcaaattttgagcgtcccagaatgaatgccaacagtcttctggcctccccaacaggtttatctccatatcttcggtttggctgtctgagctgtaggctgttctattttaagctgacggatctgtacaaaaaagtgaagaagaattcttccccacctctgagtctctacggacagctcctttggcgtgaatttttttacacagcagcaacaaataatcctcgttttgacaaaatggaaggcaatccaatttgtgtgcagataccctgggacaagaatcctgaagctctggccaaatgggcggagggtcgtactggcttcccctggattgatgccattatgacacaactgcgtcaagagggctggatccaccacctggcccgacacgcagtcgcttgttttttgacacggggtgatttgtggatttcctgggaggagggtatgaaagtttttgaggagttactgctggacgcggattggagcattaatgcaggatcctggatgtggttgtcatgcagctctttctttcaacagttcttccactgctactgtcctgtgggtttcggccgtagaacagatccaaatggagattacatccgcaggtacctgcccgtcttgcgcggattccctgcgaaatacatatatgatccctggaacgccccagaagggatccaaaaagtcgccaagtgcctgatcggagtgaactacccaaagcccatggtgaaccatgccgaggcttcccggctcaacatcgagcggatgaaacagatttatcagcagttgtccaggtatcgtgggctgggccttctggccagcgtaccaagcaaccctaacggaaatgggggtttcatggggtatagcgcagagaatattcctggatgttctagctcgggctcgtgcagtcaggggtcaggcattctccactacgcacacggagattcacaacaaacgcatctccttaaacagggacggtcgtctatgggtacaggcctgtctggtggaaaacggcctagccaggaagaggacacacagagcattggcccaaaagtgcagcggcagtccaccaactag

SEQ ID NO: 28126 - DNA, 582 bp, synthetic construct
  misc_feature 1..582: note = Description of Artificial Sequence: Synthetic coding sequence
  source 1..582: mol_type = other DNA
atgctcgaagtgggctgcgggtgtttagtagtcccgttctttaacttctttcattgctactgcccagtaggctttggcagaaggacagatccaaacggagattatatccgcaggtatctcccagtcttaaggggcttcccggcaaagtacatctatgatccttggaacgcccctgaaggcatccagaaagtggccaaatgcttgattggcgtcaactaccccaaacccatggtgaaccacgcagaggcatctaggcttaacattgaacgtatgaagcagatctaccagcagctctcaagataccgcggactcggactgttggcctccgtgccttctaatcccaacggaaatggaggatttatggggtactctgccgaaaacattccaggctgtagcagtagcggctcttgtagtcagggatctgggattctgcattatgctcacggcgacagccagcaaacccacctcctaaaacagggacggtcatctatgggcactggactgtcgggcggtaagagacctagccaggaggaggatacacagtccatagggccaaaggtccaacggcaatccacaaattag

SEQ ID NO: 28127 - DNA, 1323 bp, synthetic construct
  misc_feature 1..1323: note = Description of Artificial Sequence: Synthetic coding sequence
  source 1..1323: mol_type = other DNA
atgggaagctctcatcttttaaacaagggcctgccactcggggtgaggcccccaataatgaacggcccattgcacccacgaccactggtggccctgctggacggcagagactgtacagtggagatgcccattctgaaagacgtcgctactgtggcattctgcgacgcgcaatctacgcaagagattcacgagaaagtcctaaatgaagctgtcggcgctttgatgtatcacaccatcaccttgactcgtgaggatttggaaaaattcaaagcgctgcgtatcattgtccgcatcggtagcggttttgataatatcgatattaaatctgcgggtgacttaggcatagctgtttgtaacgtacccgctgcttcagtcgaagagacggctgacagtacactctgccatattctcaatctgtacaggcgcgctacctggcttcaccaggccctccgagaaggcacccgggtgcagagcgttgagcagatcagagaagtggctagcggtgctgctaggatccggggtgaaacactcggcatcatcggactaggtcgcgtgggccaggcggtggccctgcgggctaaagcctttggctttaacgttttattttacgatccctacttgtctgacggcgtggagagagcgcttggcctccagcgcgtgagcacgcttcaagatctactgtttcactctgactgcgtgactttgcactgcggcctgaatgaacacaaccaccacttgatcaatgattttaccgtgaagcagatgcggcaaggagcttttctcgtcaacactgccagaggaggcctcgtggatgagaaggccttagctcaagccctaaaggagggtcgcatccggggagctgctctggacgttcatgagtccgagcctttttccttttctcaggggcctctcaaagatgccccaaatctgatctgcactccccacgccgcatggtactccgagcaggccagtatcgaaatgcgcgaagaagcagctcgtgaaattagacgagcaatcaccggtagaattcccgatagccttaagaattgtgtaaataaagaccacctcaccgctgcaacccattgggcatctatggaccccgctgtggttcacccagagttgaacggtgcggcataccggtatccccctggggtggtgggcgtcgctccaaccggcattcctgccgcagtggaggggatagtgcctagcgcgatgtctctgtcccacggcctgcccccagtggcccaccctccccacgcccctagccccggacaaacagttaaaccagaggcagacagggaccacgctagtgaccaattatag

SEQ ID NO: 28128 - DNA, 1290 bp, synthetic construct
  misc_feature 1..1290: note = Description of Artificial Sequence: Synthetic coding sequence
  source 1..1290: mol_type = other DNA
atgagcggggtgaggccccctatcatgaacggccctttgcatccgagaccactggtagcactgctggatggcagggactgtaccgtcgagatgccaattttaaaggatgtggccacagttgccttctgcgatgctcagagtacgcaagagatacatgagaaggtgttgaatgaagccgtcggcgcactgatgtaccataccattacactcacaagggaagatctggagaaattcaaggccttacgaatcattgtgcggatcggttcagggtttgataatattgatattaaatcagctggggacttaggtattgccgtctgtaatgtacctgccgcttccgtggaagagaccgccgattctactttgtgccacatactgaacttatacagaagggctacctggctccaccaggcactgcgcgagggaaccagagttcagagcgttgaacagatacgggaggtggctagcggtgctgcccgtatcagaggagagaccctggggattatcggacttggccgtgttggccaggcagttgcactacgcgctaaggcctttgggtttaacgtccttttttacgacccgtatctgtctgacggcgtcgagagagctctcggcctgcagagagtatcaactctacaagaccttcttttccattcggattgcgtcacactgcactgcggacttaatgagcacaatcaccacctgatcaatgacttcacagtgaagcaaatgcgccaaggggcttttttagttaacactgcgagaggcggacttgtcgatgagaaggcgctcgctcaagctctgaaagaaggaagaatcaggggggctgcattggacgtgcacgagtctgagccattttcgttcagtcagggacctttaaaggacgcgccaaatctgatttgcactcctcacgcagcatggtattcagagcaggcctcaattgagatgcgtgaggaggctgccagggagattcgacgcgctatcaccgggaggattcctgattcccttaagaactgtgttaacaaagaccacttgaccgccgcaacacattgggcgtccatggatcctgccgtggtccatcctgagttgaatggagcagcgtaccgttatccgcctggggttgtcggcgtagctcctactggtatcccggcagccgtcgaaggtatcgtgccatcagctatgagcctgtcccacggactacccccagtggcacatccaccacacgcaccaagccccggtcaaacagtgaagccggaggccgatagggaccatgcttccgaccaactctag

SEQ ID NO: 28129 - DNA, 438 bp, synthetic construct
  misc_feature 1..438: note = Description of Artificial Sequence: Synthetic coding sequence
  source 1..438: mol_type = other DNA
atgagcggagtgcgcccaccaatcatgaatgggcctctgcatcctcgtcctctggttgcactactggatggcagggactgcaccgtagaaatgcccattctgaaagatgtcgcaactgtggcgttttgtgacgcacagagtacacaggagatccatgagaaggtgttaaatgaagcggttggcgcattgatgtaccacacaatcacgctgacgcgcgaagacctcgagaaattcaaagctctcagaattattgtgcgcattggcagtggctttgataatattgacatcaaaagcgccggagacctgggaatcgctgtctgcaacgtgccagccgcaagtgtggaggaaacagcagactccacactttgtcacattctcaacctctacagacgcgctacttggctccaccaggcccttcgggagggaactcgtgtttag

SEQ ID NO: 28130 - DNA, 516 bp, synthetic construct
  misc_feature 1..516: note = Description of Artificial Sequence: Synthetic coding sequence
  source 1..516: mol_type = other DNA
atgtccggagtgcgtcccccaattatgaacggccctctgcatcccagaccgctggtggcgcttcttgatggcagggactgtacagtggagatgccaattttgaaggatgtagcaacagtggccttttgcgacgcccagtctactcaggaaatacacgaaaaagttctcaacgaagccgtcggggctttgatgtatcatacaataacactgacgcgtgaagacttggagaagttcaaagctctgcgaatcatagtccgcatcggcagcggcttcgacaacattgacatcaagtcagccggagacctggggattgcggtgtgtaacgtcccagccgcatctgtcgaggagacagcagactctactctgtgtcacattctgaatctgtatcgcagagccacctggttgcatcaggctcttcgggaggggactagggtgcagtccgtggagcagattcgggaagttgcttcaggcgcagcgagaatacggggagagactctgggcattatcggcttatag

SEQ ID NO: 28131 - DNA, 2958 bp, synthetic construct
  misc_feature 1..2958: note = Description of Artificial Sequence: Synthetic coding sequence
  source 1..2958: mol_type = other DNA
atgcccgtgccttccaggcatatcaacatcggtcgcagtcagagctgggacgccgcagggtggtacgaaggtccttgggagaatgctgagtccctgcggccactgggccgtagatcatctctcacttatgggactgcagaaggcacctggtttgagccaaaccatcggccacaggatgcagccctaccagttgccgctgagccatacctgtacagggaagccgtgtacaactcagttgcagccaggaaaggctctacccccgactttacattttacgactctcggcaggccgtgatgagtggtcggtcacctctgctgcctcgagagtattattctgacccctcgggtgccgctcgagtccctaaggagcccccactgtatcgagatcctggcgtgtcaagacctgtaccttcctatggggtcttagggagcagaacatcatgggacccgatgcagggtagatccccggctctgcaggacgccggtcacttatatcgtgacccaggtggaaaaatgattccgcagggcagacagacccagagcagggcagcctcaccgggaaggtacggtcgtgagcagcccgacacccggtatggagccgaggtgcccgcttatccacttagccaggtgttctcagacataagtgagaggccgatcgaccccgctccagctaggcaggttgcacccacctgtctggtggtggacccaagcagcgcagctgcccctgagggttcaacgggtgtcgcacccggtgccttgaacaggggttatggtccggctcgagaatccatccctagtaagatggcgtacgaaacgtacgaagctgatcttagtacatttcaagggccagggggtaagaggacagtcttgcctgagtttctggctttcctaagggccgaggggttagcagaggcaactttaggagcacttcttcagcaaggcttcgacagcccagccgtcctggctaccttggaggatgcggacataaaaagtgtggctccgaatcttggccaggccagagtgctctccagacttgcaaacagttgtcgcacagaaatgcagctacgacggcaggacaggggcggtcctttacccagagcgcgtagctcctcattctcacaccgcagcgagttgcttcatggggatctggcttctctaggagcggcagcaccacttcaaactgcttctccgagagccggagaccccgctcggcgaccttcttccgccccaagccaacatctcctggagaccgccgcaacatattccgctcctggggtcgggacacacgcccctcatttcccatcaaattccggctactcgtctcccaccccatgcgctcttactgcgcgtctatcaccaacctatccgctgcaggccggagtggccctgaccaatcctggaccctctaacccactgcatccaggcccaaggaccgcctactctacagcatacactgtgccgatggagctcctaaaacgcgaacggaacgtagccgctagcccactgccctccccacacggttcgcctcaggtcctgcgtaagcctggggcaccgctcggccctagcaccctgccccctgcatcccaatctctgcacaccccccattcaccatatcaaaaggtggcaaggagaacaggggctcccatcattgttagtacaatgttggctcctgagccctccatcaggccccagatcatgaacgggcctctccacccgagaccactcgtggctcttctggacggtcgggattgtactgtggagatgcctattttaaaggaccttgccacggtggcgttctgtgatgcccagtctacccaggagatacacgaaaaggttctgaacgaagccgtaggggctatgatgtaccatacaatcaccctgaccagggaggatctggaaaagttcaaggcccttagagtaatcgttagaattggctcgggctacgacaacgtcgacataaaagcagctggcgaattggggatcgctgtgtgcaacatcccgtctgccgctgtcgaggaaaccgcggacagtaccatatgtcacatccttaacttataccgacggaacacgtggctctatcaagcacttagagagggtactcgggtgcaatccgtcgagcagatccgagaggtagcctccggggcagccaggattcggggagaaactctgggactgatagggtttggacgaaccggacaagctgtcgctgtccgggcaaaggcctttggcttcagcgtcatcttctacgatccttatctacaagatggtatcgaacggtccctcggggtacaaagagtctatactttgcaagatctgctttaccagtctgattgcgtcagccttcattgtaacctgaatgaacataatcaccacctcattaatgacttcactattaaacagatgaggcaaggcgcatttctggtgaacgccgcacgaggtgggttggttgacgaaaaagcgctcgcccaggcccttaaggaaggaagaattcgcggagctgctcttgacgtgcatgagagcgaaccatttagtttcgcgcagggccctttgaaggacgcccctaaccttatctgtaccccacacacggcatggtactctgagcaggcatctctggagatgagagaggctgccgcaacagaaattagaagagccatcaccggacggatcccagaatctttgaggaattgcgtgaacaaagagttttttgtcacttctgcaccttggtcagtgatcgaccaacaagcgatccatcctgagttaaacggagctacgtatcggtacccacctggtatagtcggagtggctccgggaggcctgccagctgccatggaagggattatcccgggaggaattccagtgactcacaatctgcctaccgtggcccacccgtctcaggctccatctccaaatcagcccacgaagcacggagataatcgggagcatccaaatgaacaatag

SEQ ID NO: 28132 - DNA, 1338 bp, synthetic construct
  misc_feature 1..1338: note = Description of Artificial Sequence: Synthetic coding sequence
  source 1..1338: mol_type = other DNA
atggccttagtagataaacataaagttaaaagacaaaggctggaccgcatctgtgagggtataagaccacaaattatgaacggaccacttcatcctagacctctggtggcactgctggatgggagagactgtaccgtggagatgcctatcttaaaggacctggccacagtcgcattctgtgatgctcagtctactcaggagatccatgaaaaagttctaaatgaggctgtaggtgccatgatgtaccatacaatcaccctgacacgggaggatcttgagaaattcaaagctctccgggtgatcgtccgaataggttcagggtacgataatgtggacatcaaggccgcaggggagctgggaatcgccgtgtgcaacattccatctgctgcagtggaagaaaccgctgacagcaccatttgccacatcctgaacctctaccgaaggaatacttggctctatcaagctctccgggaaggcactagagtgcagagcgtcgaacagatccgggaagtcgccagcggagcagccaggatccggggagagacactcggactcatcggcttcggtcggactggtcaggcagtggccgtgcgagccaaggcttttggcttctccgtgatattctacgacccgtatctccaagatggtattgaacggagcctcggagttcagagggtgtatacacttcaagatctcctctaccagtctgactgtgtgtcgctccactgcaatttgaacgagcacaatcaccacctgataaacgactttaccatcaagcagatgcgtcagggcgcattcttagtaaatgccgctcgcggaggactggtggatgagaaagccctggcccaggccctcaaagagggaaggattcgaggagcagctctcgacgtgcacgaatccgagccattttctttcgctcagggacccctgaaagatgcaccgaacctgatttgtactccccacaccgcctggtattccgaacaggcatctttggagatgcgggaagctgccgctactgagataaggcgggcaatcaccgggagaatccctgagagcttgaggaactgtgtgaataaggaattcttcgtgaccagtgctccctggtctgtcattgaccagcaggccatacatcctgaactgaacggagcgacgtaccggtaccctcctggaattgtgggggtggcacctggaggtctaccagccgcaatggaaggaattattccaggaggtattcccgtgacacacaacctgcctacagtggcccacccaagtcaggctccgtcccctaatcagccgactaagcatggcgacaaccgtgaacacccgaatgagcaatag

SEQ ID NO: 28133 - DNA, 1338 bp, synthetic construct
  misc_feature 1..1338: note = Description of Artificial Sequence: Synthetic coding sequence
  source 1..1338: mol_type = other DNA
atggctctcgtcgataagcacaaagtgaaaaggcaacgtttagaccgcatctgtgagggaatcagaccccagatcatgaacgggcctttgcacccacgccctctcgtggccctgctggacggacgtgactgcacagtagagatgcccattctcaaagatctagccaccgtagctttctgcgacgcccaatcgactcaagagattcacgagaaggttttaaatgaggcggtaggagcaatgatgtatcatacaatcacactgacgagagaagacctcgagaaatttaaagcgctacgtgtcattgttcgaatcggcagcgggtacgacaacgtcgacataaaggcggcaggcgagctcggaatcgccgtctgtaacatccccagcgcagctgttgaggaaaccgcagattccacaatctgccacattctaaatctgtatcgtcggaacacttggctttaccaagctttgagagaagggaccagagtgcagtcagtggagcagatcagggaggtggccagcggcgcagctagaattcgaggagaaaccctcgggctgattgggttcggcagaacgggacaagctgttgccgtacgtgccaaagcttttggttttagtgtgatcttttatgacccctacctgcaggatggcatcgaaaggagcctgggtgtgcaaagggtctatactctccaagacttactctaccagtctgattgcgtgtccctgcattgcaacctcaacgaacataaccaccatctcattaatgattttactattaagcaaatgcgccaaggtgccttccttgtcaacgcagccagaggaggtctggtggatgagaaagctctggcacaagcattaaaggagggcagaattcggggagctgctttggatgtgcacgaaagcgagcccttctctttcgcacaggggcctttgaaggacgccccaaatttgatttgtaccccacataccgcctggtattcagagcaggctagtcttgagatgcgggaggccgctgctacggaaatcaggcgcgctatcactggcaggattcccgagtctcttaggaactgtgtcaataaggagttcttcgttaccagtgctccctggtctgtcatcgatcagcaagccattcatccggagttaaatggagccacgtatcggtatcctcccggtattgttggtgtggcccctggcggactgccagccgctatggaggggattatccctggcggaattcctgtgacccataatctcccaactgtggcccacccgagccaggccccatctccaaatcagcctaccaagcacggagacaacagagaacaccctaatgagcagtag

SEQ ID NO: 28134 - DNA, 1338 bp, synthetic construct
  misc_feature 1..1338: note = Description of Artificial Sequence: Synthetic coding sequence
  source 1..1338: mol_type = other DNA
atggccttagtcgataaacacaaagtcaaacgccagaggctggacaggatctgtgaagggattcgacctcagattatgaatgggccactacatcctcggccattagtggctctgctcgatggccgagactgtacagttgaaatgcccatcctcaaagacctggctactgtcgcattttgcgatgcgcagtccacccaggaaatccatgagaaggtcctgaatgaagccgtcggtgccatgatgtaccacacaatcacattaacaagggaggacctcgaaaagttcaaggccctccgcgtaattgtcaggatcggatccggctatgataacgtcgacattaaggccgcaggcgaactcggcatcgctgtttgcaacatccctagtgcagccgtggaggaaactgctgattctaccatttgccatatacttaatttgtaccgcagaaacacttggctataccaggcccttcgcgagggtacgagggtacagtcagtggagcaaatcagagaggtggcaagtggagccgcacgcatcaggggcgagaccctcggcctaattggatttggcagaacaggccaggccgtggctgtgcgggctaaggcgttcggcttctcggtgattttctacgatccctatctccaggatggcattgaacgcagccttggcgtgcagcgagtatatacgctgcaggatctgctataccagtccgactgcgtttccctccactgcaatttgaatgaacacaaccaccacctgattaatgactttacaattaagcaaatgcgacaaggggcatttctcgtgaacgccgcaagggggggtttagtggatgagaaagcactggcacaagcgctgaaggagggcagaatccggggagccgctctagatgtgcatgaatccgagcctttctccttcgcacagggacccttgaaagacgctcccaacctgatttgtacacctcacaccgcatggtactcagaacaagcttctctcgaaatgcgggaggctgccgctacagaaatcagacgcgctatcacaggcaggatccctgaatcgctacggaattgtgttaataaagagttcttcgtgacttccgcaccatggtctgtgatcgatcagcaggctattcaccctgagctgaacggagcaacatatcggtatccccctggcatcgtgggagtggcccctggcggactcccagcggctatggagggcattattccagggggtatacccgtcactcacaatctaccaacggtggctcatccaagtcaggctccttctcctaaccagccaaccaagcacggcgacaacagggagcacccaaatgaacaatag

SEQ ID NO: 28135 - DNA, 12 bp, synthetic construct
  misc_feature 1..12: note = Description of Artificial Sequence: Synthetic coding sequence
  source 1..12: mol_type = other DNA
atggccctttag

SEQ ID NO: 28136 - DNA, 1338 bp, synthetic construct
  misc_feature 1..1338: note = Description of Artificial Sequence: Synthetic coding sequence
  source 1..1338: mol_type = other DNA
atggctttagtagacaaacacaaagttaagcggcagcggcttgatcgcatctgtgaagggatacgccctcaaataatgaatgggccactccatcccaggccactggtggctctgctggacgggagagactgcaccgtggaaatgcccattctgaaagatttagctaccgtagccttttgcgacgcgcagtccacacaagaaatccacgagaaggtgctcaacgaagctgtgggggcaatgatgtatcacactattaccctgactcgcgaggatctggaaaagttcaaggctctccgtgttattgtgaggattggttccggatacgataatgtggacataaaagccgctggtgaattgggcattgccgtttgcaacatcccctcagccgcagtagaagagactgccgatagcaccatatgtcatatcttgaatctgtataggaggaacacttggctgtatcaggctctgcgggagggtacaagggtccagagcgtggagcagattagggaggttgcaagtggcgcagcacgaataagaggcgagacacttggtctcataggattcggaaggacaggccaggctgtggcggtccgggcaaaggcttttgggttttctgtcattttttatgacccctacctgcaagacggtatcgagcgctctctgggagtgcagcgagtctataccctgcaggatctcctttaccagagtgactgcgtgtcactccactgtaacttaaatgagcacaaccaccatctgattaatgatttcacgattaaacagatgcgtcaaggcgcattcctggttaatgccgctagaggcggtttggtggatgaaaaagccctggcacaggcgctgaaggagggcagaattcggggagcagcactggatgtgcacgaaagcgaaccattcagctttgctcagggacccctcaaggacgcccctaatcttatttgcaccccgcatacagcctggtactctgagcaggcctcattggaaatgcgcgaggcggcagccaccgagattaggagagcgattaccggtaggatccctgaatcgctgaggaattgtgtgaataaagagttcttcgtgacctcagccccatggtccgtgattgatcagcaggccattcaccctgaactgaatggcgcaacttacagatatcctccaggaattgtgggtgtcgctccaggcggactgcccgcagctatggaaggaatcattccaggcggtatacccgtaacccataaccttccaactgtcgctcatccatctcaggcccctagtcccaatcagcccacgaaacatggcgataaccgtgaacatcccaatgaacagtag

SEQ ID NO: 28137 - DNA, 2331 bp, synthetic construct
  misc_feature 1..2331: note = Description of Artificial Sequence: Synthetic coding sequence
  source 1..2331: mol_type = other DNA
atgtcctctacacgatcccagaacccacacggcctgaaacaaatcggcctggatcagatttgggacgacctgcgcgctggcattcaacaggtgtatactagacagagcatggctaaaagccgctacatggagctatacactcatgtctacaattattgcacaagcgtccaccagtctaatcaggcgcgtggggcaggggtcccgccatccaaatctaagaaaggtcagaccccagggggagcgcagtttgtagggctcgagctgtacaaacggctgaaggaattcctgaaaaactacctaacgaatctattaaaagatggagaggatctgatggacgaatcagtgctgaagttctatacccagcagtgggaagactataggttctcctccaaagtgcttaatgggatctgtgcctacctgaaccgtcactgggtgcggcgagaatgcgacgaagggagaaaaggaatttatgaaatatacagcttggccctcgtgacctggagggattgcctgttccgacccctcaacaaacaggtgactaatgccgtgctgaagctgatcgaaaaagagcgcaacggggagacaatcaacacgcgcctgatttcaggagttgtgcagtcttacgtggaactcggcctgaacgaagacgacgcctttgcaaagggccctacgcttactgtttataaagagtcatttgagagccagtttctggccgacaccgaacgtttctacacccgtgagagtaccgagttcttgcagcagaatcccgtcacagagtacatgaagaaggccgaggctagacttctcgaagagcagaggcgtgtccaggtttaccttcacgagtctactcaagacgagcttgccaggaaatgcgagcaagtattgatcgaaaaacatctcgagatctttcataccgagttccagaaccttcttgatgctgataaaaatgaggacctgggccgtatgtacaacctggtgtcccggatccaagatggcctcggtgagcttaaaaagctgctggagacgcacattcacaatcaagggctggccgctatcgagaagtgtggcgaggccgcattgaatgatcccaaaatgtacgtgcagactgttttggacgtccacaagaaatacaatgccctggtgatgtcggcttttaataacgacgctggcttcgtcgcggcattagataaagcctgcggcaggtttattaataacaacgctgtcacgaaaatggcccagtcttcttcaaagagccctgagttactggctagatactgtgatagccttcttaaaaaaagctcgaagaaccccgaagaggcggaactggaggatacactcaaccaggtgatggtggtgttcaaatacattgaagacaaagatgttttccagaagttctacgccaaaatgttagccaagcgactcgtacatcagaactcagcaagcgatgacgcggaggcatctatgatcagcaagctgaaacaggcctgcggttttgagtacaccagcaaactgcagcggatgttccaagatatcggtgtcagtaaggatctgaatgaacaattcaaaaaacaccttacgaatagcgagcctctggatttggacttttccatccaggtgctcagcagcgggtcttggcctttccagcaaagctgtacgtttgcactgcctagtgaactcgagcgtagctatcagcgttttaccgctttttatgcctcaaggcactctggtcgtaaactcacatggctatatcagctgagcaagggcgagcttgtgacaaattgtttcaagaataggtatacacttcaggcctcaacctttcagatggccatactactccaatataacaccgaggatgcttacacggtccagcagttgacagactccacgcagataaagatggacatactggctcaggtactacaaatcctgctcaagagcaagctgctggttctcgaggacgagaacgctaatgtggatgaggtagagctgaaacccgacacacttattaagttatacttaggttacaaaaataaaaagctacgcgttaacataaatgttcctatgaagaccgaacagaagcaggagcaggagaccactcacaaaaacatcgaggaggacagaaagctccttatccaggctgccatcgttagaattatgaagatgagaaaggtcttaaagcatcagcagcttctaggagaggtgctgactcaactgagctctcgctttaagccccgagtgcctgtaatcaagaagtgtattgacatccttatcgaaaaggagtacctggaaagggtggacggcgagaaggatacctacagctaccttgcatag

SEQ ID NO: 28138 - DNA, 2331 bp, synthetic construct
  misc_feature 1..2331: note = Description of Artificial Sequence: Synthetic coding sequence
  source 1..2331: mol_type = other DNA
atgtcttccactcgcagtcagaatcctcatggcctgaaacagatcggactagatcagatttgggatgaccttcgggctggcatacagcaggtgtataccaggcagtccatggcgaaaagccggtacatggaattgtacacccacgtctataattactgtacttcagtgcatcagtctaaccaggcacggggtgccggagtgccgccttccaagtcaaaaaaggggcagacacccggaggcgcacagttcgtgggcttggagctttacaagcgcctcaaagaattcttgaaaaattatttgacaaacctcctgaaagatggtgaggacctgatggatgagagtgtgctaaagttctacacgcaacaatgggaagattaccgcttctcttcgaaggtgctgaacggaatttgtgcatatctaaatcggcattgggttcgtagagagtgtgatgaggggagaaaaggaatttacgaaatctatagcctggcactggtaacatggcgagactgtctgtttaggccgttaaacaagcaagtgaccaatgcagtgctgaagctcattgagaaagaacgtaatggcgaaacaatcaacacacgactgatctccggcgttgtccagtcttatgtggagctcggccttaacgaagatgacgcctttgccaagggccctactttgaccgtttacaaagaaagcttcgaatcacagtttctcgccgatactgaacggttctacacccgagaatctactgagttcctccaacagaatcccgtgaccgagtacatgaaaaaggctgaagcaaggttacttgaagaacagcgacgcgttcaagtgtatttacacgagtcaacccaggacgagctggcacgtaagtgcgagcaggtccttattgagaaacatctcgaaatctttcatacagagtttcagaaccttctggatgcagataaaaacgaggatctcggccgaatgtataatctcgtctcgcggattcaggatggactgggcgagctgaagaaattgctagagacgcatatccataatcagggtctcgcggctatcgagaagtgcggtgaagcggcacttaatgaccctaagatgtacgtccagacggttctcgacgtgcataagaagtataatgccctggttatgtctgcatttaacaatgatgctggcttcgttgctgccttggacaaagcctgcgggcgttttattaacaataacgctgttacaaagatggcgcagtcttccagcaagagcccagagctccttgcacggtactgtgacagcttactgaagaagagcagtaagaatcccgaggaggctgagctcgaagacacccttaatcaggtgatggtcgtctttaagtatatagaggataaagatgttttccagaaattttacgctaagatgctggcgaagcgcttagtccatcaaaatagtgccagcgatgacgccgaagcatccatgatctcaaagctgaagcaggcttgtggcttcgaatatacatccaagctgcagagaatgtttcaggacataggagtgagcaaagacttgaacgagcaatttaaaaaacatctcaccaattctgaaccgttggaccttgatttctcaatccaagtgctgagcagcgggtcctggccttttcaacagagttgcacctttgcattgccgagtgaacttgagaggagctatcagcgttttactgccttctacgcatccaggcatagcgggagaaaacttacatggttataccagctttcaaagggagagctggtgaccaactgcttcaagaacaggtatacgctgcaagcgagtaccttccaaatggcaatcctgttacaatacaataccgaggatgcttatacagtgcagcaactgacagactctacacagatcaaaatggacatcctggcccaggtgctgcaaatcctactgaaaagtaagctgctggtgttagaagatgagaatgccaacgtcgatgaggtcgaactaaaaccagatacattgattaaactctacctcggatataagaataaaaagctccgggtgaatattaatgtacctatgaagaccgagcagaaacaggagcaggagactacacataagaatattgaggaggatagaaagcttctgatacaggcagcaatagtcaggatcatgaagatgagaaaggtgctgaagcaccagcagctgctgggagaagtgctgacacaactctcatccagattcaaaccacgggtgccagtcatcaaaaagtgtatagacattttgatcgagaaagagtacctagagagggtggacggcgagaaggacacctactcctacttagcatag

SEQ ID NO: 28139 - DNA, 2112 bp, synthetic construct
  misc_feature 1..2112: note = Description of Artificial Sequence: Synthetic coding sequence
  source 1..2112: mol_type = other DNA
atgagctccacccggtctcagaatccccatggacttaagcagattgggctcgatcagatctgggatgatttacgggcagggatccagcaggtgtatacccggcagtcaatggccaaatccaggtatatggagttgtatacacagcagtgggaagattaccgcttctcatcaaaagtcttgaatggcatctgcgcttacctcaaccgccactgggtcaggcgcgaatgcgacgaggggaggaagggcatctatgaaatctatagcctcgcattggtcacatggagagactgtttgtttaggcctctaaataagcaagtgaccaatgctgtgctgaagcttatagagaaggaacggaacggagagactatcaatacaaggcttatatctggggtcgtgcagagctacgttgaactgggtctgaacgaggatgatgcttttgccaaaggtcccacacttacagtgtataaagagagcttcgagtctcagttcttggccgacaccgagagattctacacgagggagtctactgagttccttcaacagaatccagttaccgagtacatgaagaaagctgaagctagactgcttgaggagcaacgccgagtgcaagtttaccttcacgagtctacgcaagacgaactggcccgtaagtgtgaacaagtcttaatagaaaagcatttggagatatttcacactgagttccagaacttactggatgccgacaagaacgaagatctcggccgaatgtacaatttggtgtcaagaatccaagatgggctcggagaacttaagaaacttttggagacccacatccacaatcagggcttagctgccatcgagaaatgcggggaggccgctcttaatgaccctaaaatgtacgtccaaaccgtccttgatgttcacaagaagtataatgctttggtcatgtctgcctttaataatgacgcagggtttgtggcagcccttgataaggcatgcggcaggtttatcaacaacaatgcggtgaccaagatggcccaatccagctccaagtctcccgaattgctggccagatattgcgacagccttcttaaaaaaagcagtaagaatcctgaggaagcagaactagaggacaccctgaatcaagttatggtcgtgttcaaatacattgaagacaaggatgtcttccaaaaattctatgcaaagatgttggctaagcgcctggtgcatcagaacagcgccagcgacgacgctgaagcatccatgatctccaagttaaagcaggcttgcggctttgaatatacaagtaagcttcagcgcatgttccaagatatcggcgtatctaaggatctgaatgagcaattcaaaaagcacttgaccaatagtgaacccctggatctggatttctccatccaggtgctcagttcagggtcgtggcccttccagcagtcttgtaccttcgctttgccatcagaattggaaaggtcatatcagaggttcaccgcattttacgcttctcggcacagtggaagaaaattgacatggctgtaccaactgagcaagggagagttagtcactaactgtttcaagaaccgttacacactgcaagcttccacatttcagatggctattttattacaatataacacagaggacgcgtataccgtgcagcagctcactgattcaacccagatcaaaatggatattcttgcccaggtgctgcagatcctcctgaaatctaagctgctcgtgctggaggacgagaacgcaaatgtggacgaggtcgagctcaaacctgatacactgataaaactgtatcttggctacaaaaataagaagttgcgcgtgaatatcaatgtacccatgaaaaccgaacaaaaacaggagcaggagactactcataaaaacatagaggaggatcggaagcttctcattcaagccgcaatcgtgcggatcatgaagatgcgaaaagtgttgaaacaccaacagctgctgggagaggttcttactcaacttagttccaggttcaagcctcgcgtgccagtcataaaaaaatgcattgatatcctgattgaaaaggaatacctagaaagggtggatggggagaaggacacatattcttacttggcttag

SEQ ID NO: 28140 - DNA, 1824 bp, synthetic construct
  misc_feature 1..1824: note = Description of Artificial Sequence: Synthetic coding sequence
  source 1..1824: mol_type = other DNA
atggaactctacacccacgtgtacaactactgtacatcagtacatcagagcaatcaagcccgtggcgcaggggtccccccatctaaatcgaagaaggggcagacacctggcggagctcagttcgtgggcctcgaactttataagcgcctgaaggagttcttgaagaattatctaaccaatttactgaaggacggggaagacctcatggatgagtcagtgctgaagttttatacgcaacaatgggaagactaccggttttcatctaaagtgttaaacggaatttgtgcttacctgaatcgacattgggtgcgcagagagtgcgatgaggggaggaagggaatttatgaaatttactctttagccttggtgacctggcgcgactgcttgttccggcctctcaacaaacaggtcacaaacgcggtactgaagctgatagagaaagaacggaacggagagactatcaacacccgtctgatctctggggtggttcagtcctatgtcgaactgggactgaatgaagatgacgccttcgcgaaaggacccactctgaccgtttataaagaaagctttgagtcccagttccttgccgacacagagaggttctacacgcgggagagcacggagttcctccagcagaatcccgtgaccgagtacatgaagaaggcagaagcccgtctgttggaggagcaaaggcgggtccaggtctacttacatgaatccacccaggatgagctggctaggaagtgcgaacaggtcctcattgagaagcatctagaaatattccacaccgagtttcagaatctactggatgccgacaagaacgaggacctgggccgtatgtataatctcgtatctagaattcaggacggactgggagaactgaagaaactgcttgaaacacacatccataaccagggactcgctgccatcgaaaagtgcggggaggcagctttgaacgatcctaagatgtacgtccagacggtccttgacgttcacaaaaagtacaacgcattagtgatgtccgcctttaataatgacgctgggttcgtcgcagctctggataaagcatgcggcaggtttattaataacaacgccgtgaccaagatggcccagtccagtagcaagagccctgagctgctggcacgatactgcgactctctcttgaaaaagagctctaagaaccccgaggaagctgagttggaggatactctgaatcaggtgatggtggtgtttaaatacatcgaggacaaggacgtgttccagaagttctacgctaaaatgctggcaaagagactcgtgcatcagaactctgcatctgatgacgccgaagccagcatgattagtaagcttaaacaagcttgtggattcgagtatacttcaaaactccaacgtatgtttcaggacatcggtgttagcaaggatctcaatgaacagtttaagaagcatctgacaaactccgagccactggatcttgatttctccatccaggtgcttagcagtggtagctggcctttccagcagagttgtacatttgcattaccgagcgagctcgaacgttcctatcagcgcttcacggcattttatgcttcccgtcactctggtcgcaagcttacttggctgtatcaattgagtaaaggtgaattggtgacaaactgcttcaagaaccggtatacactccaggcatccacattccaaatggctatattacttcaatacaacacagaagacgcctacaccgtgcaacagctgaccgattctacgcagatcaaaatggatattctggcgcaggtcctgcagatcttgctcaaatctaagctgttgtag

SEQ ID NO: 28141 - DNA, 2121 bp, synthetic construct
  misc_feature 1..2121: note = Description of Artificial Sequence: Synthetic coding sequence
  source 1..2121: mol_type = other DNA
atgagtctaaagccccgagtagtcgacttcgatgaaacttggaataaactcctgacaacaatcaaagccgtggtgatgctggaatatgtcgagcgggctacttggaatgacagattcagtgacatttacgccttatgcgtcgcatatcccgaacctctgggtgagagactgtatacagaaactaaaatcttccttgaaaaccatgtcaggcatcttcacaaacgagttttggagtctgaagaacaggtgcttgttatgtatcatcggtactgggaagagtactccaaaggcgctgattacatggactgcctatacaggtacttaaacactcagtttataaagaaaaacaaactcactgaggccgatctgcagtacggctatggcggagtggatatgaatgagcctctgatggagataggggagctcgcattagatatgtggcgtaagctcatggtcgaaccattacaggctatcttgatccggatgctcctgagagagattaagaacgatcgcggtggcgaggacccaaatcaaaaagtgattcacggagtcattaactcttttgtgcacgtagaacaatacaagaagaagttccccctgaaattctaccaggaaatcttcgaatcaccctttctgactgagacaggcgagtactataaacaggaagccagtaatcttctgcaggaaagcaactgcagtcagtacatggagaaagtacttggcagattgaaagacgaggaaatcaggtgccggaagtatcttcatccctcatcttacacgaaagttattcacgaatgccagcagaggatggtagccgatcacctgcagttcctccacgcagaatgccataatataattagacaagagaagaaaaacgatatggccaatatgtacgttctattgcgtgcagtttccaccggactcccccacatgattcaagagctccagaaccacatccacgatgaggggctgagagccaccagtaacttgacccaagaaaatatgccaactcttttcgtggagagcgtacttgaagtacatgggaaattcgtgcaattaatcaatacggtactgaatggagatcagcacttcatgtctgctttagataaggctctgacctccgtggtcaattaccgcgagcccaaatccgtctgtaaggcacctgaactgctggcaaaatattgtgacaacctgctcaagaaatcggctaagggaatgacagagaatgaagtagaggatagattaacgtctttcatcaccgtatttaagtacatagatgataaagacgtgttccagaaattttatgcaagaatgcttgccaaacggctaatccatggcctctcaatgagtatggatagtgaggaagccatgattaacaagcttaaacaagcatgtggatatgagtttacatcaaagcttcatcgtatgtacactgacatgtccgttagtgccgatctcaacaacaaatttaacaatttcatcaaaaaccaggatacagtgatcgaccttggcattagctttcagatctacgtgcttcaggcaggtgcatggcccttaacccaggctccctcttccacattcgccatccctcaggaactcgagaagtctgtgcagatgtttgagctgttttactctcagcacttctctggtagaaagctcacttggcttcactatttatgcactggcgaagtcaagatgaactatctggggaaaccctacgtcgccatggtaacgacataccaaatggctgtactcctggcgttcaataacagcgaaacagtgtcttacaaggaactgcaggactcgacccagatgaacgaaaaagagcttactaagactatcaagtccctgttagacgtaaagatgatcaatcatgatagcgagaaggaagacattgacgctgagagctctttttcactcaacatgaatttcagcagtaagcgcacaaagttcaagattactacctctatgcagaaagataccccccaggttatctctcaaagtcgcgctcggtttaacccttcaatcagcatgataaagaagtgcatcgaagtgctcattgacaagcagtatattgaaagaagtcaggcctccgccgacgagtacagctacgtggcctag

SEQ ID NO: 28142 - DNA, 2121 bp, synthetic construct
  misc_feature 1..2121: note = Description of Artificial Sequence: Synthetic coding sequence
  source 1..2121: mol_type = other DNA
atgagcctgaaacctcgcgtcgtggatttcgatgaaacctggaataagctgctcactacaatcaaggcagtcgtgatgctggagtatgtggaaagggctacctggaatgatagatttagcgatatctatgcgctgtgcgtagcctatccagaaccactgggcgaaaggctctacactgaaaccaaaattttcctggagaatcatgttcggcatttgcacaaacgggtgctggagagtgaggagcaggtgttggttatgtatcataggtattgggaggagtactcaaagggagctgattatatggactgcctgtaccgatacctcaatacccagtttattaagaaaaataagctgacagaggcagacctgcaatacgggtatgggggagtggacatgaacgaaccactgatggagatcggagaattagccttagacatgtggaggaagcttatggtggaacctcttcaggctatactaatccggatgctgctgcgcgagatcaagaacgatcggggtggggaggatcccaatcaaaaggtgatacacggggtgatcaacagtttcgtgcacgtggagcagtacaaaaaaaagtttcctctgaagttttatcaggaaattttcgagtcacccttcctgactgaaaccggagagtattataagcaggaggccagcaatctgttgcaagagtctaactgctcacaatatatggaaaaagttcttggcaggctgaaagatgaagagatccggtgccgaaaatacctccacccatcctcttataccaaagtgatccacgaatgccagcagaggatggtcgctgatcacttgcagttcctccatgccgagtgccataacatcatacgtcaggagaagaagaatgacatggccaacatgtacgtgctcttaagggctgtctccacgggcctgccgcacatgatccaggagctgcagaatcacatccacgacgaaggtctgagagccacttccaatctgacacaagaaaatatgcctaccctgttcgttgagagtgtgctcgaagtacacgggaagttcgtccaactgattaatacggtgctgaatggcgatcagcactttatgtctgcgttagataaagcacttacatccgtggtgaactacagggagccaaagagcgtttgcaaagcaccagagttgctggcaaagtattgcgataacctcctgaagaagagtgctaagggaatgaccgagaatgaggtggaagataggctaacctcattcataactgtgttcaaatatattgatgataaagatgtctttcagaaattctatgctcgcatgctggctaaaagactcattcatggcttgtctatgtccatggactctgaggaggccatgattaacaagctaaaacaggcttgcgggtacgagttcacatctaaattacacagaatgtataccgacatgtccgtcagtgccgatttgaacaacaagtttaacaattttattaagaaccaggataccgtgattgacctgggcatttcctttcagatttatgtactccaggctggagcttggccgctgacgcaggcaccttcttccacttttgcaattccccaggagttggaaaaaagcgtgcaaatgttcgaactgttctattcacaacatttttctggtcgtaaattaacttggttgcattacttatgcaccggtgaagtgaaaatgaactatctgggcaaaccctatgtggccatggtgaccacctatcagatggccgtcctcctggcgttcaacaatagtgagacagtgagttacaaagaacttcaagactccacccaaatgaatgagaaggaactgacgaagaccataaaatcactactggacgtgaagatgattaatcatgattcagaaaaagaagacattgatgcagagagctcgttctcgctgaatatgaacttcagctcaaagaggacgaagttcaagattactacaagcatgcagaaggacaccccgcaggtgatcagtcagtctcgggctaggtttaatccatctatatctatgatcaagaagtgcattgaggtcctgatcgacaagcaatacatagagcgctcccaggcaagcgccgacgagtactcatacgttgcatag

SEQ ID NO: 28143 - DNA, 2238 bp, synthetic construct
  misc_feature 1..2238: note = Description of Artificial Sequence: Synthetic coding sequence
  source 1..2238: mol_type = other DNA
atgagcctcaaaccccgagtggtcgattttgacgaaacttggaacaaactgctgacaacaattaaggctgtggttatgcttgaatacgtggagcgcgctacctggaatgaccggttttccgatatttacgccttatgtgtcgcttaccctgaacctctgggagaaaggctgtatactgagacgaaaatcttcctcgaaaaccacgtgcgccatctccataagagggtgctcgaatctgaggagcaagtgctggttatgtaccatagatattgggaagaatacagcaaaggagcagattacatggattgtctatacaggtacctgaatactcagtttatcaaaaaaaataaactaaccgaggccgacttacaatacggttacgggggagtggacatgaacgaacctctgatggagataggagagctggctctggacatgtggcgcaagctgatggttgagcctctgcaagcgattctgatccgaatgctccttcgcgagattaagaacgataggggaggcgaggaccctaatcagaaggtcattcacggcgttatcaactcattcgtccatgtagagcagtacaagaagaagtttcccttaaaattttatcaagagatctttgaatctccttttttaaccgagactggagagtactataaacaggaggctagcaacctcctgcaggagtccaactgttcccaatatatggagaaagttcttggacgactgaaagatgaggagattaggtgcagaaagtacctacatcccagcagctacaccaaagtgatccacgagtgtcagcagcgcatggtggcagaccacttgcagtttctgcatgccgaatgccacaatatcattaggcaggaaaaaaaaaatgacatggccaatatgtatgtgctactgcgcgctgtctctaccggcctcccacacatgatccaagagctccagaatcatatacatgatgaggggctgagagctaccagtaacctgactcaggaaaatatgcccacacttttcgtggagtcagtcctggaagtccacggcaagttcgtccaattgatcaacaccgtcttgaacggggatcagcattttatgtctgcgctggataaggctttgacatcagtcgtgaattatcgcgaacctaaaagtgtgtgcaaggcccctgagctgctggccaaatattgtgacaacctcctaaagaagtctgcgaaggggatgacagaaaatgaggtggaggaccggctgacatccttcattactgtattcaaatatatagatgacaaagacgtgtttcagaaattttatgcaagaatgctggccaaacgactgatacatggcctgtcaatgtccatggattcagaggaggcaatgatcaataagttgaagcaggcttgcggatatgagtttacttctaagctgcacagaatgtatactgatatgtctgtctccgcagatctgaacaacaagtttaataatttcataaagaatcaggataccgtgattgacttgggaatttccttccagatatacgttctgcaggctggcgcatggccactcacacaggctccgtcaagcacttttgctatcccacaggaacttgaaaagtctgtgcagatgttcgagctattctactctcagcatttctctggtcgaaagctaacctggctccactacctttgcacaggcgaggtgaaaatgaactatttgggcaagccttatgtggccatggtcacaacctaccagatggccgtgctactggcatttaataatagcgagacagtttcctacaaagaactgcaagactctacccagatgaatgagaaggaactgactaagaccattaaatctctcctggacgtgaaaatgatcaaccatgactccgagaaagaggatatcgatgccgagtccagcttttctctgaacatgaatttctcgtctaagaggaccaaattcaagatcacaacctcgatgcaaaaggacactccacaagagatggagcaaactagatcagctgtggacgaggacaggaaaatgtatttgcaagctgccatcgttagaatcatgaaggcgagaaaggtgttgcgccacaatgcattaatacaggaggtaatatcccagtcccgggcaagatttaaccccagcatctctatgatcaagaaatgcatagaggttctcattgacaaacagtacatagagagatcccaggcgtcagcggatgaatattcttatgtggcctag

SEQ ID NO: 28144 - DNA, 2238 bp, synthetic construct
  misc_feature 1..2238: note = Description of Artificial Sequence: Synthetic coding sequence
  source 1..2238: mol_type = other DNA
atgagtctgaaaccaagagtagtcgattttgatgaaacatggaataaactgctgacaactataaaggcagtggttatgctcgaatatgtggaacgggctacctggaacgacaggttctcggacatctatgccctgtgcgtagcttaccccgagccactaggggagaggctgtacacggagacaaagattttcctggaaaatcacgtgaggcacctccataaacgtgtgcttgaatccgaagagcaggtattggtgatgtaccacagatactgggaggagtactccaaaggcgcagattatatggactgtctctatcgctacctgaacacccagtttataaaaaaaaacaaactgaccgaggcggatctgcagtatggatatggaggagtggacatgaacgaaccgctcatggagattggcgagctggccttggacatgtggcgtaagctgatggtagaaccattacaggccattctcatcaggatgctgctgagagagattaaaaatgatcgagggggagaagacccaaaccaaaaggtgatccacggagtgatcaacagctttgtccatgttgaacagtacaagaaaaagttccctctaaaattttatcaggagattttcgaatcaccatttctcacagagactggcgagtattacaagcaagaagcaagtaatctgcttcaggagtcaaattgttctcaatatatggagaaggtgctgggtcgactgaaggacgaagagattcgctgcaggaaatatctgcacccttccagctatacgaaagtgatacacgaatgtcaacagaggatggtggccgatcacctccagtttcttcatgcagaatgccataatatcatccggcaggaaaaaaaaaacgacatggcaaatatgtacgtcctcctcagggctgtctccacaggacttcctcacatgatccaggagttgcagaaccatattcatgatgagggtcttagagccacgtctaacttaactcaggagaacatgcctacattgttcgtcgagtcggtgttggaggtccatggcaaatttgtgcagctgatcaacacggtgcttaatggtgaccaacacttcatgagtgcattagacaaggctctgacaagcgtcgtcaactacagagagccgaaatcagtctgcaaagcacctgagcttctggcaaaatattgtgacaacttactgaaaaaaagcgccaagggaatgactgagaacgaagtcgaggacagactgacctcctttatcactgtgttcaaatacatcgacgataaggatgtattccaaaagttctacgcacgaatgctcgccaagcgccttattcacggtttgagcatgtcaatggattccgaagaggccatgatcaataagctaaagcaggcttgcggctacgaattcacctcaaagctgcataggatgtatactgatatgtccgttagtgctgacctgaacaataagtttaacaatttcattaagaaccaagacacagtaatcgaccttggaatttcattccagatatatgtcctgcaggctggcgcttggccacttacccaggcgccaagcagcacctttgccataccgcaggagctggagaagtccgttcagatgttcgaactcttctacagccagcatttcagcggaagaaagctaacatggctccattacctctgtaccggcgaagtgaaaatgaactacttagggaaaccatatgtggcaatggtgacaacctatcagatggctgtgctgctggcattcaataatagcgagacagtatcctataaggagttgcaggactctacacagatgaacgagaaagaactgacgaaaactatcaagtctctgctggacgtgaaaatgatcaaccacgattctgaaaaagaagatattgacgctgaaagcagcttttctctgaacatgaatttcagttcaaaacggaccaagtttaagatcaccacctcaatgcagaaggataccccgcaggagatggaacaaaccaggtccgcagttgatgaggatcgcaagatgtatctgcaggccgcaatagtgaggattatgaaggcacggaaagttttgaggcataatgcactcattcaggaagttatttcccaatcccgggctaggttcaatccttcaattagtatgataaaaaagtgtattgaagttctgatcgataaacagtatattgagcgatcccaggcaagcgcggatgagtatagttacgtagcgtag

SEQ ID NO: 28145 - DNA, 2238 bp, synthetic construct
  misc_feature 1..2238: note = Description of Artificial Sequence: Synthetic coding sequence
  source 1..2238: mol_type = other DNA
atgtctctcaagccgcgtgtcgtggactttgacgagacctggaacaagttactgacgacgattaaagctgttgtgatgctggagtatgtggagcgggcaacttggaacgatcgattctctgacatttacgcattatgtgtggcctatcctgagcccctcggcgaaaggctctataccgaaacaaaaattttcctggagaatcatgtgcgtcatcttcacaaacgagtcctggaatctgaagaacaggtcctcgtgatgtaccaccgttattgggaggagtatagcaaaggcgctgattacatggactgcctgtatcgatacttgaatacccagttcatcaagaaaaataagctcacggaggctgatctacagtacggctatgggggtgttgacatgaacgaacccctgatggaaatcggtgaactggcgctggatatgtggagaaaactgatggtcgaaccactccaagcaatcctgatccgtatgctactacgggagataaagaacgaccggggaggcgaagaccccaatcagaaagtgattcacggagtgattaacagtttcgtccatgtcgagcagtataaaaagaagtttccactgaagttctatcaagagatcttcgagtccccctttttgacagagacaggcgaatattacaagcaggaggcgagtaatctgcttcaggagagcaactgttcccagtacatggagaaggtgttggggagactgaaggacgaggaaatccgttgccggaaatacctccacccgtcttcttatactaaggttattcatgagtgccagcaaagaatggttgccgaccacctccagtttctgcacgcagagtgccacaacataatccgacaggagaagaagaacgatatggccaatatgtacgtgttactccgagcggtctccaccgggctgcctcatatgatacaggagctgcagaatcacatccacgacgagggcttaagggccacttcgaatttaacacaggaaaacatgccaaccctctttgtggagtctgttttggaggtccatggtaaattcgttcaactcatcaatacagtgctcaatggggatcagcattttatgagtgctctcgacaaggctctcacatctgttgttaactacagggagcccaagagcgtgtgtaaggcccctgaactcctcgcaaaatactgcgacaatctacttaagaagtctgcgaagggcatgacagagaacgaagtagaagatagacttactagctttatcacagtatttaagtacatcgacgataaggatgtgttccagaagttctatgccagaatgctcgcaaaacgcctcattcacggcctgtctatgtctatggattctgaggaggcaatgattaacaagctgaaacaggcctgcggttatgagttcacaagcaagcttcaccgcatgtacactgatatgtctgtgagcgccgacctgaacaacaaattcaataattttatcaaaaaccaggatacggtgatcgacctcggcatttcgtttcagatatacgtgctacaggcaggcgcttggccactgacacaggcaccaagctcaacgttcgcaatcccccaagaattggaaaaatccgtccagatgtttgagttgttctactcccagcatttctctggacgtaaactaacctggctgcactatctgtgtacaggagaagtgaagatgaactatttaggcaagccatacgtagccatggtcaccacttaccagatggccgtacttctcgcctttaacaactccgagacagtctcttataaagaactgcaggatagcacccagatgaacgaaaaggagctcacaaagaccattaaatctttgctggacgtgaaaatgatcaaccatgattctgagaaagaggacatcgacgctgaatcgtcattctctctcaacatgaatttctcttccaaacggacaaaattcaagatcactacgtcaatgcagaaagataccccacaagagatggagcagacaaggtctgcagtggacgaagacaggaaaatgtacctccaggctgcaatcgtgcgaatcatgaaagctcggaaggtcctgcgtcataacgccctgatccaagaagtcatttctcagtccagggctcgcttcaacccttctatctccatgattaaaaagtgtattgaggtgctgatcgacaaacagtacatagaaaggagccaggcttcagcagacgagtattcatacgttgcttag

SEQ ID NO: 28146 - DNA, 2067 bp, synthetic construct
  misc_feature 1..2067: note = Description of Artificial Sequence: Synthetic coding sequence
  source 1..2067: mol_type = other DNA
atgctgtatgtttggccaatcctgaatcctctcgaaaaggatttcatccagaaactcaggttcttctggaagatcatgtttggcatatgcatcaggtactgggaagagtactctaaaggcgctgattatatggactgcttatacaggtatctgaatactcagttcataaaaaagaataaactgactgaggccgacctgcagtatggatacggcggtgtggacatgaacgaacctctcatggagatcggcgaactggccctggacatgtggcggaaacttatggtggaacctttgcaggcaatcctcattaggatgttgttgcgcgaaatcaagaatgatcgcggaggtgaggatcccaaccagaaggtgatccacggcgtcatcaactcattcgtccacgtggagcagtacaaaaaaaagttcccgctgaaattctatcaggaaatctttgaatcaccttttctgactgagaccggggagtactacaagcaagaagctagtaacctgctccaagagtcaaattgtagccagtacatggagaaggtcctggggaggctcaaagatgaggaaattcgttgccggaaatacctgcacccaagtagttataccaaagtgatccacgaatgccagcagaggatggtggctgaccatttacagttccttcacgccgagtgccacaacataattaggcaagagaaaaagaacgacatggccaatatgtacgttttactgagagccgtcagtaccggtctgccccatatgatccaggagctgcagaaccatattcatgatgaaggtctgcgcgctacttctaacctcactcaagagaatatgccgacacttttcgtcgagagcgtgcttgaagtgcacggcaagttcgtccagcttatcaatacggtgcttaacggcgaccagcactttatgtccgccttagataaagccctgaccagtgtcgtgaactaccgggaaccaaagagcgtctgcaaagcacctgaactgctcgctaaatactgcgacaatctgttgaagaaatccgcgaaaggtatgacagagaacgaagtggaagacagacttacttccttcattacagtttttaaatacattgacgacaaggatgtttttcaaaagttctacgctcgcatgttggctaaacgactgatccacggcctgtcgatgagcatggattcagaagaagcaatgatcaataagttaaaacaggcatgcggatacgagttcacttcaaagctacacagaatgtacacagacatgtcagtgagcgctgacctgaataacaagtttaataatttcatcaagaaccaagatacagtgatcgatctcggtatctcttttcagatttatgtgctgcaggcaggcgcatggcccctcacacaggcccctagtagtaccttcgcgattcctcaagagctggaaaagagtgtgcagatgttcgagctcttctacagccagcatttcagcggtagaaagcttacttggctccattacctctgtaccggagaggtgaagatgaactatctggggaagccctacgtggccatggttacaacatatcaaatggcggtgctcctcgccttcaataattcggagaccgtttcctataaggaactgcaggatagcacccaaatgaacgaaaaggaactgactaagactataaaatccttactcgacgtaaagatgatcaaccacgactcagagaaagaggacattgatgctgagtcttctttcagcctgaacatgaatttctcttctaaacggactaagttcaagatcacaacatctatgcaaaaggataccccacaggagatggagcaaactaggtccgcagttgacgaagaccggaaaatgtacctgcaggcggctatagtgaggatcatgaaagcgagaaaggtgctccggcataatgccctaatccaggaggtgatcagccagtcacgggctaggttcaatccatctatctctatgatcaagaagtgtatcgaggtactgattgataaacaatatattgagcgtagtcaggcgtccgcggacgagtactcttacgtagcctag

SEQ ID NO: 28147 - DNA, 651 bp, synthetic construct
  misc_feature 1..651: note = Description of Artificial Sequence: Synthetic coding sequence
  source 1..651: mol_type = other DNA
atgagtttgaagccaagagtggttgactttgacgagacttggaacaagctgctgaccactatcaaggctgtagtaatgctggaatacgtcgaacgtgccacctggaacgatcgcttctcagacatctatgcactatgcgttgcatacccagagcctctgggggaacggctttatacagagactaaaattttcctcgaaaatcatgtgcgacatctccacaaaagggttcttgagtccgaggagcaggttctggtgatgtatcaccgctactgggaagagtactctaagggcgcagattatatggactgtctctatcgctacttaaatacccagttcatcaagaagaataaactgaccgaggctgaccttcagtacggatacggtggggtagacatgaacgagcctctgatggagataggcgaactcgcactagacatgtggcggaagctgatggttgagcctcttcaggccattcttattcggatgttactgcgcgaaatcaaaaacgataggggtggggaggatcctaaccagaaagtgatccatggcgtcatcaattcctttgtgcatgttgaacagtataaaaagaagtttccacttaaattttaccaggaaatattcgaaagtccgtttctcaccgagacaggctag

SEQ ID NO: 28148 - DNA, 2295 bp, synthetic construct
  misc_feature 1..2295: note = Description of Artificial Sequence: Synthetic coding sequence
  source 1..2295: mol_type = other DNA
atgtatcgggttacatggtcgaccttttggctgcgtttccagcattatacctgtaccatgagcctgaagccccgagttgtcgatttcgacgagacatggaacaagctcctgacaactattaaggcagtggtgatgttggaatacgtggagagagctacctggaacgatcggttcagtgacatctacgctctgtgtgtcgcataccccgagccgctgggcgagcgcctttataccgaaaccaagatttttctggagaaccatgtgcgccacctccataagcgcgtgctggagagtgaggaacaggtgttagtcatgtaccataggtattgggaagagtattccaagggagctgactatatggactgtctttaccggtacttaaacacgcagtttattaagaagaataaactgacggaagccgacctgcagtacggttatggtggcgtcgatatgaacgagcccttgatggagattggcgaactcgctctagatatgtggagaaagctcatggtggagcccctgcaggcgatcttgattcggatgctcttacgcgagataaaaaatgatagggggggtgaggatccgaaccagaaggtgatccacggtgtgatcaatagctttgtacacgtcgaacagtataagaagaagtttccactgaagttctatcaggagatattcgaaagtccatttctgaccgaaacgggtgagtactacaagcaagaagcttctaatctacttcaggagtctaattgttcccagtatatggagaaagtgctcgggaggctcaaggacgaagagattcgatgccggaagtatctgcaccccagttcatacactaaggtgatccacgagtgccagcagaggatggtagccgaccatctgcaattccttcacgctgagtgccataatataatcagacaagaaaaaaagaatgacatggctaacatgtatgtgctgcttcgggcagtatcaacagggctcccccacatgatccaggagctgcaaaatcatatccatgacgaaggcctgagggccaccagtaatctaactcaagaaaatatgccaaccctgttcgtggagtctgttctcgaggtacatggcaagtttgtgcagctgattaacactgtgttgaatggagatcagcactttatgagtgctctggacaaggctcttactagtgtggtaaattacagggaaccaaaatcggtgtgtaaggcccctgaattactggctaagtactgtgacaatctgctcaaaaagagcgctaagggaatgaccgagaacgaagtggaagacaggctgactagttttatcacagtgtttaagtatattgacgacaaggatgtgtttcagaaattttacgctcggatgctcgctaaacgactcatccacggattatcaatgtccatggacagtgaagaggctatgattaacaagttgaagcaggcttgtggatatgaattcacttctaagctacaccgtatgtacactgatatgtcagtgtccgctgatttgaacaataagttcaataacttcattaaaaatcaggatacagtcatcgacttgggcatctcttttcaaatctacgtcttacaggctggggcttggccattaacacaggccccatcatctacctttgccatccctcaagagctcgagaaatcagttcagatgttcgaattattttattcacagcattttagtgggcgtaaactgacatggttgcattacctctgtacaggtgaggtgaaaatgaattatcttggtaaaccatacgtagccatggtgacgacttatcaaatggcggtgctcttggcctttaataattccgaaacagtctcatataaagagctccaagactcaacccagatgaacgagaaggaacttacaaagactattaaatcactcctggacgtcaaaatgatcaaccacgactcggaaaaggaggatatagacgccgagtcgagtttcagcctcaacatgaatttcagttcgaagcgaaccaagttcaaaattacaaccagtatgcagaaagataccccacaagagatggagcagactcggagcgctgtcgatgaggacaggaaaatgtatttacaggctgctatcgtgagaattatgaaggcccgaaaggtcctccgacacaacgcgttaattcaggaagttatcagtcagtcaagagctcgatttaaccccagcatcagcatgattaagaagtgcatcgaagtcctgattgacaaacagtatatagagcggagccaggcgagtgccgatgagtattcctatgtcgcgtag

SEQ ID NO: 28149 - DNA, 2307 bp, synthetic construct
  misc_feature 1..2307: note = Description of Artificial Sequence: Synthetic coding sequence
  source 1..2307: mol_type = other DNA
atgtcaaacctttcgaaaggaaccggttcccggaaggacacgaagatgaggatcagagcctttcctatgacgatggatgaaaagtatgtcaattcgatttgggatctgctcaagaacgccatacaagagattcaaagaaagaacaactccggcttgtcattcgaagaactataccgaaatgcatacaccatggtgctacataagcatggggagaagctatataccgggttaagagaggtcgtaaccgaacatttgattaacaaagtgcgggaggacgtgttaaacagccttaacaataactttcttcagacgcttaaccaggcctggaatgaccaccagactgccatggtgatgattagggacatcctgatgtacatggacagggtctacgttcagcagaacaacgttgaaaatgtctacaatctcggtttaattatctttcgggatcaggtagtacgctatggctgtatccgcgaccatctgcggcagaccctcttggacatgatcgccagggagcgcaaaggtgaggtggtcgaccgaggagcgatccgcaatgcttgccagatgctgatgatactgggccttgaaggcaggagcgtatatgaagaggactttgaagcaccatttctcgaaatgtcggccgaattctttcagatggagtcgcagaagtttttagccgagaattctgccagcgtgtatatcaaaaaggtggaagctcgtatcaatgaggaaatagagcgggtcatgcattgtctcgacaagtcgaccgaagaaccgatcgttaaggtcgtggagcgtgagctcatttctaaacacatgaaaacgatcgtcgagatggagaacagcggcctagtccacatgctcaagaacggaaaaactgaagatctgggctgtatgtacaagctcttctcacgagtccctaatgggctgaaaactatgtgtgaatgcatgtcctcatacctgagggagcagggaaaggccctggtgtctgaggagggggaagggaagaatcctgtcgattatatacagggacttttggacctcaagtctcgtttcgaccgattcctgttggaatcctttaacaatgaccgcttgtttaaacagacgatcgccggagactttgagtactttcttaatctgaacagccgttcgcctgaatacctgtctcttttcattgatgacaagttaaaaaagggcgtaaagggacttacggagcaagaggttgagacaatactcgacaaggctatggtgctgttcaggtttatgcaagagaaggatgtgtttgaaagatactataagcagcatctggctcggagactcttaaccaataagtctgtgtctgatgacagcgaaaaaaacatgatctcaaaactgaagacagaatgtggctgccaattcacctccaagctggaaggaatgttcagagacatgagcatctctaacaccaccatggatgagtttcgccagcatttgcaggccaccggggtgagcctggggggagtggacctgactgtccgtgtattgacaaccggatattggcctacacagagcgctactccaaaatgtaacatcccacccgctcctagacatgcctttgagattttcagaagattttatctagcaaagcacagcgggcgacagctcactctgcagcatcatatgggcagcgcagatctgaatgcaacgttttatggcccagtgaagaaggaggatgggtctgaggtgggggtcggaggcgcacaagtaaccggttccaacaccaggaagcacattctgcaagtgtccactttccaaatgaccatcttgatgctgtttaataacagggagaagtataccttcgaggaaattcagcaggagacagatatcccagaacgggagcttgtaagggcacttcagtcacttgcctgtgggaagccaacacaaagggtcctcacgaaagaacccaagtcgaaggaaatagagaacggtcatattttcactgtcaatgatcaatttacttctaaattgcatcgggtgaagattcagaccgtggcagccaagcagggagaatcagatccagaaagaaaggaaacgagacagaaggtggacgatgatagaaagcacgagattgaggccgctatcgttcgtataatgaaatcccgaaaaaagatgcaacataatgtgctcgtggccgaagttacgcagcagttgaaggccagattcttaccctctccagttgtcataaaaaagaggatcgaggggcttatcgagcgggagtatcttgccagaactcccgaggacaggaaagtctacacctacgttgcatag

SEQ ID NO: 28150 - DNA, 2109 bp, synthetic construct
  misc_feature 1..2109: note = Description of Artificial Sequence: Synthetic coding sequence
  source 1..2109: mol_type = other DNA
atgagtaatttgagtaaggggactggcagcaggaaagacactaagatgagaattagggcgttccccgttagggaggacgttctgaattcactgaacaacaactttctgcagacgctaaaccaagcgtggaacgaccatcagactgccatggtaatgatcagagacattcttatgtacatggatagagtgtatgttcagcagaacaacgtggagaatgtgtataaccttggcctcatcatttttcgagaccaggtggtccggtacggctgcatccgagatcacctccggcagaccctacttgacatgatcgctcgcgaaagaaagggtgaggtggttgacaggggggcaattcggaacgcctgccagatgctgatgatcctcggccttgaaggtagatccgtttatgaggaggactttgaagcgccttttctggagatgtccgcagagttttttcagatggagtcacagaagttcttggccgagaatagcgcctctgtgtacatcaaaaaagtggaggccaggatcaatgaggaaatcgaacgcgtgatgcactgtctggacaagtctacagaggagcccatcgtcaaagttgttgagcgggaactgatctctaagcatatgaaaacaatagtggagatggaaaactctggcctggtgcatatgctgaagaacgggaagacggaagacctgggttgcatgtacaagctcttttctcgggtccccaatggcctgaagacaatgtgcgagtgcatgagctcatatcttcgcgaacaggggaaggccctcgtatccgaggagggcgaaggtaaaaaccccgttgattatatccaagggttgctggacctaaaaagccgctttgacaggtttctgctggaaagcttcaacaatgaccgcttgtttaaacagactattgcaggcgacttcgagtattttcttaacttgaactcgcgttcccccgaatacttatcactcttcatcgatgataaactgaaaaaaggcgtcaagggactgactgaacaggaggtggagacaatcctggataaagcgatggtactattccgcttcatgcaggagaaggatgtttttgagagatactataaacagcacttggctaggcgccttttgacaaataaatctgttagcgatgacagtgagaagaatatgatttccaagctgaagacagaatgcggctgccagtttacaagtaaattggaagggatgtttagggatatgagcatatcaaacactaccatggacgagttccgccagcatcttcaagccactggcgtgtccctgggtggcgtggacctgactgtgagagtgctgacaactggctactggcccacacaatcagctaccccaaaatgtaacattccaccggctcctagacatgcgtttgagatttttcgacggttttatctcgcaaaacactctgggaggcagctgacccttcaacatcacatgggctccgctgacttgaacgctaccttttacgggcctgttaagaaagaggatgggagcgaagtgggtgttggcggtgcccaagtaaccgggagcaacacaagaaagcacattctgcaagtctccacttttcagatgacaatattgatgctttttaacaatcgcgagaagtacacttttgaagaaatacagcaggagacagatatccccgaacgagagctagtcagggccttgcagtcactggcgtgcgggaagcctacacaacgcgtactgacaaaagagccaaaatctaaggagatcgagaatggacatatcttcacagttaacgatcagtttacctccaagttgcaccgtgtgaagatccagaccgtcgctgctaagcagggcgaatcggaccccgagcgtaaggaaacaagacaaaaagtggacgacgaccgcaagcacgaaatcgaagcagcaatcgtgaggatcatgaagtcccgtaaaaaaatgcaacacaacgtgctcgtggccgaggtgacacagcagctgaaggcgaggtttctgccctctcccgttgtcatcaagaaaaggatcgaggggctgatagagcgtgaatatttggccagaacaccagaggatagaaaggtgtatacatacgtggcctag

SEQ ID NO: 28151 - DNA, 2235 bp, synthetic construct
  misc_feature 1..2235: note = Description of Artificial Sequence: Synthetic coding sequence
  source 1..2235: mol_type = other DNA
atggatgaaaaatatgtcaattccatctgggatttgctcaaaaatgccattcaggagatacagagaaaaaataattccggcctgtcattcgaggaactctatcggaacgcctataccatggtgctgcacaagcatggcgagaaactatacacaggcttgagggaagtggttacagagcacctgatcaacaaggtacgggaggatgtcctcaacagtttgaacaacaatttcctgcaaaccctgaatcaggcttggaacgatcaccagactgctatggtgatgatcagagatattctgatgtatatggacagagtttatgtccaacaaaacaatgttgaaaacgtctataatcttgggctgattatattccgagatcaggtcgttcggtatgggtgtatacgcgatcatctgcggcagactttgttagatatgattgcaagagaacgcaagggtgaggtcgtggatcgaggcgcaattcgcaacgcttgccagatgctaatgatcttgggtctggagggacggtctgtgtacgaggaggacttcgaagccccttttttagagatgtcagcagaattttttcagatggaatctcaaaagttcctcgctgagaactctgcgtccgtatatattaagaaggtggaagccaggataaacgaagaaatcgagagagtcatgcattgcctggacaaatctacagaggagccaatagtgaaggtggttgaacgtgagctgatttcgaagcacatgaaaaccatcgtggagatggagaatagcggacttgtgcacatgcttaagaacggaaagaccgaggacttgggctgcatgtataagttgttctcaagggtgccgaacgggttgaaaactatgtgtgagtgtatgtcctcgtacctccgcgagcagggaaaggcccttgtcagcgaggagggagaggggaagaaccccgtcgactacatccaagggctcttagacctgaagagccgcttcgataggttcctactcgagagttttaacaacgatcgactgttcaagcaaactatcgccggtgactttgaatactttttgaacctcaactcaagatccccagaatatcttagtttgttcattgacgacaagttgaagaagggtgtgaagggcctgaccgaacaggaagtcgagaccattctggacaaagccatggtgttgtttagattcatgcaggaaaaggacgtgtttgagaggtattacaagcagcacctggcccgaagactactaacaaataagtcagtgtctgatgactccgaaaagaatatgatcagtaagctgaagaccgaatgcgggtgccagttcacctctaagttggagggtatgttcagggatatgagtattagtaacacaaccatggacgagttccgccagcatttacaggccaccggcgtgtctctaggaggcgtcgacctcaccgttagggtcctgacaacaggctattggccgacccagtccgctacacctaaatgcaacatcccacccgcacccaggcatgccttcgagattttccgccgattttacctggccaagcatagtggcaggcaactgacactgcagcaccacatgggttccgccgaccttaacgctactttctacggtccggtgaagaaagaagatggatcggaagtaggtgtcgggggagcccaggtaaccggatctaacacccgcaagcatattctgcaggttagcacttttcagatgactatcctcatgttgtttaataatcgggagaagtacacgtttgaagagatccagcaagaaactgatattcctgaaagagagctggtgcgtgcactacagtccctcgcctgtgggaagccaactcagcgcgtgttaaccaaagagcctaagtccaaggagatcgagaatggacacatctttactgttaatgaccagttcacaagcaaactgcaccgcgtcaaaattcaaacagtggccgcaaaacagggcgagagcgaccctgagagaaaggagacaaggcagaaagtagacgatgatcggaagcacgaaatcgaggccgcaatagtgcggatcatgaaatcgcggaagaagatgcagcacaacgtgctcgttgcggaagtgacacagcagctcaaggctagattcctgcctagcccagtggtgattaagaagcgaattgaggggctcatagagcgagagtacttggcgagaacaccagaagaccgcaaagtgtatacctatgtcgcttag

SEQ ID NO: 28152 - DNA, 2235 bp, synthetic construct
  misc_feature 1..2235: note = Description of Artificial Sequence: Synthetic coding sequence
  source 1..2235: mol_type = other DNA
atggacgaaaagtatgttaacagcatctgggatcttctcaaaaacgccattcaagaaattcagagaaagaacaactcaggactctcctttgaggagctctaccgaaatgcgtacacaatggttcttcataaacatggtgaaaaactgtacactggactgagggaagtggtcactgagcacctgattaacaaggtgcgagaagatgtcctgaattctctgaataataacttcttacagacactgaaccaagcttggaacgaccatcagacagcaatggtcatgattcgtgacatcctgatgtacatggatcgcgtttacgtgcaacagaacaatgtggagaatgtctacaaccttggccttatcatattccgtgaccaagtcgttaggtacggctgcatccgagatcatctgcggcaaacactgctggacatgatcgctagagaaagaaaaggggaagttgtcgaccgcggagccatccgtaacgcgtgccagatgctcatgatcctaggcctagaggggagatctgtgtatgaagaagatttcgaggccccattcttggaaatgtcggccgagtttttccaaatggaaagtcagaagttcctggccgagaactcagcaagcgtttatataaagaaggtagaggcaagaattaatgaggaaatagagcgggtgatgcactgcttggacaagagcacagaagaacctatagtgaaggttgtggagcgcgaactgatcagtaaacacatgaaaaccattgtggagatggagaatagcggcctggtccacatgctcaagaacggcaagaccgaggacctgggctgtatgtataaactcttttctcgggtaccaaacggcctcaaaactatgtgtgagtgcatgtccagctatctcagagagcaaggcaaagctctggtgtcagaagagggcgaggggaagaaccccgtggattatatacagggattacttgacctcaagagtagattcgataggttcctcctggagagctttaacaatgacaggctttttaagcagacgatcgcgggagacttcgagtactttctcaacctgaatagtaggagccctgagtacctaagtctctttatcgatgacaagctgaaaaaaggtgttaaaggacttactgagcaggaggtcgagaccattctcgacaaagccatggtcctctttaggttcatgcaagagaaggatgtcttcgaacgatattataagcaacacctggcccgacggctgctgaccaacaaatcggtttctgacgacagtgagaagaacatgatctcaaagctcaaaactgagtgtggctgccagtttacgtccaagcttgagggaatgttcagagacatgtccatttctaatacgactatggacgagttcagacaacacctccaggctaccggagtgagcctgggcggtgtcgacctgactgtacgggttctgactaccggatactggcccacccagtccgcgactccaaaatgtaatataccccctgccccaagacacgcctttgagatttttagaaggttttaccttgccaagcactccggcaggcagctaactctgcagcaccacatgggttctgccgatctgaacgccaccttctatgggccagtcaagaaggaagacggctccgaggtgggggttgggggagcccaggttaccggatcaaatacccgcaaacacatactccaggtgagcacgttccaaatgaccattttaatgctctttaacaatcgcgaaaaatatacatttgaggaaatacaacaggagacagacatccctgagcgggaactggttcgcgcactccagtccctggcatgcggtaagccgacccagagagtgttaaccaaagagccaaagtctaaggaaatagagaacggccacatctttactgtgaatgatcagtttaccagcaagctgcacagagtgaagattcaaaccgtggctgcgaagcaaggagaatctgacccggagcggaaggagacccggcaaaaggtggatgacgacagaaaacacgaaatcgaagccgctattgtacgaattatgaaatctaggaaaaaaatgcaacataacgtattggtggcagaggtgacccagcagctaaaggcacgcttccttcccagccccgtggtaataaaaaaacgcattgagggcctcatagaaagagagtacctcgcaagaactccggaagatcgaaaagtgtacacgtacgtagcttag

SEQ ID NO: 28153 - DNA, 1398 bp, synthetic construct
  misc_feature 1..1398: note = Description of Artificial Sequence: Synthetic coding sequence
  source 1..1398: mol_type = other DNA
atggaaaccggcttccccgcaattatgtacccgggaagctttatcggaggctggggcgaggagtacctaagttgggagggacccggacttcccgactttgtgttccagcaacagcctgtcgaatcggaggccatgcattgctcaaaccctaaaagcggagtcgtcctggcaacagttgcaagagggcctgacgcctgccaaattcttaccagggcgcctctgggacaggatccaccgcagcggaccgtgctggggctcctcaccgcgaatggacagtaccgccgtacttgtgggcagggaattaccagaatccggtgctactcgggcagtgagaatgcttttcctcctgctgggaagaaagctctgcccgactgtggagtgcaagaaccgcctaagcaggggttcgatatctacatggacgagctggagcagggggatcgggatagctgctctgttcgagaaggtatggcgtttgaagatgtctacgaagtggacactgggacactgaagagcgatctccattttctcctggattttaatactgtgagtccaatgctggtggattcatcactcctatctcagtccgaggacatcagcagtttaggcaccgacgtgatcaatgtcacagagtacgcagaggaaatctatcagtacctgcgcgaggccgagattcgccacagacctaaagcccattacatgaagaagcagccggacataaccgaaggcatgaggactatccttgttgattggctcgtggaggtgggtgaggaatataaattacgagctgaaactctgtatcttgccgtcaacttcctcgacaggttcctcagctgcatgtctgtactgagaggaaaactgcagctggtaggaactgccgcaatgctgctggcatcgaagtacgaggagatctacccacctgaagtggacgagttcgtatacatcactgatgatacatacacgaaaagacaactcctcaagatggagcacttactgttgaaggtcctggctttcgacctgacggttccaacgaccaaccagtttttactgcaatatcttaggcgacagggcgtctgtgttcgcacagaaaatctcgccaaatacgtcgctgagttatcactcctagaggccgacccttttctgaagtatctgccaagcctgatcgctgcggctgctttctgtctggctaactacacagtcaacaagcacttttggccagaaactctggcagcgttcaccggctatagcctgtcagaaattgtgccctgcctgtctgaattacacaaggcctacctagatattccgcacagaccccagcaagcaattcgggaaaaatacaaagcctccaaatacttgtgcgtatcactaatggaaccacccgcagtcctgttgctgcagtag

SEQ ID NO: 28154 - DNA, 1395 bp, synthetic construct
  misc_feature 1..1395: note = Description of Artificial Sequence: Synthetic coding sequence
  source 1..1395: mol_type = other DNA
atggagactggcttcccagccataatgtatccaggctcattcatcgggggatggggtgaagagtatctatcatgggaaggccctggactgcctgactttgtattccagcaaccagtggagtccgaagcgatgcactgttccaatcccaagagcggggttgtcctggcaactgtagctcgcggacctgatgcttgccagatactgaccagggccccacttggccaggatcccccacaacggaccgtgttggggttgcttacagctaatggtcagtaccgcagaacatgcggtcagggcattacccgcattaggtgctatagcgggtcagagaatgcattcccaccggcaggaaaaaaggccctccctgactgcggtgttcaagagcccccaaagcagggcttcgacatctacatggatgaactggaacaaggggacagagacagttgctctgttcgagaagggatggcattcgaagatgtttacgaagtagacaccggcaccctaaagagtgatctacacttcctgctggacttcaataccgtgagccctatgctcgtggatagctccttgctgtcacaatcggaggatatcagctcactcggcacagatgtcataaatgttacagagtatgcagaggaaatttaccagtatcttagggaggccgaaatccgacatcggcctaaggctcactacatgaagaagcaacctgacataactgagggcatgcgcacaatcctcgtggattggttggttgaggtgggagaagagtataagcttcgtgcagaaactctctacttggcagtgaactttctggacaggtttctgagttgcatgtctgtgctcagggggaaattacaattggtcggcaccgcagccatgctcctggccagcaaatatgaggaaatctatcctcccgaagtcgacgagtttgtgtatataacagacgacacctacacaaaacgccagctgctgaagatggaacatctgcttctgaaggtcctggccttcgacctcacagtgccgaccacgaaccagttcttactgcagtacctaagacgccaaggggtgtgcgtgaggactgagaatttggcgaagtatgtggccgagctgtcactattggaggccgaccccttcctcaaatacctgccatccctaattgccgcagccgctttttgtttggcaaactatacggttaacaaacacttttggcctgaaacactcgctgctttcacgggctattcactgagcgaaattgtgccatgtctctccgaactacataaagcttaccttgatatcccccatcgtccccagcaggcaatacgcgagaaatacaaggcttccaagtacctctgcgtgagcctgatggagccccctgcagttctcctgctgcagtag

SEQ ID NO: 28155 - DNA, 1266 bp, synthetic construct
  misc_feature 1..1266: note = Description of Artificial Sequence: Synthetic coding sequence
  source 1..1266: mol_type = other DNA
atgcattgttccaacccaaaatccggggtggtcctcgcaacagttgctcgcggtccagatgcctgccagattctcacgcgagcacctctgggccaggacccacctcagcggactgtcctcggtctgctcactgcgaatggacaatataggaggacttgcggtcaagggatcacccgcattagatgttacagcgggagcgaaaacgcctttcccccagcaggcaaaaaggcactgccagattgcggtgtgcaggaacccccaaaacaggggtttgatatatatatggacgagctggaacagggagaccgggactcatgctctgttcgcgagggaatggcattcgaagacgtgtacgaggtagacacaggaactctgaaatcagatcttcattttttactggactttaatacagtctcgcctatgctggtcgactccagcctgcttagccagtcagaagacatctcgagtctggggaccgacgttatcaacgtcacagagtatgctgaggagatttaccagtacctgagggaagccgaaatccgacaccggccaaaggcccactacatgaagaaacagccagacattacagaggggatgcgtacaatcctggtggactggctggtggaagtgggtgaggagtacaagctccgggctgagacactgtatttggccgtcaattttctggataggtttctgtcttgtatgtctgttttaagaggcaaattgcagctggttggaaccgcggctatgctgctggcatctaagtacgaagaaatatatccaccggaggtcgacgaatttgtttatatcacggacgacacctatactaagcgacagctgttaaaaatggagcacctcttgctcaaggtcctggcttttgatctgactgtccctacaactaatcaatttttgctgcagtacctgcgtcggcagggggtttgcgtgcgcaccgagaacctggccaagtacgtagctgagctgtctctgctggaagccgatccatttctcaagtatcttccgtccctgatcgccgctgctgcattctgcctggcaaactatacggtgaataagcatttctggcctgaaactttggcagccttcacaggatactccctaagtgagatcgtgccttgcctgtccgagctgcacaaggcctacctcgacatccctcaccggcctcagcaagccatacgagaaaaatataaagcctccaaatacttgtgcgttagcctgatggaacccccagctgttctgctgctgcagtag

SEQ ID NO: 28156 - DNA, 1266 bp, synthetic construct
  misc_feature 1..1266: note = Description of Artificial Sequence: Synthetic coding sequence
  source 1..1266: mol_type = other DNA
atgcactgctcaaaccctaagagcggcgtggtcctggccacagttgctcggggtcctgacgcctgccagattttgacgcgagcccctctgggccaggacccccctcagagaaccgttcttggcctgctcactgccaacggacagtataggaggacatgtgggcagggtattacgcgaatcagatgctactcagggtctgagaatgcattccccccagccggaaaaaaggccctccccgactgtggggtgcaggagccaccaaagcaagggtttgacatctacatggacgagctcgagcagggcgacagagatagttgcagcgttcgggagggaatggccttcgaagacgtctatgaagtggacactggcaccctgaagtcagacctccactttctgcttgattttaacactgtctcgccgatgttagtagacagctctttattgtcacaaagcgaggacatctcttctcttgggacagatgtcattaatgtgactgaatacgcggaggaaatttatcagtaccttagggaagcggaaattaggcatagacccaaagcacactatatgaaaaagcagcccgacattaccgaagggatgaggacgatcctcgtggactggcttgtggaggtgggggaggaatacaagctgcgagccgaaaccctgtatctggcagtcaatttcttggaccgattcctgtcttgcatgtcggtcctgaggggtaagcttcagctagtcggtactgccgctatgttgctcgcctcaaaatacgaggaaatttacccccctgaagtggatgagttcgtttacatcactgatgacacctataccaaacgccaattgctcaaaatggaacatctgctgctgaaggtcttggcttttgacttgaccgtgcctacaaccaaccagtttctgttgcaatatcttcgaaggcagggagtttgcgtgagaactgaaaaccttgccaagtatgtcgcggagctctctctgctcgaagccgacccattcctcaaatatctgccatcacttattgccgctgccgcattctgtttggcaaattataccgtgaacaagcatttctggcctgaaaccctggccgctttcaccggctatagcttgagtgaaattgtgccctgtctgtcagagcttcataaagcatatctggatatcccccatcgccctcaacaggccattcgtgaaaagtacaaagcgagcaagtatctgtgcgtgtctctgatggagcctcctgctgtgctgctcctgcaatag

SEQ ID NO: 28157 - DNA, 1299 bp, synthetic construct
  misc_feature 1..1299: note = Description of Artificial Sequence: Synthetic coding sequence
  source 1..1299: mol_type = other DNA
atgctgggaaatagcgctccgggacccgcaaccagagaagctggttctgccttgctggctctgcagcaaacagcgctccaggaagaccaggagaacataaatcccgaaaaagcggcacctgttcagcaacctcgcacaagagccgcactcgcagtgctgaaatccggaaaccccaggggattggcacagcagcagcgacctaaaaccaggagggtggcccctctgaaggatctccctgtgaacgacgaacacgtcaccgtgcccccatggaaagccaatagcaagcagccagccttcaccatccatgtggacgaagccgagaaggaggcccaaaagaaaccagcagagtcacagaagatcgaacgcgaagacgccctggcttttaacagcgctatttcgctgccaggccctcgcaagcctctggtcccgctggattatcctatggacgggagcttcgaaagcccccacaccatggacatgtccatcatcttggaggatgaaaagccggtgtctgtgaatgaggtgcccgactaccatgaagatatccacacctacctcagagaaatggaggtcaaatgtaagcctaaggtgggctatatgaaaaagcagcctgatattactaattcaatgcgggctatactggtggattggttggtggaagtgggagaagaatacaagctgcaaaatgaaaccttgcaccttgctgttaattatatagatagattcctgtcctccatgagcgtcctgcggggtaagctacaactggtcggtaccgccgctatgctgttagcatcgaagtttgaggagatctatccgcctgaagtggccgaattcgtgtacatcacggatgacacatatactaagaagcaagtcctgagaatggagcatctcgtgctgaaagtcctcacattcgacctagcagcaccaacggtaaatcagtttctcacacagtacttcctccaccagcaacctgcaaactgtaaggtggagtcactcgccatgttcctgggggaactgagcctgattgacgccgatccttacctgaagtatctaccatcagtgattgccggagccgcttttcacctggcgttatacaccgtcaccggacagtcgtggccagaatcgctcattcgaaagacaggctataccctcgaaagtctcaaaccgtgcctcatggacctgcaccagacttacctcaaggcaccccaacacgcacagcaatcaatcagggagaaatacaagaacagcaaataccatggggtgagtctactgaatcccccagagactctgaatctgtag

SEQ ID NO: 28158 - DNA, 1302 bp, synthetic construct
  misc_feature 1..1302: note = Description of Artificial Sequence: Synthetic coding sequence
  source 1..1302: mol_type = other DNA
atggctctgcgggtgacgaggaactcgaagattaacgcggaaaacaaggctaaaataaacatggctggggcaaagcgagtacctacagcacctgcggctaccagtaagcccggactgcgtccacggacagcactaggcgacatcgggaataaagtgagcgaacagctgcaagccaagatgccaatgaagaaagaagctaaaccgtcggcgactggtaaggttatagacaagaagctgccgaaacccttggagaaagtccctatgctggttccagtacccgtctccgagcccgtgcccgaacctgaacccgagccagagccagaaccagtgaaagaagaaaagttatcacctgaacctatcctcgttgatacagcatcccccagtcctatggaaacctccggctgcgctccagccgaagaagacctgtgccaggcattcagcgatgtcatattggcggtcaacgacgttgacgctgaagatggggctgatccaaacctctgttccgagtacgtcaaggatatctacgcataccttcgccaactagaggaggagcaggcagtgcgacccaaatatctgcttggtcgggaagtcactggaaatatgcgggcaatcctcatcgattggctggtgcaggtacaaatgaaattcagactactacaggagacaatgtacatgacagtatcaattattgacagattcatgcaaaataattgtgtgcctaagaagatgcttcaacttgtgggggtcacggctatgtttatcgccagcaaatatgaggaaatgtatccacccgaaatcggggattttgccttcgtaactgacaatacctataccaaacaccaaatccggcagatggaaatgaagatcttacgggctctaaatttcgggttggggaggccattaccattacatttcttgaggcgcgcttctaagataggtgaggtggacgtggaacagcatacactcgccaagtatctcatggaacttaccatgctagattacgatatggttcactttccgccttcccagatagccgcaggggcattttgtcttgccctgaaaattctcgacaacggtgaatggacgcccacactgcagcattatttgtcatataccgaagagtccctgcttccggtcatgcagcatctcgccaagaacgtggtgatggtgaatcagggcttgacaaagcatatgacggtcaaaaacaagtatgcaacttctaagcatgccaagatctctactctgccccaactgaattccgcactagtccaggatctcgcgaaagcagttgcaaaagtgtag

SEQ ID NO: 28159 - DNA, 1191 bp, synthetic construct
  misc_feature 1..1191: note = Description of Artificial Sequence: Synthetic coding sequence
  source 1..1191: mol_type = other DNA
atggctctccgcgtgacaaggaacagtaaaattaacgctgaaaacaaggcaaaaattaatatggcgggtgctaaacgggtgccaacagctcccgcagcaactagcaagcccggactgcgtccccgtactgcattgggcgatatcggcaataaggtttccgaacagctgcaggccaagatgccaatgaaaaaggaggccaagccttcagcaacggggaaagtgatcgacaagaagctccccaaacctctagagaaagttccgatgctggtgccagtgcctgtgtccgaacctgtgcccgagcccgagcctgaacccgaacctgagcctgtgaaagaagagaagctttccccagagcctattcttgtggataccgccagtcccagtccaatggagacgagtggttgcgcgcctgctgaagaagacctgtgtcaggctttctctgatgtcatcctcgccgttaacgacgtggacgctgaggatggcgctgaccccaatctttgctccgaatacgtgaaggacatatacgcttacctccggcagctggaggaagaacaggccgtgcgacctaaatatctgctcggaagggaagtaacaggcaacatgcgcgcaatcttaatcgactggctggtgcaagtacaaatgaagttcaggctcttgcaggagacgatgtatatgactgtaagcatcattgacagatttatgcagaacaattgtgtgcctaaaaaaatgctgcagctcgtaggagttacagctatgttcattgcttcaaaatacgaggagatgtaccctcctgaaatcggggacttcgcgttcgtgactgacaatacatatacaaaacaccagatcaggcagatggaaatgaagattctccgagccctaaactttggactcggtaggcctttgccgctgcactttctccgcagggccagcaaaattggagaagttgatgtggagcagcacacattagctaaatacttgatggagttaacaatgctggactacgatatggtccattttcctcctagccaaatcgccgcaggcgctttttgtcttgccctaaagatcctggataatggcgagtggactgtgaaaaacaaatatgccacatctaagcacgccaaaatctcgacccttcctcagctgaattcagcgctggtacaggatttagcaaaagcagtcgcgaaagtgtag

SEQ ID NO: 28160 - DNA, 1206 bp, synthetic construct
  misc_feature 1..1206: note = Description of Artificial Sequence: Synthetic coding sequence
  source 1..1206: mol_type = other DNA
atggctctgcgcgtaacacgcaattcaaaaataaacgctgaaaataaggccaagatcaatatggctggtgcaaagagggttccaaccgctcctgctgcaacatccaaaccgggactcagacccagaacagccttaggcgacatagggaataaggtgagtgaacagctgcaggcaaaaatgcccatgaagaaagaagccaagccaagcgctactggaaaggtgatcgacaagaagttacccaagccactcgagaaggtgcctatgctggtaccagtgcctgtcagcgagccagtacctgagcccgagccagaacccgagcctgaacccgtgaaggaagagaaactctcgcccgagcccattctggtagacaccgccagcccctcgcccatggagacttcagggtgtgcacccgctgaggaggacctttgtcaagctttttctgatgtgatcctagcagtgaacgacgtggatgccgaagatggcgctgaccccaatctgtgctctgaatatgtgaaggatatctacgcctacctccgccaactggaggaagagcaggctgtccgaccaaagtacttactgggtagggaggtgactgggaatatgcgggcaatactaatagattggctcgtgcaggtacagatgaagtttcgactcttgcaggagacgatgtacatgacagtttccattattgacaggtttatgcaaaacaattgtgtgcccaagaagatgctgcagttggtcggggtgactgctatgtttattgccagcaaatacgaagaaatgtatccccctgaaatcggcgattttgcctttgtgactgataatacttataccaagcatcaaatccgccagatggagatgaaaatcttgcgagctctcaattttggcctggggcgtccgcttcccctccacttcctgcggcgagcttcaaagattggagaggtggacgtggagcagcacaccttggctaaatacttaatggagctgactatgctcgactacgacatggtgcactttcctccaagccagatcgccgcaggggcattttgcctggccttaaaaattctggacaacggggagtggacccccacactccagcattacttgagctacaccgaagagagtctcctacctgttatgcaacaccttgccaagaatgtggttatggtgaatcaggggttgacaaaacatatggtgtcacagtag

SEQ ID NO: 28161 - DNA, 1197 bp, synthetic construct
  misc_feature 1..1197: note = Description of Artificial Sequence: Synthetic coding sequence
  source 1..1197: mol_type = other DNA
atggccctacttagacggcctaccgtgagcagtgatctcgagaatatcgacaccggtgtaaattcaaaggtgaaatcccatgtgactatccggcgaaccgtactggaagagatcggcaatagggtgactacccgggcagctcaggtggccaaaaaggcccaaaacaccaaggtgcccgtgcagcctactaagacaactaatgttaacaaacagctaaagccaaccgccagtgtgaaaccagtacagatggagaagctcgcgcctaagggcccttctcccacaccagaggatgtgtccatgaaagaggagaacctgtgccaagcctttagcgacgctctgttatgtaagatcgaagatatagataatgaagactgggagaatccacaactgtgctctgattacgtgaaggacatctaccagtatctgaggcaacttgaggttctccagagcatcaatccccacttccttgacgggagagatataaacggtcggatgcgggctatcctggttgattggttggtgcaagttcactccaaatttcgcctgttacaggagaccctgtacatgtgcgtgggtattatggaccggtttctgcaggttcagccagtgtcccggaaaaaactgcagttggtcggaataacagctttgcttctggccagtaagtacgaggaaatgttctccccaaacatcgaagactttgtctatatcactgacaatgcctacacatcttctcagatccgagagatggagaccctcatcctgaaggaattaaaatttgagctgggcaggcctctaccgctgcattttctacggcgagcttcgaaagcgggagaagtcgacgttgaacagcacacactggctaaatatttaatggaattgaccctgatcgattatgacatggtgcactaccacccctccaaagtcgccgctgccgcttcttgtctctcccaaaaagtgcttgggcagggtaagtggaatctgaaacaacaatactacactggctacactgagaatgaagttctggaagttatgcaacatatggcaaaaaacgtggtgaaagtcaacgaaaatctcaccaaatttatcgccattaagaataagtatgcttcatcgaaactcctgaagatatcgatgatcccccaactcaactctaaggcagtgaaggacttggccagtcctttgatcgggagaagctag

SEQ ID NO: 28162 - DNA, 432 bp, synthetic construct
  misc_feature 1..432: note = Description of Artificial Sequence: Synthetic coding sequence
  source 1..432: mol_type = other DNA
atggcgggaaatttctggcagtcatcacactatttgcagtggattctggataagcaggaccttcttaaggagaggcagaaagatctaaaattcctgagcgaagaggaatattggaagctacagatcttcttcacgaacgttatacaggctttgggtgagcatcttaagctgagacagcaggtcatcgccaccgccactgtctacttcaagcgcttctatgcaaggtatagcctcaaaagcattgaccctgttctgatggcccctacttgtgtgtttctcgcctctaaggtcgaggaatttggagtcgttagcaatactaggttgattgcagccgctaccagtgtgtgtaaatgtaaaaagtatatatgctttaaagatgtcatactgaaaaaggcaccagagtatatcgacttttttttcttctctttatag

SEQ ID NO: 28163 - DNA, 852 bp, synthetic construct
  misc_feature 1..852: note = Description of Artificial Sequence: Synthetic coding sequence
  source 1..852: mol_type = other DNA
atggcaggtaatttttggcagtcctctcattatctccagtggatcctagataaacaggatctgcttaaggagcgccagaaggaccttaagtttctgtccgaagaggaatactggaaactgcagatttttttcactaacgttatccaggccctgggagaacacctgaaattacgacagcaagtcattgcgaccgccactgtctattttaagcgtttttacgcacgatacagcctgaagtcaatcgatcccgtgctgatggcgccaacgtgcgtctttttggcctccaaagtcgaggaatttggagttgtgtccaataccagactgatcgctgcagccacttctgttctgaagacaagattcagctatgctttccccaaggagttcccataccgaatgaatcacatcttagagtgtgagttctacctgctggagctcatggattgttgcctgatcgtctatcatccatatagacccctgctccagtacgttcaggacatgggccaggaagacatgctgttgccactcgcctggcgaatcgtcaatgatacctacaggaccgatttatgcctgctctatcctcctttcatgatagccttggcttgtctgcatgtggcttgcgtggtccagcagaaggacgccagacaatggttcgctgagctgtctgtggacatggaaaaaattttagagattatcagggtgatcctgaagctatatgaacagtggaaaaattttgacgaacgcaaggagatggcgacaatactgagcaaaatgcccaagccaaaaccacctcccaattccgagggcgagcaaggcccaaatgggtctcagaactcaagttatagccagagctag

SEQ ID NO: 28164 - DNA, 597 bp, synthetic construct
  misc_feature 1..597: note = Description of Artificial Sequence: Synthetic coding sequence
  source 1..597: mol_type = other DNA
atggcccctacatgcgtttttctagcaagcaaagttgaggaattcggagtagtatcaaacacccgccttatagccgctgctaccagcgtgctgaaaacacgcttctcatatgcattccccaaggagttcccatacaggatgaatcatatcctggagtgcgagttttaccttctggagctgatggactgttgcctcattgtgtaccacccgtatcggccacttctccaatacgtgcaggatatgggccaagaagacatgctattgcccttagcttggaggattgttaacgacacgtatagaaccgatctgtgcttgttatatcctccttttatgatcgcactggcttgcctacatgtagcgtgcgtcgtgcagcagaaagatgccagacagtggttcgcggaactgagcgtggatatggaaaaaattctcgagatcatcagggtgatcttgaaactttatgagcagtggaagaacttcgacgaacgcaaggaaatggcgacaatcctgtccaagatgcctaagcccaaaccgcctcctaattccgagggcgagcagggccctaacggatcccagaattcaagctatagtcagtcctag

SEQ ID NO: 28165 - DNA, 597 bp, synthetic construct
  misc_feature 1..597: note = Description of Artificial Sequence: Synthetic coding sequence
  source 1..597: mol_type = other DNA
atggctccgacgtgcgtctttctcgcctcaaaggtcgaggaattcggggtggttagcaatacccggttgatcgctgcagccacctctgtcctgaagacacgcttcagttacgcttttccaaaggagttcccataccgaatgaatcacatcctggaatgcgagttctaccttctcgagctcatggattgttgtctcatcgtgtaccatccataccgtccactccttcagtacgtccaggacatggggcaggaagacatgttactccccttggcatggcgcattgtgaacgatacctacaggaccgacctctgtctgctgtatccacctttcatgattgctctagcctgtcttcacgtggcatgtgtggtgcagcagaaggatgccaggcagtggttcgcggagctttcagttgacatggagaagatccttgaaattattcgtgttattctcaagctgtatgagcagtggaagaactttgacgagcgaaaagaaatggctacaattctgtcgaaaatgcccaagcctaaacctcccccaaactccgagggcgaacaggggcctaacggaagccaaaacagttcgtacagccagagttag

SEQ ID NO: 28166 - DNA, 489 bp, synthetic construct
  misc_feature 1..489: note = Description of Artificial Sequence: Synthetic coding sequence
  source 1..489: mol_type = other DNA
atggcccctacctgtgtgtttctcgcatcaaaagtagaggagttcggcgtcgtgtccaacaccaggctcatcgccgctgcaacaagcgtcctgaaaacacggttcagttacgccttccctaaggaattcccttaccgcatgaaccacatactcgaatgtgagttttatttgctggagctgatggattgttgtctcatcgtgtaccatccttacagacccctgctacagtacgtgcaggacatggggcaggaagatatgcttctcccgctggcctggcgaattgtcaatgatacctaccgtacggacctatgccttctgtacccccctttcatgattgctctcgcgtgcctgcacgttgcgtgtgtggtgcagcaaaaggatgcacgccaatggttcgccgagctaagtgtggatatggagaagatcctggaaatcattagagtcatactcaaactttacgaacagtggaagaatttcgatgaacggtag

SEQ ID NO: 28167 - DNA, 2283 bp, synthetic construct
  misc_feature 1..2283: note = Description of Artificial Sequence: Synthetic coding sequence
  source 1..2283: mol_type = other DNA
atgtccactgtggaagaagattcggacaccgttacggtggaaacagtaaactcagtgaccttgacacaagacaccgagggcaatctgatattgcattgtcctcagaatgaggccgatgaaatcgactccgaggacagtatcgaacccccacataaacgtctttgcctgtcctctgaggacgatcagtccattgatgatagcacaccctgtattagtgtggtggcgctgccactctcagagaatgaccagagttttgaggtgaccatgaccgcaacaactgaggtcgccgacgacgaagtcacggaggggaccgttacccagatccaaattttacaaaatgaacagttagatgaaatcagcccacttggaaacgaggaggtaagtgctgtatctcaggcatggtttacaactaaagaagataaggacagtctgacaaataaaggacataaatggaagcagggaatgtggagcaaggaggaaatcgatatcttgatgaataacattgagaggtatttaaaggctagaggcatcaaggacgcgaccgagattatattcgagatgtcaaaggacgaacggaaggacttctacaggacaatcgcctggggcctgaaccgtcccctgttcgcagtatacagaagagttctgcggatgtacgatgaccgcaatcatgtgggaaaatacactcccgaagagatagaaaagttaaaagagctacgcataaagcacgggaatgattgggcgactattggagcagctctcgggcgatcagcgtcctcagttaaggatagatgcagactgatgaaggatacgtgtaataccggcaaatggacggaggaagaggaaaagcgattggcagaagttgtacacgaactcactagcacagagccaggcgatatcgtcactcagggcgtctcctgggctgccgtcgccgagcgcgtcggcacaagaagcgagaagcagtgtcgaagcaaatggcttaattatctgaactggaaacaatcaggaggaactgaatggactaaggaggacgagataaatcttatacttaggattgctgagctggacgtggcagatgaaaacgacatcaactgggacttgttagctgagggctggagcagcgtgaggtcgccccagtggctccgttccaagtggtggactattaagaggcagatagcaaaccataaggatgtgtctttcccggtgctgatcaaaggcctcaaacagctgcacgagaaccagaaaaacaatcccacactactagagaacaagtctggctctggcgtccctaacagcaatacaaactcctctgttcaacatgtgcagattagagtcgccagattggaggacaacacagcgatttcctcatcccctatggctgccctccagatccccgtacagataacccatgtgtcctccgctgactcgcctgccaccgtagattctgagactatcaccctcaattcagggacactgcagacatttgaaatactgccgagcttccatttacagcctacggggacacccggaacctatctcctgcagactagctcgagccaagggctgcccctaacccttaccgcaagtccaacagtcacactcacggcggctgccccagcgtccccagaacagatcattgtccacgctctgagtcccgaacacctgctgaatacctcagacaacgtgaccgtccagtgccacactccccgtgtgattatacaaaccgtcgccaccgaagacattacttccagcatttcacaggcagagctgacagtggactccgacatccagtcttccgattttccagaacccccagacgcattggaagcagataccttccccgacgagatccaccaccctaaaatgacggtcgagccgtcgttcaatgacgcccacgtttcaaaattctccgatcagaattcaacagaactgatgaactccgtcatggtgcgcaccgaggaggagatctcagatactgacctgaaacaggaggagtcgccctcggacctggcatccgcttatgttactgagggcttggaaagccccacgattgaagagcaggtggaccagactattgacgatgaaaccattctgatcgttccctcccctcacggctttatccaggcatctgatgttatcgataccgagtcagtgctgccccttaccacccttaccgaccctatactgcagcatcatcaggaggagtctaatatcataggtagcagcctgggtagtcccgtttcagaggactccaaggatgtagaagacttggtaaattgccactag

SEQ ID NO: 28168 - DNA, 858 bp, synthetic construct
  misc_feature 1..858: note = Description of Artificial Sequence: Synthetic coding sequence
  source 1..858: mol_type = other DNA
atgagtacagttgaagaagactctgacacagtgactgtggaaacagtaaacagcgtgaccctcacacaggacaccgaaggaaatctgattctgcactgtccacagaacgaagccgatgagatcgattctgaggacagtatagaaccccctcacaaacgactctgtctttccagcgaggacgaccaaagcatcgatgattctactccatgtatcagcgtggtcgccctaccactgtccgagaacgaccagagtttcgaagttaccatgaccgcgacaacagaagtggcagatgacgaggtaacagaaggcaccgtgacccaaatccagatacttcaaaatgaacaactcgacgaaatcagtccactcggcaacgaagaggtgtcagccgtgtcccaggcctggttcaccactaaggaagataaggacagcctcactaataagggccacaagtggaagcagggaatgtggagtaaagaggagatagacatcctgatgaataatatcgagcggtacctcaaagctcggggtatcaaagatgctacggaaattatattcgagatgtctaaggatgagaggaaggacttttacaggacaattgcatggggccttaaccgcccactgtttgccgtgtacagaagagtgcttcgcatgtacgacgaccggaaccacgtgggaaaatacactccggaggaaatcgaaaaactaaaagagaaaaaggccatcgcagcttgttttttctttactcacagacagctctggactccaaaaaaagggcacacttttaagctctggctgagcaaatactgctgtcctcagctccctaatcagtccaatggaaagaagaaaaacgaggaatag

SEQ ID NO: 28169 - DNA, 2283 bp, synthetic construct
  misc_feature 1..2283: note = Description of Artificial Sequence: Synthetic coding sequence
  source 1..2283: mol_type = other DNA
atgagtactgtagaagaagatagtgacacggtgactgttgaaactgtgaactccgtaactttaacacaagatacggaaggcaacctaattttgcactgtcctcaaaatgaggccgacgagatagatagcgaggactccatcgagcctcctcataagaggctctgccttagctccgaggacgaccaatccattgatgattctactccatgcatctctgtggtggcactgccattaagtgaaaacgaccagtcttttgaggtaaccatgacggcgacaacagaagttgccgatgatgaagttacagaaggaaccgtgacacaaatacagattctccaaaacgagcaactcgacgaaatctcaccgctcgggaatgaagaagtgtctgctgtctcacaggcctggtttacaaccaaagaagacaaagattccctgactaataaaggtcataagtggaaacaaggtatgtggtccaaggaggagatcgatatattaatgaacaacattgaaaggtatctgaaagctagaggcatcaaggatgccaccgaaatcattttcgaaatgtcaaaggatgaaagaaaagacttttatcgcacaatcgcctggggactgaaccgaccgttgtttgcggtgtacaggcgggtgctccgtatgtacgacgatcgaaaccacgtgggtaaatatactcctgaggagatcgagaaactgaaagaactgcggatcaagcatggtaacgactgggccacaataggcgcagctctgggaaggtcagcctcttcggtgaaagaccggtgccgactgatgaaagacacctgtaacacagggaaatggacagaagaggaagagaagcgcttagccgaagtggtccacgagcttacttcgacggagccgggagatatagttacccagggcgtgtcctgggcagccgtcgccgagcgtgttgggacccggtcagaaaagcaatgccgttctaagtggctgaattatctgaactggaagcaaagtggtggcactgaatggacgaaggaagacgaaattaacctcattctccggatcgcggaattggacgtggcggacgagaatgacatcaattgggatctcctggccgagggatggagcagcgtgagatcaccccagtggctccggtccaaatggtggactattaagaggcagatcgctaaccacaaggacgtgagtttccctgttttgatcaaagggctcaaacaactccatgaaaaccagaagaataaccccacactgctggagaacaagtcaggatcaggggtcccgaactctaacacaaattcaagcgttcagcatgttcagattcgggtagctcgattagaggataacaccgccatcagtagtagtcctatggccgctttgcagatccccgttcagatcacccacgtatcgtctgccgactcccctgccacggtcgattcggaaacaataacactcaattctggtactttacaaactttcgaaatcctcccctcctttcatctgcagccgactggaacccctggtacctatcttcttcagacatcctcaagccaggggttgcctcttaccttgactgcgtcaccaacggtaacgctaactgcagctgcgcctgccagccccgagcagatcatcgtgcatgcattaagtccagaacatctgcttaacacttctgacaacgttaccgttcagtgtcacactcctcgtgtcattatccaaaccgttgccacggaagacatcacaagttcgatttcacaagccgagctgaccgtcgacagtgacatccagtcctccgacttccctgaacctcccgatgctcttgaagctgacacctttccagatgagatacaccatcctaagatgaccgttgagcccagcttcaatgacgctcatgttagcaagttctccgatcagaacagcacggaattgatgaattctgtgatggtccgaaccgaggaggagatatctgatactgatcttaagcaggaggagtctccttctgacttggcttcagcctacgtgaccgaggggctggaatctccaacaatagaggagcaggtggaccagacaatcgacgacgaaaccatactgattgtaccaagtccacacggctttatacaggccagtgacgtcatagacaccgagtctgtattgccactgacaacactcaccgaccccatcctgcagcatcatcaggaggaaagtaatatcatcggatcctcacttggctcacccgtgagtgaggactccaaggacgtggaggacctggttaactgccattag

SEQ ID NO: 28170 - DNA, 735 bp, synthetic construct
  misc_feature 1..735: note = Description of Artificial Sequence: Synthetic coding sequence
  source 1..735: mol_type = other DNA
atgtccactgttgaggaagattccgacactgtgacagtagaaactgtgaattccgtaacattgactcaggacaccgaaggaaacttgatactgcattgtcctcagaatgtgtccgaaaacgaccagtcctttgaggtgacaatgacagcaaccacagaggtggccgatgacgaagtcaccgagggtaccgtgacccagattcagatcctgcagaacgaacaattggacgagatatcaccactgggcaacgaggaagtgtctgccgtgagccaggcctggtttacaaccaaggaggacaaagatagcttaaccaataagggccacaagtggaagcaggggatgtggtctaaagaggagatcgatattctgatgaataacatagaaaggtatctcaaggctaggggcattaaggatgcaacagagattatcttcgagatgagtaaagatgagcggaaggatttctacagaacaatcgcttggggtctaaacagaccactttttgccgtgtatcggagggtgctgcggatgtatgacgatagaaatcacgtggggaaatatacccctgaggaaattgagaaactcaaggagaaaaaagccattgccgcatgtttttttttcacccacagacagctgtggacccctaaaaagggccatacctttaaactgtggctcagcaagtattgctgtccccagctgcctaatcagagtaatggtaagaagaagaacgaagagtag

SEQ ID NO: 28171 - DNA, 819 bp, synthetic construct
  misc_feature 1..819: note = Description of Artificial Sequence: Synthetic coding sequence
  source 1..819: mol_type = other DNA
atgagcaccgttgaagaagatagtgataccgttacagtcgagaccgttaatagcgtgaccctcacacaggatacagaaggtaatttgatattgcactgtccgcagaatgaggcggatgagatagatagcgaggattccatcgagcctcctcataaacggctctgcctaagttctgaggacgatcagtctattgacgactccacaccttgtatttctgttgtagccctccctttgtcagaaaatgaccagagcttcgaggtaactatgaccgccaccactgaggttgccgacgacgaagtgacagagggcactgtcacacagatacagatcctgcagaatgagcagcttgatgagatcagccccttgggcaacgaagaggtgagcgccgtctcccaagcctggttcacgactaaggaggataaggacagcctgacgaacaaaggccacaagtggaaacagggaatgtggagcaaggaagagatcgacatcctgatgaataatatcgaacggtacctgaaggcacgcggaattaaagatgccactgagatcatatttgagatgtccaaggatgaaagaaaggacttctaccggacaattgcatggggtctgaaccgacctctattcgctgtgtaccggcgagtcctgcgaatgtacgatgaccgtaatcacgtaggcaaatacacacccgaggaaatcgagaagctgaaggagcagctttggacgcccaagaaggggcacacattcaaactctggctctccaagtactgttgccctcaattacctaaccagagcaatggtaagaagaaaaacgaagagtag

SEQ ID NO: 28172 - DNA, 2073 bp, synthetic construct
  misc_feature 1..2073: note = Description of Artificial Sequence: Synthetic coding sequence
  source 1..2073: mol_type = other DNA
atgagcacggtggaggaggactcagacaccgtcactgtggagactgtgaatagtgtgacactgacacaagacactgaaggcaacttaatcctgcactgtcctcagaatgaagccgatgagatcgacagtgaggattctatcgagccaccacataagaggctctgtctttcgtctgaagacgaccagtcaatcgatgacagcaccccttgcatttctgtggtcgctctgccactcagcgagaacgatcagtcatttgaagtcacaatgactgcaacaacggaagtggctgatgacgaagttacggaagggactgtgacccagatccagatcttgcaaaacgaacaactggatgaaatttccccactcggcaacgaggaagtgagcgccgtgtcccaggcttggttcacgacaaaagaagacaaagattcactgacaaataaaggccacaaatggaaacaggggatgtggagcaaagaggagatcgacatattaatgaacaatattgagcgatatctgaaagcaagagggattaaagacgccactgagatcatctttgaaatgtccaaggacgagcggaaggatttctatcgcaccatcgcgtgggggctcaacagacctctgttcgccgtgtatcgccgagtcttacggatgtatgatgataggaaccatgttgggaagtacacccccgaggagatagaaaagctcaaagaactgagaattaagcacgggaacgactgggctaccatcggagccgctttgggacggagcgcctcttcagtgaaagatagatgccgattaatgaaagacacatgtaataccggcaagtggaccgaagaggaggagaaacggctggcagaggtggtccatgagctcacatcgacagaacctggggatattgttacacaaggcgtttcctgggcagcagttgccgagagggttggcaccaggagtgaaaaacagtgtcgatccaaatggcttaactatctaaattggaagcagagcggaggaactgagtggacgaaggaagacgagatcaatctcatcttgcgcattgctgaacttgacgtagccgacgagaacgatattaattgggatctgttggcagagggttggtccagcgtgaggtctccacaatggctaagatccaaatggtggaccattaaaaggcagatcgctaatcataaggatgtgagcttccccgcaagcgccgatagccccgctaccgtcgacagcgagacaatcaccctgaactcaggcaccctgcagacattcgaaattctgccaagtttccacctgcagcctaccgggacacctggcacttacttactacagacttcttcaagtcagggcctgcctctgacactcacggcatcccccactgtgaccctgactgcggcagccccagctagtcccgagcagatcatcgttcatgcgctgtcccctgaacacttgctcaacacctccgataacgtcacggtgcaatgccacactcccagggttatcatacagacagtcgcgactgaggacattacttcaagcatttctcaggcggagctgaccgtggatagcgacatacagagttctgactttcccgaaccaccagacgccttggaagcagatactttccctgatgaaatccaccaccccaagatgaccgtagaaccctccttcaatgacgctcacgtaagcaaattctcagaccagaattctaccgagctgatgaatagtgtaatggtcagaacagaagaagagatatccgacaccgatctcaaacaggaggaaagcccaagcgacctagccagcgcttatgtcacggaaggacttgagtcccccaccatagaggagcaggttgatcagaccattgacgatgagaccatattgatagtgccaagtccacacggcttcatccaagcctcagacgttattgacacagaatcagtcctgccccttacgacactgacagatccgattcttcagcatcatcaagaagagtcgaatataattggcagtagtctcggcagcccagtttccgaagactcaaaagacgttgaggatttggtcaattgtcattag

SEQ ID NO: 28173 - DNA, 1485 bp, synthetic construct
  misc_feature 1..1485: note = Description of Artificial Sequence: Synthetic coding sequence
  source 1..1485: mol_type = other DNA
atgaaagacacatgcaatacaggaaagtggacagaggaagaagaaaagcgcctggcagaggtggtccacgaactcacctccactgagccgggtgacatagtgacacaaggggtgtcctgggctgctgtcgccgagagggttggtaccaggtcagagaaacaatgtagatcaaagtggctcaattatctgaattggaaacagtctggtggcactgaatggaccaaggaagacgaaattaatctcattctacgcatagccgagctggatgtggcagacgaaaatgacatcaactgggacctgctggccgaggggtggagcagtgtgcggtctccacagtggcttagaagcaaatggtggaccatcaaacgccagatcgcaaatcacaaggacgtgagttttccagtgcttatcaaagggctaaagcagctgcacgaaaaccaaaagaacaatccgacgctgttggagaataaaagcggaagtggtgtacccaattcgaatactaatagttctgtgcagcacgtgcaaatcagagtggcaagactggaggacaacacagccattagcagcagcccaatggcagcccttcaaatccctgtgcagattacacacgtcagtagtgcggactcccccgcaacagttgactctgagacgattactctgaatagcggcacattacagacattcgagatacttccaagtttccacctgcagccaactggcactccaggaacatacttgcttcagacctcctcgtcccagggcctgcccctgactctgacggcctcgccgacagtgaccctgactgcggctgctcctgccagcccagaacaaatcatcgtgcacgcattatcacctgagcatcttctgaacacgtccgataacgtgaccgttcaatgccatactcctcgagtcatcatacaaactgtggccaccgaagatatcacatcttctatttctcaggctgaactgaccgtggacagtgatattcagagcagtgactttccagagcccccagacgcccttgaggcagacaccttcccggacgagattcaccaccctaagatgactgtggagccctctttcaatgacgctcacgtgagcaaattctccgaccagaacagcactgaattaatgaacagcgtcatggtacgcacggaagaggaaattagcgataccgacttgaagcaggaagagtctccatctgatctggcgtcagcctacgtaacggaaggcctcgagtccccaactattgaagaacaggtcgaccagacaatcgacgacgagacaatcctcatagtcccaagtcctcacgggtttatccaagcaagtgacgttattgacactgagtcagtcctgccattgactacgctgactgatccaatcctacagcatcaccaggaggagtccaacatcatcggatcatctctgggctcgccggtgtccgaggattccaaggacgttgaagacctggttaactgccactag

SEQ ID NO: 28174 - DNA, 111 bp, synthetic construct
  misc_feature 1..111: note = Description of Artificial Sequence: Synthetic coding sequence
  source 1..111: mol_type = other DNA
atgagcaccgtggaggaggatagcgacactgtgacagtggaaacagtgaactctgtgactttaactcaggacacagagggtaacctcattttacactgccctcaaaactag

SEQ ID NO: 28175 - DNA, 33 bp, synthetic construct
  misc_feature 1..33: note = Description of Artificial Sequence: Synthetic coding sequence
  source 1..33: mol_type = other DNA
atgactgcaaccaccgaggttgcagacgattag

SEQ ID NO: 28176 - DNA, 111 bp, synthetic construct
  misc_feature 1..111: note = Description of Artificial Sequence: Synthetic coding sequence
  source 1..111: mol_type = other DNA
atgagcaccgtggaggaggatagcgacaccgtcactgtggagacggttaatagcgtcaccctgacccaggacaccgagggaaacctgatcctccattgcccacagaattag

SEQ ID NO: 28177 - DNA, 735 bp, synthetic construct
  misc_feature 1..735: note = Description of Artificial Sequence: Synthetic coding sequence
  source 1..735: mol_type = other DNA
atgtcgacagttgaggaagattccgatacagtgactgtggagacggtcaacagtgtgactttaacccaggataccgaaggcaacttaatcctccactgccctcagaacgtgtctgaaaacgaccaaagtttcgaggtcacgatgactgccacgaccgaggtagccgacgatgaagtgacagaaggaacagtgacacaaatccagatccttcagaatgaacagctcgacgagatttctcctctgggaaatgaggaagtctccgccgtttcgcaggcatggttcactacgaaagaagataaggattcactgaccaataagggtcataagtggaaacagggaatgtggtctaaagaagaaatcgacatcttaatgaacaacatagaacggtatctaaaagccagaggaattaaagacgcaacagagattatctttgagatgtcaaaggacgagagaaaagatttctaccgtacgatagcatggggtttgaacaggcccttgtttgccgtgtaccgccgagttctgcggatgtatgatgaccgaaatcatgtggggaagtatacaccggaagagatagagaagctcaaagaaaagaaagctatcgccgcttgcttcttttttacccaccgccaactgtggacccctaagaagggccacaccttcaaactgtggctgtctaagtactgctgcccgcagcttccgaatcaatcaaacgggaaaaaaaagaacgaggaatag

SEQ ID NO: 28178 - DNA, 582 bp, synthetic construct
  misc_feature 1..582: note = Description of Artificial Sequence: Synthetic coding sequence
  source 1..582: mol_type = other DNA
atgtcaacagtggaggaagatagcgacaccgtgaccgtggaaacagtcaatagcgtgacactgactcaggatacagaggggaatttaatactccattgccctcagaacgaggcggatgagattgattcagaggatagtattgaaccacctcataagcggctatgcttgtcctctgaagatgatcagagcatagatgactctaccccatgtatatctgtggtggctctgcccctgtcggagaacgatcaatcttttgaagtgactatgactgcaactacagaagtcgccgatgacgaggtgaccgaaggcaccgtgactcagatccagatcctgcagaatgagcaactcgacgaaatcagccctctgggtaacgaagaggtgtctgctgtctcacaagcatggtttaccaccaaagaggataaggattctctgaccaataaaggacataaatggaaacagggaatgtggagtaaagaggaaatcgatatactgatgaacaacattgagcgctacctgaaggctaggggcatcaaggacgctacggagataatttttgaaatgtcaaaagatgaacggaagtag

SEQ ID NO: 28179 - DNA, 84 bp, synthetic construct
  misc_feature 1..84: note = Description of Artificial Sequence: Synthetic coding sequence
  source 1..84: mol_type = other DNA
atgtctactgtcgaagaggacagcgatactgtgactgtcgagacagtgaattccgtaacacttacacaagatactgagggctag

SEQ ID NO: 28180 - DNA, 444 bp, synthetic construct
  misc_feature 1..444: note = Description of Artificial Sequence: Synthetic coding sequence
  source 1..444: mol_type = other DNA
atgtcaacagtcgaggaagattccgatacagttacagtcgagactgtgaactctgtgacgttgactcaggatacggagggtaacctaattctccactgccctcaaaacgaagcagacgagattgatagtgaagactccatcgaaccccctcacaaacgtctatgcttgagctctgaggacgatcagtctattgatgactccaccccctgcatctccgtcgttgcattgccactgagcgagaatgatcaaagctttgaggtgaccatgaccgcaacaacggaagtggctgatgacgaagttaccgagggaactgtaactcagatccagatcctccaaaacgagcagcttgatgagatatccccacttggtaatgaggaggtgtctgcagtgtctcaggcatggttcacaactaaagaggacaaagactcccttacaaacaaatag

SEQ ID NO: 28181 - DNA, 222 bp, synthetic construct
  misc_feature 1..222: note = Description of Artificial Sequence: Synthetic coding sequence
  source 1..222: mol_type = other DNA
atgagcacagtggaagaagactctgataccgttacagtggaaactgttaactcagtgacacttacccaggacactgaggggaatctgatccttcactgcccgcagaacgaagccgatgaaatcgattctgaggactccattgaaccacctcacaagaggctgtgtctgtcgtccgaggacgaccagtccattgacgattccactccatgtatttcagtatag

SEQ ID NO: 28182 - DNA, 2019 bp, synthetic construct
  misc_feature 1..2019: note = Description of Artificial Sequence: Synthetic coding sequence
  source 1..2019: mol_type = other DNA
atgacagcaacgaccgaggtagccgatgacgaagtcactgaaggcaccgtgacccagattcagattcttcagaatgaacagctggacgagatatctcccttaggaaacgaggaggtttctgcagtatcacaagcttggttcactactaaagaagataaagattccctgactaacaaggggcataaatggaaacaggggatgtggagtaaagaagagattgacatactgatgaataatattgagcgctacctaaaagcccgagggatcaaggatgctacggaaatcatatttgagatgtcgaaagatgagagaaaagacttctatcggactattgcctggggactgaacagaccccttttcgcggtgtaccggcgtgtcttgagaatgtatgatgaccgcaatcacgtggggaagtacacgcctgaagaaattgaaaaactaaaagaactgagaatcaagcacgggaacgactgggcgacaatcggggctgcgctcggacgatctgctagttccgttaaagaccgctgccggcttatgaaggatacttgtaacaccggcaaatggacagaggaagaggaaaagcggctcgccgaggttgtccacgaactgacctccactgagccaggagacatagtaactcagggtgttagttgggccgctgtggcagaaagggtaggcaccagaagtgaaaagcaatgccggagcaagtggctgaattatttgaactggaaacaatccgggggtaccgaatggaccaaagaagacgagattaatttaatactaaggatcgctgagctcgatgttgcagatgagaatgatatcaactgggaccttctggcagaaggatggagcagcgttagatctccccagtggctccggagcaagtggtggaccataaaacgccagattgcgaatcataaggacgtgtccttccccgtgcttatcaagggtctgaagcagctacatgaaaaccagaagaacaacccaactctactggagaacaaatctggatctggcgtgcccaatagtaatactaatagctcagtacagcacgttcagattcgtgtggcacgactggaagataataccgctatctcgtcctcccccatggccgctctgcagatccccgtacaaattacacacgtgtcttccgccgatagccccgctaccgttgattctgaaaccataactcttaactctggaactctccagacattcgaaatcttaccctcttttcacctccaacccaccggcaccccgggtacctatttgctgcaaacctccagctcccaggggctgccattgacgctgaccgcatctccaactgtcacccttaccgcggctgcgcctgccagccccgagcagattatcgtccatgcactgtcgcctgagcacttgctaaatacatcagataacgtgacagtccagtgccacacacctcgggtgatcattcaaacagtggctaccgaagacataacttcgagtatctcacaggccgaactaacggttgactctgatatccagagtagcgacttccctgaaccacctgacgcactcgaagctgataccttcccagatgagattcatcaccccaagatgactgtggagccgtccttcaacgatgcacacgttagcaagtttagtgaccagaattctactgaactcatgaatagcgtgatggtgagaactgaagaagagatctctgatacagacctgaagcaggaagagagcccatcagatctcgcttcggcctacgtgacagagggattggagagccctactatcgaagaacaagtagatcagacaatcgatgatgagaccatcctgatagtgcctagtccacacggattcattcaggcctccgatgtcatcgacacagagtcggtgctcccacttacaaccctaactgatcccattcttcaacaccatcaagaggaatccaacatcattggctcttctctgggaagtcctgtctccgaagatagcaaagacgtagaagatctggtgaattgccactag

SEQ ID NO: 28183 - DNA, 291 bp, synthetic construct
  misc_feature 1..291: note = Description of Artificial Sequence: Synthetic coding sequence
  source 1..291: mol_type = other DNA
atgagcaccgttgaggaggatagcgacacagtcaccgtggagacagtcaactctgtcaccctgacccaggacacggaaggtaacctcattctgcattgtcctcaaaacgaggcggatgaaatagacagtgaggattccattgagcccccacacaaacgcttgtgcctgtcatccgaggatgatcagagtattgatgattctacaccctgcataagcgtggtggccctcccgttgtcagagaacgaccagagtttcgaggtgaccatgaccgccaccactgaggttgcgtag

SEQ ID NO: 28184 - DNA, 171 bp, synthetic construct
  misc_feature 1..171: note = Description of Artificial Sequence: Synthetic coding sequence
  source 1..171: mol_type = other DNA
atgagcaccgttgaagaagattctgatactgtgacggtggagaccgtaaactcagttacactgacgcaggatactgaagggaaccttattttacactgccctcagaacgaagcagatgagatcgatagcgaggactccatcgagccacctcacaaacgcctttgcttatag

SEQ ID NO: 28185 - DNA, 858 bp, synthetic construct
  misc_feature 1..858: note = Description of Artificial Sequence: Synthetic coding sequence
  source 1..858: mol_type = other DNA
atgtctaccgtggaggaggacagcgataccgtgacagtggagacagtgaacagcgtcaccctgactcaggatactgaaggcaacctgatccttcattgcccccaaaacgaggccgatgaaatcgatagcgaagatagcattgagccaccccataagagactttgcctgtcctcagaagacgaccaaagcattgacgacagcaccccctgtattagcgtggtcgctttgcccctcagcgagaatgatcaatcttttgaggtcaccatgacagcaacgaccgaagtggcagatgacgaggttaccgagggaactgtgacccagatacaaattctgcagaacgaacaactcgacgagatctccccactaggaaacgaagaagtaagtgctgtgtcccaggcgtggtttacaacaaaggaggacaaagactccctaacaaacaaaggacataaatggaaacagggcatgtggtctaaggaggagatcgatatcttgatgaacaacatcgagcgatacctgaaggctcggggaataaaggacgcaaccgaaatcatcttcgagatgagtaaggacgagcgcaaggatttctatcgcacaatcgcttgggggctgaaccgtccgttgtttgccgtctatcgtcgcgtgcttcgcatgtacgacgacaggaaccatgttggcaaatatacgcctgaagagatagaaaagctgaaggaaaagaaggcgattgctgcatgcttcttcttcactcaccgacagctgtggaccccgaagaagggacacacattcaagttatggctgagcaaatactgctgcccccaattgccaaaccaatctaacggcaagaagaagaacgaggagtag

SEQ ID NO: 28186 - DNA, 150 bp, synthetic construct
  misc_feature 1..150: note = Description of Artificial Sequence: Synthetic coding sequence
  source 1..150: mol_type = other DNA
atgagtaccgttgaagaggactcagacactgttacggtagagacagtgaacagcgtgacattgactcaggacaccgaggggaacttgatcctgcactgcccccaaaatgaagctgacgagattgactccgaggactccattgagccatag

SEQ ID NO: 28187 - DNA, 330 bp, synthetic construct
  misc_feature 1..330: note = Description of Artificial Sequence: Synthetic coding sequence
  source 1..330: mol_type = other DNA
atgtctactgtcgaggaggatagcgatactgtcacagtggagaccgtgaatagtgtaaccctgactcaggataccgaaggtaatctgatcctgcattgtcctcaaaacgaagccgacgagatcgattcagaggacagcattgagcctcctcacaagagactttgtctatcatctgaagacgatcaaagtattgatgactctaccccttgcattagtgtggtagctctccccctttcagagaacgaccagtcatttgaagtcaccatgaccgctaccactgaagtggccgacgatgaagtcacagagggtacagtgacccagatccagtag

SEQ ID NO: 28188 - DNA, 276 bp, synthetic construct
  misc_feature 1..276: note = Description of Artificial Sequence: Synthetic coding sequence
  source 1..276: mol_type = other DNA
atgtccactgtcgaggaggactccgacaccgttactgtggaaaccgtaaattccgtcacgctaacccaggatactgagggtaacttgatactccactgcccccagaatgaggcagacgagatcgattctgaggactccattgagcctccacacaaaagattgtgcctaagcagtgaagatgaccagtccatcgatgatagtaccccatgcattagcgtcgtcgccttacccctttctgagaatgaccaatcttttgaagtgaccatgactgcttag

SEQ ID NO: 28189 - DNA, 1647 bp, synthetic construct
  misc_feature 1..1647: note = Description of Artificial Sequence: Synthetic coding sequence
  source 1..1647: mol_type = other DNA
atggcaaccggagctaacgccacacctctcgattttccctccaagaagaggaaaaggtctcggtggaaccaggacactatggaacagaagaccgtgatacccggtatgcccaccgtgattccacccggactgaccagagagcaagagagggcctacatcgtacagctgcagattgaagacttgactagaaaattgcgaacgggcgatctcggaatcccacctaaccctgaagatcgctcgccatctccggaaccaatctataattccgaaggcaagagactgaacacacgcgaattccgtacaagaaaaaaattagaggaagagcgtcacaacctcattacagaaatggtggcactgaatccagattttaaaccaccagccgactataagccccctgctacaagggtctccgataaagtgatgatcccacaggacgagtatccagaaatcaactttgtggggctgttaatcggcccacggggaaatacccttaagaacatcgagaaagaatgcaacgcgaagattatgatcagaggtaaaggatccgtgaaggaggggaaggttgggagaaaagatgggcagatgctcccgggtgaggacgagccactgcatgccctcgttactgcaaataccatggaaaatgtgaaaaaagcggttgagcaaattagaaatatcctgaagcagggtatagagactcccgaagatcagaatgacttacgtaagatgcaactccgggaattggctcgattgaacggcaccctgagagaggatgacaatcgcatcctgcggccttggcagagctccgagacaaggtccatcactaacacaacagtgtgcacaaaatgcggtggcgctggccacatcgcttccgactgtaaattccagcgaccaggtgatccccaaagtgctcaggataaggctaggatggacaaggaatacctctcgctgatggccgagctcggcgaagcccctgtgcccgcttccgtaggaagcacctccgggccagcaactaccccactggccagcgctccccgtccagccgcacctgccaacaacccaccacccccttcgctgatgagcacgacccagtccaggcccccatggatgaattctggcccatcagagtctcggccttaccatggaatgcacggcggaggtccgggtggtccaggcggaggtccccattccttcccccatcccctgcccagtctgactgggggacatggcggacacccaatgcaacataatccaaatggacctccccctccttggatgcaaccaccacctcctccaatgaaccagggccctcatcctccaggtcaccacggaccacccccaatggaccagtacctcggaagcacaccagtgggatccggggtttatcggctgcatcagggcaagggcatgatgccccctccacctatgggcatgatgcctcccccaccccctcccccttctggccagccaccgcctcccccttctggtcccctgcccccttggcaacagcagcagcagcagcctccccctccgccacctcccagctctagcatggcttcctcaacacccctgccttggcaacaaagatcactcccagccgcagccatggcacgtgccatgcgtgtgaggacctttagggcccattggtag

SEQ ID NO: 28190 - DNA, 486 bp, synthetic construct
  misc_feature 1..486: note = Description of Artificial Sequence: Synthetic coding sequence
  source 1..486: mol_type = other DNA
atggagcaccaactgctatgctgtgaggtggagaccatacggagggcctacccggacgcaaatctgctgaacgatagggtgctgcgcgctatgctgaaagcagaggagacttgcgcacctagcgtaagctattttaagtgcgtacagactttcgtggcgctgtgcgccactgatgtcaagttcatctctaatcccccatctatggtggctgccggatcagtggtggccgctgtccagggcttgaacctgcggtctcctaacaatttcctgagctattaccgcctgacaaggttcctctccagagtgataaaatgcgatccagactgtttgcgcgcttgccaggagcaaatcgaagccctcctggaatcttcactgagacaggctcaacagaacatggatcccaaagctgcagaggaagaagaggaggaagaagaggaagtagacttagcgtgtacccctacggacgttcgcgatgtagacatctag

SEQ ID NO: 28191 - DNA, 870 bp, synthetic construct
  misc_feature 1..870: note = Description of Artificial Sequence: Synthetic coding sequence
  source 1..870: mol_type = other DNA
atggaactgttgtgtcacgaggtggatcctgtgagaagagcagtccgcgatcgaaacctgcttagggacgaccgcgtcctgcagaatttgctgacgattgaggaacgatatcttccgcaatgcagctactttaagtgcgtgcagaaggatattcagccttacatgaggaggatggtggccacctggatgctcgaggtgtgcgaagaacagaaatgcgaagaagaggtgtttcctttagccatgaactacctagaccgttttttggctggggtcccaacccccaaatctcacctgcagttgctgggggcagtctgcatgtttctggcgtcgaagttgaaagaaacttcccccttgaccgccgagaaactgtgtatctacaccgacaactccattaagccgcaagagctgctggagtgggaattggtcgtgctgggcaagctgaagtggaatctcgccgcagtgaccccacatgattttatcgagcatatcttgcgaaaactgccacagcaaagggagaagctgtcgctcatccgaaagcacgcccagactttcatcgcattgtgcgcaaccgacttcaaattcgccatgtaccctccttccatgatcgcgaccgggagtgtgggggcagccatttgcggtctacagcaggacgaagaggtttcctctttgacctgcgatgctctgacggagctgctggccaagattaccaataccgatgtggactgcctgaaggcttgtcaagaacagatcgaagccgtgctgctgaactctctgcagcaatacaggcaagatcagcgcgacgggtcgaagtcagaggacgaactcgaccaggcgagcacacccaccgatgtgcgggatatcgacctgtag

SEQ ID NO: 28192 - DNA, 729 bp, synthetic construct
  misc_feature 1..729: note = Description of Artificial Sequence: Synthetic coding sequence
  source 1..729: mol_type = other DNA
atgaagtccgctggaggttcgggcagatctttgctcccatcacctcgcgtgtgtgaggagcagcgatgcgaggaggaagtttttcccctggccatgaattacctagatagatatctctcttgtgtgcctaccaggaaggcccaactgcaactgttaggagcggtgtgtatgctcttggcctccaagctgcgggagactacgcccctaacaatcgaaaagctgtgtatctatacagaccacgcagtcagcccccgacagctgcgagattgggaagttctggttcttggtaaactgaagtgggatctcgcagccgtcatagcccacgatttcctggctttcatattgcacagactcagcctcccgagggacaggcaggcactggtgaaaaagcacgcccagactttcctggccctttgcgcaactgactatactttcgccatgtaccccccttcaatgattgctacggggagcatcggtgcagctgtacagggcctgggagcatgttctatgtcaggtgatgagctcaccgaactgctcgccggtatcacaggcactgaagttgattgcctcagggcgtgccaagagcaaatcgaagctgcccttcgggagtcgctgagggaggcttcacaaacctcctctagcccggctcctaaagctccgagaggcagctcaagccaagggccaagtcagacatcaactcccactgacgttaccgctattcacttatag

SEQ ID NO: 28193 - DNA, 636 bp, synthetic construct
  misc_feature 1..636: note = Description of Artificial Sequence: Synthetic coding sequence
  source 1..636: mol_type = other DNA
atgaactatctggataggtacctgtcatgtgtaccgacacgcaaggctcagcttcagcttctaggggctgtctgtatgcttttagcctctaagctgcgcgaaacaacccccttaactattgaaaaactgtgtatttataccgaccacgcagtgtcacctaggcagctccgagactgggaagttctcgtcttagggaaactcaagtgggacctcgccgcagtcatcgcccacgattttctggctttcattctgcaccgcctatcgctgcccagggataggcaggctctggtgaagaagcacgcacagacctttctggccctttgtgctaccgactacacgtttgccatgtaccctccttctatgattgccacaggatcaatcggggctgccgtacagggcctgggcgcttgcagcatgtcaggtgacgagctgacggagctgttggccggtataactgggacagaagtggactgcctgcgcgcttgtcaggaacagattgaggccgctttgagggagtccctgcgggaggcaagccaaacctcgtcctctcccgctcctaaagcccctagaggaagttctagccaaggaccatctcaaacgagcaccccaacggatgtgaccgccatccatctctag

SEQ ID NO: 28194 - DNA, 879 bp, synthetic construct
  misc_feature 1..879: note = Description of Artificial Sequence: Synthetic coding sequence
  source 1..879: mol_type = other DNA
atggaactactgtgctgtgaaggtactaggcacgcccctagggccggacctgaccctagattgctgggagaccagcgcgtcctgcagagtctgctaagactagaggagcggtatgtccccagagcttcttacttccaatgcgtgcagagggaaattaagcctcacatgcggaagatgttagcctactggatgctagaggtatgcgaagaacagcgatgtgaggaagaagtattccctctcgccatgaactacctggaccgatacctgagctgcgttcctacgcgcaaggcccagctccagttgctgggcgcagtgtgcatgctgctggcctcaaagctgcgggagactacacctctgacaatcgagaagctttgtatatataccgatcacgccgtcagtcccagacagttaagggactgggaggtcctcgtgcttgggaaactgaaatgggatcttgccgctgttattgcccacgacttcctggcctttattctccatagactgtccctcccccgagacagacaagccttggtgaagaagcatgcacaaacattcttagcactttgcgcgacagattacacctttgctatgtaccccccatcaatgatcgccacgggtagtatcggagcagcggtgcagggattgggtgcctgctccatgtcaggagatgaacttaccgagttgttggccggaatcacagggaccgaggtagactgtctgcgggcttgccaagaacaaattgaggctgcactgagagagagccttcgcgaggcctcccagacctcatctagcccggcacccaaagcaccaaggggctcttcaagccagggaccgtctcagacatccactcccactgatgtgaccgcaatccatttgtag

SEQ ID NO: 28195 - DNA, 663 bp, synthetic construct
  misc_feature 1..663: note = Description of Artificial Sequence: Synthetic coding sequence
  source 1..663: mol_type = other DNA
atggaactcttgtgttgcgagggaacccggcacgcccctcgcgcaggccctgatcccagactgctcggggaccaaagagtgttgcagagtcttctcaggctggaagaaaggtacgttccaagggcctcatattttcaatgcgtccagcgggagatcaagccacatatgcgtaagatgttggcttattggatgttagaagattgggaggtcctcgttctgggaaagctgaaatgggatctggccgctgtgattgcacatgacttccttgccttcattctccacagacttagtctgcctagggatagacaggcactggtgaaaaagcatgcgcagacctttttggccctctgtgccaccgattacacattcgcaatgtatcctccctctatgatagcaaccgggtcaatcggggctgccgtccaggggctgggtgcgtgctccatgtccggcgatgaattgacggaattgctggcgggtatcacaggcactgaggtggactgcctgcgagcctgccaggagcagattgaggccgctctgagggagtccctccgtgaagcaagccaaacgagttcctcccctgctcctaaggcacctaggggctcctcgagccagggtccttcacagacaagcactccgacagacgtaacggccatccacttatag

SEQ ID NO: 28196 - DNA, 291 bp, synthetic construct
  misc_feature 1..291: note = Description of Artificial Sequence: Synthetic coding sequence
  source 1..291: mol_type = other DNA
atgtaccctcccagtatgatcgctactgggtcaattggcgcagccgtgcaagggctcggagcatgctctatgagcggcgatgaactgactgaactgctggctggtattacaggaactgaggtggactgtctgagggcatgccaggaacagattgaggccgcacttcgagagagcctccgggaggcctcccagacctccagtagcccagctcccaaggcgccacgcggaagtagcagtcaagggccatctcagaccagcacgccaacagatgtcacggctatccatctgtag

SEQ ID NO: 28197 - DNA, 132 bp, synthetic construct
  misc_feature 1..132: note = Description of Artificial Sequence: Synthetic coding sequence
  source 1..132: mol_type = other DNA
atgaattatctggatcgatacttatcgtgcgtccccacacgcaaagcccagcttcagctgctgggggcagtatgcatgctgctggcctcgaaattgcgcgaaaccacccccctgacgatcgaaaagttgtag

SEQ ID NO: 28198 - DNA, 357 bp, synthetic construct
  misc_feature 1..357: note = Description of Artificial Sequence: Synthetic coding sequence
  source 1..357: mol_type = other DNA
atgaactaccttgacagatacctctcatgcgttccaaccagaaaggcacagttgcagctgttgggggctgtctgtatgctcctcgcctccaaactgagggaaacaacccctctgaccattgagaagctgtgtatctacactgaccatgctgtatcccccagacagcttagagactgggaggtgctcgtgcttggtaagctcaagtgggatctcgctgctgtcatcgctcatgatttcttagcttttatcctgcacagactgtccctccctcgggaccgccaggcgctggtaaagaagcacgcacagaccttcctggcgctgtgtgctactgattatacttttgccatgtacccatag

SEQ ID NO: 28199 - DNA, 33 bp, synthetic construct
  misc_feature 1..33: note = Description of Artificial Sequence: Synthetic coding sequence
  source 1..33: mol_type = other DNA
atgtaccccccttccatgattgcaaccggctag

SEQ ID NO: 28200 - DNA, 636 bp, synthetic construct
  misc_feature 1..636: note = Description of Artificial Sequence: Synthetic coding sequence
  source 1..636: mol_type = other DNA
atgaactatctggataggtacttgagctgtgtgcctacacgcaaggcgcaactgcagctacttggagccgtgtgtatgctgctggcaagcaagctcagggaaaccacgcctcttacaatcgaaaagctctgcatatatactgatcatgcggtttcccccaggcagctgagagattgggaagttctggttctgggaaagcttaaatgggacttggccgctgtcatagcccatgacttcctggcattcatactgcaccgcctttctctaccgagggacaggcaggcattagtaaagaagcacgcacaaacctttctcgctttatgcgctactgactacacatttgctatgtatccacctagtatgatcgccacagggtctataggggctgctgtgcagggtctcggtgcgtgctctatgtctggagatgagttgaccgagctgctggctggcatcacggggaccgaggtagattgtctccgtgcttgccaggagcagatcgaggcggctctgcgggaatcactacgcgaggcctcccagacatcctccagcccagcaccaaaggctccgaggggctcgtccagccagggacccagtcaaactagcacacctaccgatgtgaccgctattcacttgtag

SEQ ID NO: 28201 - DNA, 1233 bp, synthetic construct
  misc_feature 1..1233: note = Description of Artificial Sequence: Synthetic coding sequence
  source 1..1233: mol_type = other DNA
atgccaagagagcggcgagaaagggatgctaaagagcgggacacaatgaaagaagacggtggagccgaattttctgcaaggagccgcaagcgcaaggccaacgttaccgtcttcctgcaagaccccgacgaggaaatggccaagatcgaccgaactgctagagatcaatgcggctcgcaaccatgggacaacaatgcggtgtgtgcagacccctgttctctgattcccactcctgataaggaggatgatgaccgggtgtaccctaacagtacttgcaaaccgcgaatcattgccccaagcagaggttccccactgcctgtgctctcatgggccaacagggaagaagtttggaagatcatgctgaacaaagagaagacctaccttcgagaccagcattttttggaacaacacccgctactgcagccgaaaatgagggcaatcctcttggattggttgatggaagtgtgcgaagtgtataaactgcacagagagacattttacctggcccaggatttctttgaccggtacatggccacacaagagaacgtcgttaagaccttgctgcaactgattggtattagcagcctatttatcgctgccaagttagaggaaatctaccctccgaaattacatcagttcgcttacgtcacagacggcgcatgctctggagatgaaatcctgacaatggagcttatgattatgaaggctctgaagtggcggctgtcgccacttactatcgtgtcatggctgaatgtttatatgcaggtggcttacttaaatgacctgcacgaggtcttgctgccccagtatcctcagcagattttcatacagatagcagagcttctcgatctctgtgtactcgacgtggactgcctggaattcccatacgggatcctcgctgcttctgcattataccacttctcgagcagcgaactgatgcagaaggtaagtggctaccaatggtgtgatattgaaaactgtgtcaagtggatggtaccattcgctatggtcattagggaaactggaagctctaaactaaaacacttccgcggtgtggccgacgaagatgcacataatatccagacccaccgagattcactggatctgctggacaaggctagagccaaaaaggccatgctttcagaacagaatcgcgcatcccccctaccgtcaggactgttaacaccaccccagtcaggtaagaagcagtcttcgggacccgagatggcttag

SEQ ID NO: 28202 - DNA, 1104 bp, synthetic construct
  misc_feature 1..1104: note = Description of Artificial Sequence: Synthetic coding sequence
  source 1..1104: mol_type = other DNA
atgcccagggagcgaagagaacgagacgccaaggagcgtgatacaatgaaggaagacggaggtgccgaattcagtgcccgatcacgaaagcgtaaggctaacgtaaccgtcttcctgcaagaccccgacgaagagatggcaaagatcgatcggacagcccgagaccaatgcggctcgcagccctgggacaacaatgccgtttgtgccgatccttgtagcttaattccgactccagacaaagaagatgatgatcgagtttatcctaattccacttgcaagccgaggatcatcgcccctagccggggaagtccactgcccgttttgagttgggcaaatcgggaggaggtctggaagattatgttaaataaggagaaaacgtaccttcgggaccagcactttcttgagcagcacccactgctgcagccaaaaatgagagcaattctactcgactggctgatggaggtgtccttgtctttacccgagatctaccctcctaagctccaccaatttgcttacgtgacagatggagcgtgctccggcgacgaaattctgaccatggagttgatgatcatgaaagctctcaaatggagactgagtcccctcacaatcgtgtcatggctcaatgtgtacatgcaggtagcctatctgaatgacttacacgaggtgctgctgccacagtacccacaacagatattcattcagattgcagagctcctcgatctctgcgttctggatgtggattgtctcgaatttccgtacggcattttggccgcttcagctctctaccatttctcttcatctgagttaatgcagaaggtgagcggctaccaatggtgcgatatagagaactgcgtgaagtggatggtgcccttcgctatggtgataagggaaacaggaagttccaagctcaagcattttaggggagtcgccgacgaagacgcccataatattcaaacacatcgagactccctcgaccttttagacaaggcacgcgctaaaaaggccatgttatccgaacagaaccgagcaagtcctctcccttcaggactgttaactcctcctcagtcaggtaagaagcagtcaagtggtccagagatggcatag

SEQ ID NO: 28203 - DNA, 1188 bp, synthetic construct
  misc_feature 1..1188: note = Description of Artificial Sequence: Synthetic coding sequence
  source 1..1188: mol_type = other DNA
atgaaagaggacggcggtgcagaattctccgcaaggtccagaaaaagaaaagccaacgtcaccgtattcctgcaggaccccgacgaggagatggcaaaaatagaccggactgctagggatcagtgtggcagccagccttgggataacaacgctgtgtgtgccgacccctgctcactcattcccacacctgacaaagaggatgatgacagagtgtaccctaacagcacttgtaaaccccgaattatagcccctagtaggggtagccccctgccggtcctatcctgggcaaatagggaggaagtttggaaaatcatgctcaataaggaaaaaacctacttacgggatcagcatttcttagagcaacatcccctcttgcaaccaaagatgcgagccattttgctagattggctcatggaagtgtgcgaggtttataagctgcatagagagaccttttacctggcccaggatttcttcgatcggtacatggcgacgcaggaaaatgttgtgaagactttactgcaactcattggtataagttccctattcatcgccgcaaagttagaggagatatacccgccaaagttgcaccaatttgcctatgtgacggatggagcctgctctggtgacgaaatcctcaccatggagctgatgatcatgaaggctttaaagtggaggctgtccccactcactatcgtgtcctggcttaacgtttacatgcaagtggcgtatctgaatgatctgcatgaagttttacttccccagtatcctcagcagattttcattcagatagccgagctcctggacctctgtgtcttggatgtggattgcctcgaatttccttacggaattctggcagcttctgcattataccacttttccagctctgagctgatgcaaaaggtgagcggctatcagtggtgcgacattgagaactgtgtgaaatggatggtcccttttgcaatggtgattcgggagaccggaagttccaaactgaagcactttcgcggtgtggccgacgaagatgcccacaatatacaaacgcaccgcgactctctggacctgttggacaaggccagagcaaaaaaagctatgttgagcgagcagaaccgcgcttcaccactcccttccggtttgctgacacccccacagtctggaaagaaacagagctctggtccagagatggcctag

SEQ ID NO: 28204 - DNA, 2106 bp, synthetic construct
  misc_feature 1..2106: note = Description of Artificial Sequence: Synthetic coding sequence
  source 1..2106: mol_type = other DNA
aggacttcatggccatccgaactcgccgctgaaaagggtaatttcgaagctgcagttaaactgggcattgcatatctgtacaacgagggcctcagcgtctctgatgaggcacgggcagaggtgaatggtctgaaagcatcccgtttcttctccctggcggagcgacttaatgtgggcgctgctcctttcatctggctcttcatcagacccccatggtcagtttccggctcttgctgtaaagcagtggtacacgaaagtcttagggctgaatgtcaattgcagcggacccacaaggctagcatactgcattgcctcgggcgagtgctgtccctgtttgaggatgaagaaaaacagcagcaggcccacgacttgtttgaggaggcggctcatcagggatgtctgacttcatcctaccttttgtgggaaagtgatcggaggactgatgtgtctgaccccggacgatgtctgcatagcttccgcaagctgcgagactacgctgctaagggctgttgggaagcccaactgtccctcgccaaggcctgcgccaatgcgaatcaattgggcctcgaagtgcgtgcctctagtgaaattgtgtgtcagctctttcaggcttcacaggcagtttcgaaacagcaggttttttcagtgcagaagggcctgaacgatacaatgagatacattctcattgactggttggttgaagttgctaccatgaaagacttcactagcctgtgtctgcacctcaccgttgagtgcgtggataggtatcttcgacggaggcttgttcctaggtatcgccttcagctgctgggcattgcgtgtatggttatctgtacgaggttcatctccaaggaaatcctcactatcagagaagcagtgtggctcacagataacacttataagtatgaggatctggtcaggatgatgggagaaattgtctcagctttagaggggaaaataagggtccccacagttgtggattataaggaagtcttattaaccctcgtccccgtcgagctgcgtacacagcatctgtgttcttttctttgcgagttgtccctcctgcatacatcactgtcagcatacgcccctgcgagactagcagcagctgctctgctcttagcacggcttacccacggacagacccagccgtggaccacacagctgtgggatcttaccgggtttagttacgaggacctgatcccatgcgtcctcagcttgcacaaaaagtgcttccacgacgacgcacccaaagactataggcaggtgtcactgacagcagttaaacagaggtttgaggataagagatacggggagatttcccaagaagaagtcctgagctacagtcaactgtgtgccgctctgggagtgacacaggactcgcccgaccctccaactttcctgtctactggagaaatacacgcttttctaagcagtcctagcggcaggagaacaaagcgaaagagggagaacagcctacaagaagatcgtggaagttttgtcactaccccgacagcggagctgtcaagccaggaggaaaccctcctcgggagcttcctggactggagtctggactgctgtagcggatacgaaggcgaccaggagtctgaaggcgagaaggaaggagacgtgaccgcgccatccggaatcctggatgtcaccgtggtctatctcaaccctgagcaacattgctgtcaggaatccagcgacgaggaggcctgcccagaagacaagggtccccaagacccacaggcccttgcactggatacacagatccccgctacccctggtcctaagcctctcgtcagaacgtcccgtgagccgggtaaagacgtaacgactagtggctattccagcgtgagcactgccagtccgacatcttcagttgacggaggtctgggggcacttccgcagccgacaagtgttttgtctcttgactcagattcccatacccagccctgtcaccaccaggccaggaagagctgccttcagtgtcgccctccctccccaccagaaagcagtgtgcctcagcaacaggtgaaacggattaacctgtgtatccattctgaggaggaagatatgaacctggggctcgttcgcctgtag

SEQ ID NO: 28205 - DNA, 2361 bp, synthetic construct
  misc_feature 1..2361: note = Description of Artificial Sequence: Synthetic coding sequence
  source 1..2361: mol_type = other DNA
atgggctcagggggtgtggttcactgccgctgtgctaagtgtttctgctatccgacaaagaggaggatccgtaggcgaccaagaaacttgaccatcctctcattgccggaagatgtgctcttccatatccttaagtggctgtccgtcgaggacattcttgccgtacgggctgttcactcacagctgaaggatctcgtagataatcacgcgtcagtctgggcctgcgcaagttttcaggagttgtggcccagtcccggaaatctaaaattgttcgagcgtgcggcagagaagggcaacttcgaagcggcagtcaagctggggattgcctatctttacaacgaagggctatctgtgtctgatgaggccagggctgaggtgaacggcctgaaggcttcccgattcttctccctggccgaacggctgaacgtcggtgccgctccatttatctggttgttcatcaggccaccttggtccgtctcgggatcatgctgtaaagcagtcgtgcatgaatctctacgggcagagtgccaactgcagaggacgcacaaggcctcaattttacattgccttgggagagtactgtcactgtttgaagacgaagaaaagcagcagcaggcccatgatttgttcgaagaagccgctcaccaggggtgtttaacgtccagttatttactatgggagtccgacagacgaactgatgtctcagaccccggaaggtgcctccacagtttccgtaagctccgtgattacgcagccaagggctgttgggaggcgcaattgtcattggctaaagcctgtgccaatgctaaccagctcgggttggaggttcgggctagcagtgaaattgtttgccagttattccaggcctcccaggcagtgagcaaacagcaggtgttctccgtgcagaaaggcctgaatgatactatgagatatatcttaattgactggctggtggaggtggcaaccatgaaggacttcaccagcctgtgcctgcacctgactgttgagtgcgttgatcggtatctccgaagacgcctggtgcccagatatcgactgcagctactgggcatagcttgtatggtgatctgtacacgctttatctccaaggagatccttaccataagggaggccgtgtggttgaccgataacacgtacaagtacgaagacctggtgcggatgatgggagagatcgtatccgctctggaaggcaagattcgggtgcccaccgtggtagactacaaagaggtgctactgacactcgtgcctgtagaacttcggacccaacatctgtgctccttcttatgtgaactgtctttgcttcacacatctctgtcagcttacgctcccgctagattagccgcagccgcattgctgctggcacggcttacacatggccaaacccagccttggacaactcagctctgggatttaaccgggttctcctacgaggacctgatcccctgtgtactgtccctacataaaaaatgcttccatgacgatgctcctaaggattacagacaggtcagcctgactgccgttaagcaaaggtttgaggataagagatatggcgagatttcacaagaagaagtcttatcctattcccagttgtgtgctgccttgggcgttacacaggatagccctgaccccccaactttcctgtctacaggcgaaattcacgcttttctgagcagcccctccgggaggcgaacaaaaaggaagagagagaactccttgcaggaggaccgtggaagctttgtgaccactccaaccgccgagctgtccagtcaggaagagactttgctgggttcttttctagactggtccttggactgttgctccggctatgagggggatcaggaatctgagggtgaaaaagaaggggacgtaacggctcccagcgggatcctagatgtgaccgttgtatatctaaacccagaacagcactgctgtcaggaatccagcgatgaagaagcttgtccggaggacaagggccctcaggaccctcaagccctggccttggatactcagattcctgcaaccccgggtccaaagcctctggtccggacctcacgggagccgggtaaagatgtgacaacatcaggatattcctccgtgtccaccgcctctcctacaagttcagttgacgggggattgggggctttgccccagcctacctctgtgctgtccctagattctgactcccacacgcagccatgccaccaccaggccaggaaatcatgtctccaatgcagaccaccatcaccaccggaaagcagcgtaccgcagcagcaggttaagcgtatcaacctttgcatccattcagaagaagaagatatgaatttaggcttggtgagactttag

SEQ ID NO: 28206 - DNA, 888 bp, synthetic construct
  misc_feature 1..888: note = Description of Artificial Sequence: Synthetic coding sequence
  source 1..888: mol_type = other DNA
atgattgaggtgcttaccacaactgattcccagaagctgctacatcagcttaatgctctcctcgagcaagaaagccggtgccagcctaaagtgtgtgggctccgcctgattgagagtgcccacgacaatggtcttcgcatgaccgccagactccgggatttcgaggtgaaagacctccttagcttgacccagtttttcggtttcgacactgagacattctccctcgctgttaatctgctggaccgattcctcagtaaaatgaaagtccaaccaaaacacctgggttgcgtaggcttgagttgtttttacctcgctgtcaagagtatcgaagaggagagaaatgttccactggcgacagatctaatccgtatttctcagtacaggttcacggtgtctgacttgatgcgcatggagaagatcgttctggagaaagtttgctggaaggtgaaagccacaaccgcttttcagttcctccaactgtattattctctacttcaggaaaaccttcctcttgagcgcaggaactccataaatttcgaacgacttgaggcccagctaaaagcctgtcattgccgaattattttttccaaagccaaaccctctgtcctggccctgagcataatcgctttggagattcaagcccagaagtgcgtagagctcacagaaggcatcgaatgtttgcagaagcactccaagatcaatggcagggacctgacgttctggcaggaattggtaagcaaatgtctgactgagtacagttctaataagtgttcaaaaccaaatgtgcaaaagctgaagtggatcgtgtctggaagaacagcacgccagctgaagcattcctattaccgcatcactcatctcccaacgattcccgagatggtaccctag

SEQ ID NO: 28207 - DNA, 888 bp, synthetic construct
  misc_feature 1..888: note = Description of Artificial Sequence: Synthetic coding sequence
  source 1..888: mol_type = other DNA
atgatcgaggtactgaccaccactgactctcagaagttgctgcaccaattaaatgcactactagagcaggagagcagatgccaacccaaagtgtgtgggctccgattgattgagtccgcacatgataacggcttgcgaatgaccgctcggttgagggattttgaagttaaagacctgttgtcactaactcagttctttgggtttgacacagagaccttctcactggccgtgaaccttcttgacagatttctctctaagatgaaggtacagccaaaacaccttggatgcgtgggccttagttgcttctatctggccgtgaagtctatcgaggaggagcgcaatgtgcccctagcaacagacctcattcggatctctcagtaccgctttacagtcagcgatctgatgcggatggagaagatcgtgttggaaaaggtgtgttggaaggtgaaggctactactgcgtttcaatttttgcagctgtactactccctgcttcaagagaacctccccttggaacgccgtaacagcattaatttcgaaaggctcgaggctcagctgaaagcatgtcactgtaggatcattttttccaaagccaagcctagtgtcctggcactgtctatcatagcactcgaaattcaggcccagaaatgcgtagaacttaccgaaggaatagagtgcctgcagaagcatagtaagattaatggtagagatctgactttttggcaggagcttgttagcaaatgcttaacagagtacagtagtaataagtgctcaaagcctaatgtgcaaaaacttaaatggatcgtgtccgggcgaactgccagacagttgaaacacagctactatcgcattactcacctccctaccatccctgagatggtcccttag

SEQ ID NO: 28208 - DNA, 411 bp, synthetic construct
  misc_feature 1..411: note = Description of Artificial Sequence: Synthetic coding sequence
  source 1..411: mol_type = other DNA
atgatcgaagtgttgactacaacagatagtcagaagttactacatcaactaaacgcacttcttgaacaagaaagtaggtgtcaaccaaaagtttgcggcctgcgattgatcgagagtgcacatgataacggactccgcatgaccgccagactgcgcgatttcgaggttaaggacttgctatcgctcacccagttttttggatttgacaccgagacatttagtctcgccgtgaacttgctcgatcggtttttgtctaaaatgaaggtccagcccaagcacctgggatgtgtcgggctttcttgtttctacctggcggtgaaaagcattgaggaggagcgcaatgtaccgttagccactgatctcattaggatctcccagtatcggtttaccgtatccgatttaatgcgatag

SEQ ID NO: 28209 - DNA, 411 bp, synthetic construct
  misc_feature 1..411: note = Description of Artificial Sequence: Synthetic coding sequence
  source 1..411: mol_type = other DNA
atgattgaagtgctcactacaaccgattcgcagaaactcctccatcagctcaatgccttgctggaacaggagtcaagatgtcagccaaaagtgtgtggcctccggctgatcgagtcggcgcacgataatggtctgcggatgaccgccagattacgagacttcgaggtcaaggacctgctgagcctcactcaatttttcgggttcgataccgaaacattctcattagcagtgaacctcctggatcgcttcttgagtaaaatgaaggtgcagcctaagcacctggggtgcgtgggcctgtcatgcttttatctcgccgtcaaatcgatcgaagaagagaggaacgtacccctagcaacagacctgatccgcatttcccagtacaggttcaccgtgtccgatttaatgaggtag

SEQ ID NO: 28210 - DNA, 504 bp, synthetic construct
  misc_feature 1..504: note = Description of Artificial Sequence: Synthetic coding sequence
  source 1..504: mol_type = other DNA
atgtctgccaaagatctgatgagaatggaaaaaattgtgctcgaaaaagtgtgttggaaagtcaaagccaccacagcttttcagttccttcaactgtattattctctgcttcaggagaacctgccactggaacggaggaacagtattaattttgagagactcgaggctcagctgaaggcatgccattgccggatcattttctcaaaagcaaaaccctcagttctggctctttccatcatcgctttggaaattcaggcccaaaaatgtgttgagctaaccgaaggaatcgagtgtctccagaagcattccaagatcaacggacgagatctcaccttctggcaggagctggtgagcaaatgtcttacagaatactcaagtaacaagtgctctaaacctaatgttcaaaaacttaagtggattgtgagcggtagaaccgccagacagctcaaacacagctattacaggatcacgcaccttcccacgatccccgagatggttccatag

SEQ ID NO: 28211 - DNA, 348 bp, synthetic construct
  misc_feature 1..348: note = Description of Artificial Sequence: Synthetic coding sequence
  source 1..348: mol_type = other DNA
atgattgaggtgctgacgacaactgattctcagaaactgttacaccaactgaatgcattattggaacaggaatctcgctgccagcccaaggtctgtggtctgagactgatagagtcagctcacgataatggactgcgcatgaccgccaggttgcgggacttcgaggtgaaggaccttttgtcgctgactcagttcttcggctttgacactgaaacgttcagtctggccgttaaccttctggaccgcttcttgtctaagatgaaagtgcagcctaagcatctgggatgtgtcggcctgtcatgtttttacttggccgtgaagtccatcgaagaggaacgaaacgtgtag

SEQ ID NO: 28212 - DNA, 486 bp, synthetic construct
  misc_feature 1..486: note = Description of Artificial Sequence: Synthetic coding sequence
  source 1..486: mol_type = other DNA
atgaggatggagaagatagtgctggagaaagtgtgctggaaagtcaaagccaccacggccttccagtttctccagctgtattacagtctcctccaggagaacctgcctctcgaacggagaaattcgattaactttgagagacttgaagcgcagctgaaggcttgccactgccgaatcattttcagcaaagccaaacctagtgtgctcgctttaagcattattgccctggagattcaggctcagaagtgtgttgaactgaccgagggtatcgagtgcctacagaaacattctaagattaacggcagagatctcacgttttggcaggagctagtgagtaagtgtttgaccgaatactctagtaataagtgttcaaagcctaacgtccagaagttgaagtggattgtttcaggcaggactgcaagacagctcaaacactcatactacagaattactcacttgccaacaatccccgaaatggtgccatag

SEQ ID NO: 28213 - DNA, 486 bp, synthetic construct
  misc_feature 1..486: note = Description of Artificial Sequence: Synthetic coding sequence
  source 1..486: mol_type = other DNA
atgagaatggaaaaaatagtgctcgagaaggtgtgttggaaagtcaaggctaccaccgcttttcagttccttcagctgtactatagcctgctccaggaaaacctgccactcgagcgacgcaactccattaacttcgagcggttagaggctcaattgaaggcgtgtcactgtcggatcatcttctcaaaggcgaaaccctctgtgctagcgctgtcaataattgccttagagatacaggcacagaaatgtgtggaactgactgaaggcatcgaatgccttcagaaacatagcaagatcaatgggagagatctgacattctggcaggaactggtgtccaagtgcctcacagagtattcatccaacaagtgctccaagccaaacgtgcagaaactgaaatggatagtatccggtaggactgctcggcagcttaagcactcctattatcggattactcatctgcctaccatcccggaaatggtcccttag

SEQ ID NO: 28214 - DNA, 105 bp, synthetic construct
  misc_feature 1..105: note = Description of Artificial Sequence: Synthetic coding sequence
  source 1..105: mol_type = other DNA
atgatcgaggtccttactactactgactcgcaaaagttactgcaccagttgaacgctcttctggagcaggagagccgctgtcaacccaagaggcatttcctctag

SEQ ID NO: 28215 - DNA, 1035 bp, synthetic construct
  misc_feature 1..1035: note = Description of Artificial Sequence: Synthetic coding sequence
  source 1..1035: mol_type = other DNA
atgaaagacctcggtgctgagcatctggccggacacgagggtgtacagctgctaggactgctgaatgtgtatctggagcaggaggagagattccaacccagggagaagggactttccttgattgaggcaactcctgagaatgacaataccctgtgccccggactgcgcaatgcaaaagtggaagatctcagatccctcgccaacttcttcgggagttgcacagagacattcgtcctagccgtgaatatattggacaggtttttagcactcatgaaggtgaagcccaagcatctgagctgtatcggcgtctgttcatttctacttgcggctcgcatcgtggaagaggactgtaatattccctccactcacgacgtaatcaggatctctcagtgtaaatgcacagcttcagatatcaaaagaatggaaaagatcatttccgaaaaacttcattacgaactcgaagccactacagctttaaactttctgcatctgtatcacaccattatcttgtgccatacaagcgagcggaaggagattctaagcctggataaactggaggcgcagctgaaggcatgcaactgccgcttgatcttttccaaagccaagccttcagtcctcgccctttgcctcctcaaccttgaagtggagaccctgaagtctgtcgagctgctagaaatactgctgctggttaagaagcattctaaaatcaacgacaccgaattcttctactggagggaactggtgtccaaatgtttggccgaatactcaagcccagagtgctgtaaaccagacctgaaaaagcttgtgtggatcgtctccaggcgtaccgcacagaacctgcacaattcttattactcagtgcccgagctgcctactatccccgagggaggatgttttgacgagtctgagtctgaagactcttgcgaggatatgagctgcggcgaggagagcctgtccagtagccctccaagcgatcaggaatgcactttcttctttaatttcaaggtcgctcagaccctttgctttccaagctag

SEQ ID NO: 28216 - DNA, 1035 bp, synthetic construct
  misc_feature 1..1035: note = Description of Artificial Sequence: Synthetic coding sequence
  source 1..1035: mol_type = other DNA
atgaaggaccttggggcagaacacctcgccggacatgaaggagtccagcttctcggcctgctgaacgtatacttggagcaggaagagcgatttcagccaagagagaaaggtctgtccctcatcgaagctacccctgagaatgacaataccctgtgccctgggctcagaaatgctaaagtggaagatttgcggagcttggcaaacttttttggttcatgcacagaaacattcgttctggccgtcaacatcctcgaccgcttcttggcacttatgaaagtcaagcccaagcacttatcctgtataggcgtttgcagtttccttctagctgcacgaattgtggaagaagactgcaatatcccttccacccacgatgtgatacgaatctctcagtgtaagtgtaccgcatcggacatcaaaagaatggagaaaattatcagcgaaaaactccactatgagctcgaggcgacgacagccctgaacttcttgcacttgtaccacactattatactatgccataccagcgagaggaaagagattctttctctggataagttggaggcccaactaaaggcttgcaactgcagactcattttctcaaaagcgaaaccttctgtgttggcgctgtgcctcctcaacctcgaggttgaaacgctgaagtccgtggagctactggagattctactcctggtcaaaaagcatagtaagatcaatgataccgagtttttctactggcgtgagctcgtctcaaaatgcctggctgagtacagtagtcctgagtgctgtaagcctgatttaaagaaactagtgtggattgtaagcaggagaaccgcccagaacctacacaactcctattactccgtgcctgagctgcctaccatacctgaaggtgggtgtttcgatgagtccgaaagtagtgtggctcaggcgggagttcagtggcctgacctgtcaagttttcagcctcctccaacacgcttcaaaagattctcatgtctcagtttgcggtcctcctgggactactcctcttggacctag

SEQ ID NO: 28217 - DNA, 1035 bp, synthetic construct
  misc_feature 1..1035: note = Description of Artificial Sequence: Synthetic coding sequence
  source 1..1035: mol_type = other DNA
atgaaggatctgggcgcagagcatctggctggccacgagggtgtgcagctactgggcttgcttaacgtttacctggaacaagaggaacgattccaacccagggagaagggcctgtccctgatcgaagccacgccagagaacgataatacactctgccccggactccggaacgccaaggtggaggatttgaggtccctagccaatttttttggctcatgcactgagactttcgttctggctgtgaacatactcgacaggttcttggcactgatgaaagtaaagcctaaacacctgagttgtattggcgtttgctccttcctgctggccgcacgcatcgtagaagaagactgtaacataccctccacccacgacgtcattcggatcagccagtgtaagtgcacagcctccgatatcaagcgcatggaaaaaattatcagtgagaaactccactatgaactcgaagccacaaccgccctcaacttcctgcacctctatcatactatcattctgtgccacacgagtgaaaggaaggaaatcctgtcattggataagctcgaggcacagctaaaagcttgtaactgccggctgatcttcagtaaggcaaagccatccgtcctcgcactctgtctcttgaacctggaggtggaaacgctcaagagtgtggagctcctcgagatccttttgctcgtgaagaagcactccaaaattaacgatacagaatttttctactggagagaattggtctctaaatgcctggcggaatactcaagtccagagtgctgcaaaccagacctgaaaaagctggtgtggatcgtcagtcggaggaccgcacagaatttacacaattcttactactcagtgccagagcttcctactattcccgaaggcggatgtttcgacgaatccgagagtgaagattcttgcgaggacatgagctgcggtgaggaatctctgtcgtcgagccctccttctgaccaggaatgcacgtttttttttaatttcaaggttgcacagaccctttgcttcccctcctag

SEQ ID NO: 28218 - DNA, 1035 bp, synthetic construct
  misc_feature 1..1035: note = Description of Artificial Sequence: Synthetic coding sequence
  source 1..1035: mol_type = other DNA
atgaaagatttgggggctgaacacctcgctggacatgagggtgtgcagcttctcgggctgcttaatgtgtatctagagcaagaagaaaggttccagcctagagagaaaggactgtcattgatcgaggccacacctgagaacgacaacaccctgtgtccaggactgcgcaacgctaaagtagaggacctgagatcgctggcaaatttcttcggctcatgcactgaaaccttcgttctggctgttaacatcctagatcggtttctcgcgttgatgaaagttaagccaaagcacctctcctgcattggagtttgttccttcctgttggcagctcggattgtggaagaagactgcaacatcccgtccacacacgatgtgattcggattagtcagtgcaagtgcacggcctcagatattaaaaggatggagaaaattatctccgaaaagctgcactatgaattggaagccacaactgccctgaattttctccatctgtatcatacaattatactgtgtcatacttcagagaggaaagagatcctctctttggacaagcttgaagctcagctcaaagcgtgcaactgcagactgatttttagtaaagctaagccctctgtgctcgcgctctgtttgctgaacctggaggtggagacccttaagagtgtggagctgttggagatacttctgttggtaaagaaacattcaaagattaatgatacagaattcttttactggcgtgagctggtgtccaagtgcctggcagaatattcttcaccagagtgctgcaagccagacttgaaaaagcttgtctggatagtctccaggcgtacggctcagaacttgcataactcctactactctgtccccgaacttccaacaatcccagaaggtggatgttttgacgaaagcgagagcgaagactcctgtgaagacatgtcgtgtggcgaggagagcctttcatcatctcctccttcagaccaggagtgcacattcttctttaacttcaaagtggctcagaccctatgcttcccctcgtag

SEQ ID NO: 28219 - DNA, 483 bp, synthetic construct
  misc_feature 1..483: note = Description of Artificial Sequence: Synthetic coding sequence
  source 1..483: mol_type = other DNA
atgaaagatctcggcgcagagcatttggccggacatgagggtgtccagctgctgggcctcctcaatgtgtatttggagcaggaagaaagattccagcctagggagaaaggactcagtctgatcgaagcaacacccgaaaacgacaacaccctatgcccagggctgcggaatgccaaggtcgaagatctacgctcgctggctaatttcttcggctcatgcaccgagacgtttgttctggctgtcaatattctggacaggttcctggcattgatgaaagtgaagcctaagcatttgagctgtatcggtgtgtgttctttcctgttagcagctcgaattgtggaagaggattgtaacatcccctccacccacgacgttatacggatctcgcaatgcaaatgcaccgcctctgacatcaaaagaatggagaagattatctctgaaaagctgcactatgaactagaggccacaacagccttaaactag

SEQ ID NO: 28220 - DNA, 972 bp, synthetic construct
  misc_feature 1..972: note = Description of Artificial Sequence: Synthetic coding sequence
  source 1..972: mol_type = other DNA
atgtatcacaactcctctcagaagaggcactggaccttttctagcgaagaacagctggcgaggttgagagccgatgccaatcgaaaatttaggtgcaaggcggtggccaacgggaaggttttgcccaatgatcccgtttttctggagccacatgaggaaatgactttgtgtaaatactacgagaagaggttgttagaattttgcagcgttttcaaacccgcaatgcctaggtcagtggtgggtaccgcttgcatgtattttaagaggttttacctcaataattctgtgatggaataccatccccgaatcataatgctgacttgcgcatttttagcatgtaaagttgatgagttcaatgtgtcctcacctcagttcgtggggaacctgagggaaagtccactcggccaagaaaaagccctcgaacagattctcgaatacgaactcctcctgatacaacagctgaatttccacctaatcgtgcacaacccatatcgtccttttgaggggtttctgatcgatttgaagacgagataccccattctggagaaccccgaaatacttcgcaaaacagcggacgatttcttgaacaggatcgcactcactgatgcttatctcctttacacaccttcccagattgccctcacagctatccttagcagcgcaagcagggctggcatcacaatggagagttacctttcggaatccctaatgcttaaggagaatcggacctgtctgagccagctgctagacatcatgaaaagtatgcgcaacctggtgaaaaagtatgagcctcccaggagtgaagaggtcgcagttctgaagcagaaattggagagatgccactcagcagaacttgctcttaacgtcattacaaagaaaagaaaagggtacgaggatgatgattatgtctccaagaaatccaaacacgaggaagaggaatggaccgacgacgacttagtggagagcctctag

SEQ ID NO: 28221 - DNA, 768 bp, synthetic construct
  misc_feature 1..768: note = Description of Artificial Sequence: Synthetic coding sequence
  source 1..768: mol_type = other DNA
atgcccagatcggtcgtgggcacagcctgcatgtactttaagcgcttctacttaaataactccgtgatggagtatcacccccgaatcatcatgctgacatgcgcatttcttgcctgtaaggtggatgagtttaacgtgtcctcaccccaatttgtgggtaatctgcgagagagccctttgggacaggagaaagcccttgagcaaatcctcgagtacgaactgctcctaatccagcagcttaattttcacttaatcgtgcacaatccctatcgcccattcgaaggctttcttatagacctgaaaacgcgttaccccattttggagaacccggaaatcctcagaaagactgccgatgactttctaaacagaatagccctgacagatgcctacctgctatacactccgtctcaaatcgccctgacagccatcctgtctagtgccagccgcgcagggattacaatggaatcctacctctccgagagtctcatgctgaaagagaacaggacctgtctatctcaacttctggatataatgaagtctatgcggaacttggtgaaaaagtacgaaccacccaggagcgaagaagttgccgtactcaaacagaagttagagcgctgccactccgcagagctcgcccttaatgtaataaccaagaaaaggaagggatatgaggacgatgattacgtttctaagaagtcaaagcatgaagaggtgtgcttcacacccaaaatgaacagcaagctcttcctgctatacattctggtgtag

SEQ ID NO: 28222 - DNA, 750 bp, synthetic construct
  misc_feature 1..750: note = Description of Artificial Sequence: Synthetic coding sequence
  source 1..750: mol_type = other DNA
atgccacggagcgtcgttggaacggcttgcatgtacttcaagcgtttctacctaaacaactcagtgatggaatatcatccccgaatcatcatgctcacctgcgctttcctggcgtgtaaggttgatgaattcaatgtctcatcaccccagttcgttggcaacctacgcgaatcccctctgggacaggagaaggctctggagcaaatcctcgagtacgaattactcttaatacagcagcttaatttccatctcatcgttcacaatccatatcgtcctttcgaaggattcctcatcgaccttaaaacccggtacccgatactcgagaatcccgagattctcaggaaaacggctgatgatttccttaatcgaattgccctgacggatgcttaccttttgtacacccccagccagattgcactaaccgccatattgagcagcgcctcccgcgctggcataactatggagtcttatctatctgagtctcttatgctgaaggaaaatcgtacatgtctttcccaactgctggatatcatgaaatccatgcgcaatctcgtgaaaaagtacgagccacccaggtctgaggaggtggctgtattgaaacaaaaattagagcggtgccactcagccgaactcgccctgaatgttattaccaagaagcgaaaaggatatgaggatgatgattacgtctctaagaaatctaagcacgaggaggaggaatggaccgatgacgatctggtggagtccctgtag

SEQ ID NO: 28223 - DNA, 1053 bp, synthetic construct
  misc_feature 1..1053: note = Description of Artificial Sequence: Synthetic coding sequence
  source 1..1053: mol_type = other DNA
atggttaccccatgtcctaccagtccaagttccccagctgcaagagcaggcaggcgggacaatgaccagaacttgagagctccagtcaagaagtctcgcagacctagactccgcagaaaacagcctctccatccactgaatccgtgtcccctcccgggagacagcggcatttgcgatctatttgagtcccctagctctggctctgatggagccgagagcccctccgcagctagggggggttcccccctgcctggaccagctcaaccagtagcccagctggatttacagacatttagggattacggacagtcctgctacgcttttagaaaggcccaggagtcccactttcaccctcgggaagccctggcgagacagccacaggtcaccgctgaaagcaggtgtaagctgctaagctggctcatcccagtgcaccggcagttcgggttgagcttcgaaagcctttgcctgacagttaatacgctcgatcggtttttgacaacgacccctgtggccgcagactgctttcagctcctcggcgtcacttctctgttgattgcctgcaaacaagtggaggtgcatccgcctcgggtgaagcagctgctcgctctgtgttgcggggctttctcaaggcaacagctgtgcaatcttgagtgcattgtcttacacaagctgcatttcacccttggggctccaaccatatcgttttttcttgagcactttacccacgcacgcgtcgaggcgggacaggcagaagcctccgaagctctcgaagctcaggccctcgccagaggggtcgccgaattgtctctcgctgactatgcctttacatcatactcaccaagcctgcttgccatctgttgcttggctcttgcggacagaatgctgagggtttcaaggccagtggacttaagactgggcgaccacccggaagctgccctcgaggattgtatgggaaaactccaactgctggttgccattaattccaccagtctcacccacatgctgcccgtgcagatttgcgaaaaatgcagtctccccccatcctctaaatag

SEQ ID NO: 28224 - DNA, 2181 bp, synthetic construct
  misc_feature 1..2181: note = Description of Artificial Sequence: Synthetic coding sequence
  source 1..2181: mol_type = other DNA
atggagggagagcgcaaaaataacaataagagatggtactttacccgggaacaactggaaaattcaccaagccgacgattcggcgtagacccagacaaagagcttagctatcggcaacaggccgcaaatctgttacaggatatgggccagcgtttgaacgtttcacagctgacaatcaacaccgccatcgtatacatgcaccggttctacatgattcagtccttcacgcagttcccagggaacagcgtagctcccgcagctctgttcctggcagccaaggttgaggagcagccaaagaagttagagcacgtaatcaaggttgcgcacacctgcttgcacccacaggagtcactcccagataccaggtcagaagcttacctccagcaggtgcaggacctggtgattctcgagtctatcattcttcaaacgttgggctttgaactgaccatcgaccacccccatacacacgttgttaaatgcacacaacttgtacgcgcttccaaagacctggcccagaccagctacttcatggccacgaactctctgcatctcaccacattcagtctgcagtacaccccccctgttgtggcgtgcgtctgcatccatctggcctgcaaatggtcaaattgggagatccccgtgtctacagatgggaagcactggtgggagtacgtggatgcaactgttaccctggaacttcttgatgagttgacgcatgagtttctgcagatcctggaaaagacccccaatagactgaaacggatttggaactggcgcgcatgtgaggcggctaagaaaacaaaggctgatgatcgcggaactgacgaaaaaacctctgaacaaacgatacttaatatgatcagccagagcagctcagacaccaccatagccggactgatgagcatgtcaacttctaccaccagcgctgtgccctccctgcctgtttctgaggagtcgagttccaaccttacaagcgtggaaatgctgccaggtaaaagatggctgtcttctcagccctcttttaagctggagcccacccagggacataggaccagcgagaatctcgcattgaccggggtggaccattctctgccccaggatggttctaatgcattcatcagccagaagcaaaattccaagagtgttccatctgcaaaagtttcactgaaggagtacagagcaaagcacgcggaggaactggcagcacagaaacggcaactggagaatatggaggcaaacgttaagtcccagtacgcctatgctgcccaaaatttgctgtcacaccatgattcacactcgtcggtaattttgaaaatgccgattgagggtagcgagaacccagagagaccttttctggagaaggcagacaagacagctcttaagatgcgaatcccagtagccggaggcgacaaggccgcaagttctaagccggaggaaatcaagatgagaattaaggttcatgccgctgctgacaagcataacagtgtagaggatagcgtgacgaagtctcgagagcacaaggaaaagcataagactcatccgagcaatcaccatcaccatcacaaccaccactcccacaaacattcccactcgcagcttcctgttggaactggcaataagagaccaggtgaccccaagcactccagccagacatcaaacctcgctcataagacgtactctctgagcagttccttttcttcatccagctccactcggaaacgaggcccatccgaggaaaccggcggtgctgtgttcgaccacccagccaagattgctaaaagcactaagtcctcttctctcaatttctcttttccgtcactccccacaatggggcagatgcccggacattcttctgacaccagtggactgtctttctcccagccttcctgcaagaccagggtcccccattcaaagctggataaggggcctactggagccaacggccacaacactacgcagacaattgactatcaggacactgtgaacatgctccactcactgctgtcggcccagggcgttcagccaacgcagccaacagctttcgaattcgtccggccttacagtgactatctcaatcccagaagcggtggcatctcctccagatcaggtaacacggataaacctcggccacctccactcccctctgagccacccccacccttgcctccactgcccaaatag

SEQ ID NO: 28225 - DNA, 723 bp, synthetic construct
  misc_feature 1..723: note = Description of Artificial Sequence: Synthetic coding sequence
  source 1..723: mol_type = other DNA
atggaggactatactaagatagagaaaatcggcgaggggacatacggagtggtttacaagggcaggcataagacaacgggccaggtggttgccatgaagaaaattcgcctggagtccgaggaggaaggagttccatcgaccgctataagggagatttccctgctaaaggagctcaggcaccctaacatcgtgtctctccaagacgttctgatgcaggatagtcgcctgtatcttatctttgaattcttaagtatggacctgaagaaatatctggattctatcccacctggccagtacatggacagtagcctggttaaagtcgtcacactttggtaccggtctcccgaggttttactcggatccgccagatactccacaccggttgatatttggtctattggaaccatattcgctgaactggccactaagaaacctctgttccacggcgactccgagatcgaccagctattccgcattttccgcgctctgggcacaccaaacaatgaggtgtggccagaggtggaaagcctccaggattacaagaatacatttcctaagtggaagcccggtagcctggccagtcacgtgaagaacctcgatgagaacggcctggatctgctgtccaagatgttgatttatgaccccgctaaaagaataagtggcaaaatggccttgaatcatccctacttcaatgatctggacaaccaaatcaaaaaaatgtag

SEQ ID NO: 28226 - DNA, 723 bp, synthetic construct
  misc_feature 1..723: note = Description of Artificial Sequence: Synthetic coding sequence
  source 1..723: mol_type = other DNA
atggaagactatacaaagatcgaaaaaattggagaaggcacatacggtgttgtctataagggcaggcataagaccaccggccaggttgtagcgatgaagaagatacgactcgaatcagaagaggagggagttccctccacagctattcgggagataagcctcctcaaagagctgcggcaccccaacatcgtgtccctacaggatgtcttgatgcaagactcccgcttgtacctcatctttgaattcttaagtatggatctgaagaaatatctcgacagcatcccccctggccagtatatggattcctctctggtgaaggtcgtcactctgtggtacagatcacctgaagtcctgctcggcagtgccagatatagcacgccagtggatatttggtccatcggcaccatattcgcagagttggccactaagaagcccctgttccatggtgacagtgaaatcgaccaactgttccgaatctttcgcgcactgggcacccccaataatgaggtctggccagaagtcgagagtcttcaggattacaagaacactttccctaagtggaaacctgggtccttagctagtcacgtgaagaacttggatgagaacggactggacttgctctccaagatgttgatctatgatcctgcaaagcgaatcagcgggaaaatggcccttaatcacccatatttcaatgacctggacaaccagataaagaaaatgtag

SEQ ID NO: 28227 - DNA, 894 bp, synthetic construct
  misc_feature 1..894: note = Description of Artificial Sequence: Synthetic coding sequence
  source 1..894: mol_type = other DNA
atggaggactataccaaaattgagaagattggggaggggacgtatggagtggtctacaagggtaggcacaaaaccactggccaggtggtagccatgaagaagattcgcttggagagtgaggaggaaggggtcccctctacggccattcgggaaatttcgctcctgaaggagttgagacacccaaatatcgtgtcactacaggatgtactgatgcaggattcccggttgtacttaattttcgagttcctgtctatggacttgaagaagtatctggacagtattcctccaggtcagtacatggactcttccttagtaaagagctatctctaccagatcctgcaggggatcgtattttgccactccaggcgcgttctgcacagagacctgaaaccgcagaatctgctgatcgatgataagggaactataaagttagcagatttcggcctggcaagagcatttgggatccctatacgggtttatactcatgaagtagtgactctgtggtaccgaagccctgaggtgctgctgggatcagccagatacagcacgccagtggatatttggtcaatcggcaccattttcgccgagctggccaccaagaagccgctgttccatggtgacagtgagatcgaccagctctttcgaatctttcgggcacttgggactcctaacaacgaggtgtggcccgaggtggaatccctacaggattataaaaatacgttcccaaaatggaagccgggtagtttagctagccatgtcaagaatctcgacgaaaatggtctcgacctcttgtcaaagatgctgatatacgaccctgcaaagaggatcagcggaaagatggcgctcaatcacccctatttcaacgatctagataatcaaataaagaagatgtag

SEQ ID NO: 28228 - DNA, 894 bp, synthetic construct
  misc_feature 1..894: note = Description of Artificial Sequence: Synthetic coding sequence
  source 1..894: mol_type = other DNA
atggaggattataccaagatcgaaaagattggagaaggcacatacggcgtggtctacaaagggagacataagaccaccggacaagtagtggccatgaagaagattcgtctggaaagtgaggaagagggcgtgccctccactgccatcagagagataagtttattaaaggagctgcgacatccaaatattgtctctcttcaggatgtgctcatgcaggacagtcgcctgtacctgatcttcgagttcctctctatggacctcaagaaatacctggactccatcccccctggccagtatatggatagttccctggtgaagagctacctgtatcagattcttcaaggcatcgtgttctgccattcccgcagagtcctgcaccgagacttgaaaccacagaacttgttaattgatgacaaaggcacgataaaattagctgacttcggcttggctcgggcttttggaatacctatccgcgtttatacacacgaggcaattacactgtggtatcgatctcctgaagtgctactgggctctgctagatacagcacccctgttgacatctggagcataggcaccatttttgccgagctggcgaccaaaaaacctctgttccacggcgatagcgagatcgaccagttatttcggatctttagggcactgggaaccccaaataatgaagtctggcccgaagtcgaaagtcttcaggactataaaaacaccttccccaaatggaaacccggatctttggcaagtcacgtgaagaaccttgacgagaatgggttggatctgctatctaaaatgctgatatacgatccagccaaaagaattagcggaaaaatggctcttaaccatccttacttcaacgatttggacaatcagattaagaagatgtag

SEQ ID NO: 28229 - DNA, 570 bp, synthetic construct
  misc_feature 1..570: note = Description of Artificial Sequence: Synthetic coding sequence
  source 1..570: mol_type = other DNA
atggaagattacaccaaaatcgaaaagattggtgagggcacttacggcgtggtgtacaagggccgacataagacaactgggcaggtggtcgccatgaaaaagatccgacttgagagcgaagaagagggagtgccttctactgcgattcgggaaatctccctgctgaaagagttgcgccaccctaacattgtgtccctgcaggacgtactgatgcaggactcacggctatatctgattttcgaatttttatccatggatctgaaaaagtaccttgactccatcccaccaggccagtacatggatagcagcctcgtgaaaagttacctctaccaaatcttgcagggtatagtattctgtcattcccggagagtcctgcacagagatcttaagccacagaacttgctgatcgacgataaaggtaccatcaaactagcagacttcggtctcgcaagagctttcgggatccctatcagagtttatacacacgaggcgattaccctttggtaccggtctcccgaggtgctccttggcagcgctcgctactcaaccccagtcgatatctggtcgtag

SEQ ID NO: 28230 - DNA, 897 bp, synthetic construct
  misc_feature 1..897: note = Description of Artificial Sequence: Synthetic coding sequence
  source 1..897: mol_type = other DNA
atggaaaattttcagaaggtggaaaaaatcggagaagggacctacggtgtggtgtacaaggcaagaaacaaactgactggcgaagtggtagcactcaaaaaaattcgtcttgacaccgaaacagaaggagttcccagtaccgccattcgagaaatctccctgctcaaggagctgaatcaccctaacatcgtgaagctgttagatgtcattcacacagagaataaattatatctcgtgttcgaattcctacaccaggatctgaagaagtttatggacgcaagcgctttgacagggattcccctgcctctcatcaagtcatatctgttccagctgcttcaggggttagctttctgccacagccatagagtgctccatcgcgatctaaagccacagaatcttcttataaacacagaaggcgctatcaagttggctgatttcgggctggccagggcctttggagtgccggtgcggacctatacccatgaagtagtaaccctgtggtatagggcccctgagatactgttgggttgtaaatattattccactgcggttgatatctggagcctggggtgcatcttcgctgagatggtcacacgccgagcgctgttcccaggggattcggagatcgatcaactgtttagaatcttccgcaccctgggtacgcctgacgaggtagtatggcctggggtcacttccatgcctgattacaaaccctcattcccgaagtgggctcggcaggacttttccaaagttgtaccaccactggacgaagatggtaggagcctactgagccaaatgttacattacgaccctaacaaacggatatcagcgaaggccgcactcgcccatcccttcttccaggatgtaacgaaacccgtgcctcatttgaggctgtag

SEQ ID NO: 28231 - DNA, 795 bp, synthetic construct
  misc_feature 1..795: note = Description of Artificial Sequence: Synthetic coding sequence
  source 1..795: mol_type = other DNA
atggaaaatttccaaaaggtggaaaaaatcggagaggggacctacggggtggtgtacaaagcacgcaacaagttgactggcgaagtcgtggcattgaagaaaattcggcttgacactgaaacggaaggcgttccttccaccgccatcagagagatcagtctgcttaaagaactcaaccatccaaatattgtgaagcttctcgatgtcatacacacggagaataagctatacctggtgttcgagtttttgcaccaggatctcaaaaaattcatggacgcctcagcattgactggcatccccctgccactcatcaaatcttacctgttccaactgctgcaaggtctggccttttgtcattcccatcgcgtgctccaccgagacctgaagccccagaatttactgataaatacggagggcgctattaagctggctgacttcggtctcgccagggcttttggagtgcctgtcagaacctacacgcatgaggtaacaaggcgggcactcttccccggagacagcgagattgatcagctgttcagaatctttagaactcttgggacacccgacgaagtggtgtggcccggagtcacatctatgcctgactacaaaccatctttcccaaaatgggccagacaggacttttctaaagtggtgccacctctcgatgaggacgggagatccctgttgtcacagatgttgcattacgatcctaacaagcgtatcagcgctaaggctgctctggcacatccttttttccaagatgttacaaaacccgtgccccatctgcggctgtag

SEQ ID NO: 28232 - DNA, 348 bp, synthetic construct
  misc_feature 1..348: note = Description of Artificial Sequence: Synthetic coding sequence
  source 1..348: mol_type = other DNA
atgtcatacaagccgaacttggctgctcatatgcctgcagctgcactgaacgcagctggatccgtgcatagcccttccactagcatggccactagtagtcagtaccgccagctcctcagcgactatggcccaccaagcttaggctacacccagggaaccggcaactctcaggttccacagtccaagtatgcagaacttctcgccattattgaggaactggggaaggaaattcgccctacatacgccggatcaaagagtgctatggaacgcctcaagcggggtataatccacgccagaggactcgtgcgggagtgccttgccgaaaccgaaaggaatgccagatcctag

SEQ ID NO: 28233 - DNA, 912 bp, synthetic construct
  misc_feature 1..912: note = Description of Artificial Sequence: Synthetic coding sequence
  source 1..912: mol_type = other DNA
atggcgacatcccggtacgagccggtcgctgagatcggcgttggggcatacggtaccgtgtacaaggccagagaccctcactccgggcatttcgttgcgctgaaatcagtgagggttccgaatggtggaggcggaggaggcggacttcctatcagcactgtgcgggaagtggccctgctcagacgcttggaagctttcgagcacccgaacgtcgtgagactcatggacgtttgcgcaacatctcgcacagaccgtgagatcaaagtgacactggtgtttgagcacgtggatcaggacctcagaacatacctggacaaagcgccaccaccagggctccctgccgagaccatcaaggatctgatgcgccagtttttgagaggcctggatttcctgcacgcaaactgcatcgtccatcgagacctgaagcccgaaaatattctcgtcacgtccggtggcactgttaagcttgccgatttcggcttggctcgcatatactcctatcagatggcactgacccctgtggttgtcacattatggtaccgtgctccagaggtactattgcagtctacttatgcgactcccgtcgacatgtggtctgtaggttgcattttcgccgagatgttccgccgaaagcccctattctgtggaaactccgaagccgatcaactcgggaaaatcttcgacttgataggcctccccccagaagacgattggcccagggacgtttccctgcccagaggcgcatttcccccaaggggaccccgaccagtgcagagtgtagtgcccgaaatggaagagtccggtgcacagttgcttctagagatgctaacatttaacccccataagcgaataagcgcctttagggccttgcaacacagctatctacacaaggacgaagggaatccagagtag

SEQ ID NO: 28234 - DNA, 336 bp, synthetic construct
  misc_feature 1..336: note = Description of Artificial Sequence: Synthetic coding sequence
  source 1..336: mol_type = other DNA
atggccactagccgctatgaacccgtggcagagataggagtgggggcatatggaacggtttataaagcccgagatcctcattccggacactttgtcgccctcaaaagtgtaagagtgccgaatggaggtgggggaggtggtggattacctatttctactgtccgagaggtagctctgctgcggcgactcgaagcgttcgagcacccgaacgtggtgaggctcatggacgtgtgcgctacgtctaggaccgaccgtgagataaagaggtgcttcgtggaaagcttgtcttcagtggagaccctgaaacctactagttgggctaaaagcctgacctag

SEQ ID NO: 28235 - DNA, 552 bp, synthetic construct
  misc_feature 1..552: note = Description of Artificial Sequence: Synthetic coding sequence
  source 1..552: mol_type = other DNA
atgaggcagtttctgcggggtctggattttttgcacgccaactgcatcgtccaccgggatctcaaaccagaaaatattcttgttacgtccgggggtactgtcaaactcgcagactttgggctagctcgcatatactcctatcagatggcccttacacctgtggtggtgaccctctggtaccgcgcacccgaggtcctgctgcagagcacatatgctaccccagtcgacatgtggagcgtggggtgtattttcgccgaaatgtttaggcgtaagcctttattctgcggaaattccgaagcggatcagctaggcaaaatctttgatcttatcggtctgcccccagaagatgactggccccgagatgtgtcattgcctcgcggagctttccctcctcgtggacctcgaccagtccaaagtgtggtgcctgagatggaagagagtggggctcaattgttgttggagatgctgaccttcaatcctcataagcggatcagtgcgttccgcgcactgcagcactcttacctgcataaagacgaaggcaatcccgagtag

SEQ ID NO: 28236 - skipped

SEQ ID NO: 28237 - DNA, 612 bp, synthetic construct
  misc_feature 1..612: note = Description of Artificial Sequence: Synthetic coding sequence
  source 1..612: mol_type = other DNA
atggccacgtcacgctacgagcccgtggcggaaattggcgtgggcgcttacggtacagtctacaaggccagggatccccatagtggccactttgtagccttgaagagcgtacgagtccctaatggcggaggaggcggaggcggtttgccaatttctactgtgcgcgaagtcgcacttctgagaaggcttgaagccttcgaacatcccaacgtcgtgcggcttatggacgtttgtgccacttctcgtacagacagggaaatcaaagttactctggtgtttgaacacgtggaccaggatttaagaacctatcttgacaaggcacctccacccggtctgccggctgaaactataaaggatcttatgcgccagttcctgcggggtctggatttcttacatgccaactgcattgtccatcgagacttaaagccggagaacatcttggtaacctctggtggaactgtgaagcttgctgatttcggtctggcgcgtatctattcttatcagatggccctgacacctgtggtggttacactgtggtaccgggctccggaagtgctcctgcagagcacctacgctacacctgtagatatgtggtctgtcggatgtatttag

SEQ ID NO: 28238 - DNA, 513 bp, synthetic construct
  misc_feature 1..513: note = Description of Artificial Sequence: Synthetic coding sequence
  source 1..513: mol_type = other DNA
atggcgacgtcccgctacgagcctgtggccgagattggggtgggcgcatatggaacagtctataaagccagagatccccattccgggcacttcgtggcgctcaaaagcgtccgcgtgcccaacgggggtggcggaggcggaggtttgccgatatcaactgtgcgggaggtggcccttctgaggagactggaggcttttgagcatcccaatgtggtccgtctgatggacgtgtgcgcaacctcgcgaacagatcgtgagatcaaagtgacccttgtgttcgagcacgttgatcaggatttgcggacatatctggacaaggctccaccacccggactgccagctgaaaccattaaagatttgatgcgtcagttccttcgaggtctggacttcctgcatgccaattgcatcgtacatcgagatcttaaacctgaaaacatactagttacgtccggcggaacggtgaaattggctgatttcggactcgccagaatctactcatatcaaatggcctag

SEQ ID NO: 28239 - DNA, 348 bp, synthetic construct
  misc_feature 1..348: note = Description of Artificial Sequence: Synthetic coding sequence
  source 1..348: mol_type = other DNA
atggccacatcaaggtatgagccggtggctgagattggcgtgggagcttatggtacagtgtataaggctagagatccacattcaggtcattttgtggccttaaagagcgtccgcgtacccaacgggggaggcggtggagggggactaccaattagcactgtaagagaagtcgcactgctgcgccgactggaggccttcgagcacccgaatgttgtgagactgatggacgtctgcgccacctccaggacagaccgcgaaattaaggttactctggtctttgaacacgtcgatcaggatttgcgcacatacctggacaaggcaccccctcccggactgcctgcggagtag

SEQ ID NO: 28240 - DNA, 924 bp, synthetic construct
  misc_feature 1..924: note = Description of Artificial Sequence: Synthetic coding sequence
  source 1..924: mol_type = other DNA
atgggcacggtactgtctctgagtccaagttaccgcaaggctactctgttcgaagatggcgctgcaaccgttggtcactacactgcagtgcagaactcaaagaacgcaaaggacaagaacctgaaaaggcattctattattagcgtgctgccctggaaacgcatcgttgcagtctcagctaagaaaaaaaactccaagaaggtgcagccaaactcgtcttatcagaacaacatcacccatctcaacaacgagaacttaaaaaagtctctgagctgtgccaacttatccacattcgcgcagccaccccctgcgcagccccctgcaccgcctgcgagtcaattgtctggctcccagaccgggggttcctctagtgtgaaaaaggcaccccaccctgccgttaccagcgccggaaccccaaaaagggtcattgttcaggcatccacttcagagctgctgagatgcctcggtgagtttctgtgtagacgctgttatcggttaaaacacttgtccccgaccgatcctgtgctttggctgcggagcgttgatcggagtttattactgcagggttggcaagaccagggattcatcacgccagcgaatgtcgtgttcctttacatgctgtgcagagatgtaatcagcagtgaagttggcagtgatcatgaactgcaggccgtgctcctgacctgcttgtatctgtcctattcctacatgggcaatgagataagttatcctctgaaacccttcctggtggaaagttgtaaggaagctttttgggaccgatgtttatcagtgattaaccttatgtcgagtaagatgctgcagattaacgctgacccccactacttcacacaggtcttctctgatcttaaaaacgagagtggtcaggaagataaaaagcgcctgctcctgggcctggataggtag

SEQ ID NO: 28241 - DNA, 981 bp, synthetic construct
  misc_feature 1..981: note = Description of Artificial Sequence: Synthetic coding sequence
  source 1..981: mol_type = other DNA
atggagaaggacgggctgtgtcgggcagatcagcagtacgagtgtgtagcagaaattggtgaaggggcttatggtaaggtttttaaggctcgagatctgaagaacggtggacgttttgtcgctctgaagcgagtgcgtgtccagaccggcgaggaagggatgccactaagcacgattcgcgaagtggctgttctgaggcaccttgagacctttgagcatcccaatgtggtcaggttgttcgacgtgtgcaccgttagccgaactgaccgggaaactaagctgactctagtatttgaacacgtcgaccaagatctgaccacatacctggataaggtgcccgagcccggtgtgcccacggaaacaatcaaagacatgatgttccagttgctccgaggcctggatttcctccattctcatagggttgtacacagggacttgaagccgcagaatattctcgtaacgtcctcaggacagattaagctggccgactttggcctagcgagaatctactctttccaaatggccctaacgagcgtggtggtgacactgtggtacagggcccctgaggtcctgcttcagtcctcctatgcaactccggtggacctgtggtctgtgggctgcattttcgcggagatgtttcggcgtaagcccttatttcgcggatcttctgacgttgaccagcttggaaagatcctcgacgtcattgggttgccaggcgaagaggactggccgagagacgtggctttgcctcggcaagcttttcattctaaatctgcccaacccattgaaaaatttgtgacagatatcgacgaattaggtaaggatttgcttctcaagtgcctgacctttaaccccgcaaagcgcatctccgcttactccgcgttatcccatccatactttcaggatctggagcgttgcaaggaaaatctggattctcatctgccgccaagtcaaaacacatctgagctaaatacagcctag

SEQ ID NO: 28242 - DNA, 981 bp, synthetic construct
  misc_feature 1..981: note = Description of Artificial Sequence: Synthetic coding sequence
  source 1..981: mol_type = other DNA
atggaaaaagacggattgtgccgagcagaccagcagtacgagtgcgtggcagagatcggagaaggagcatacgggaaggttttcaaggccagagacttgaagaacggagggagattcgtggcgttaaaaagagtgcgtgttcagacaggagaagaagggatgccattgtctaccatcagggaggttgctgtgttgagacacctggagacgtttgagcacccaaatgtcgtgagactgtttgatgtgtgtaccgtctctcgtactgatagagagaccaaactgactcttgtctttgagcatgtggaccaagatctcactacatacttggataaggttcccgagcctggcgtcccgactgagaccattaaggatatgatgtttcaactactgcggggattggattttttacacagccatagagtagtgcatcgggatctgaagccccagaatatcttggttacctctagtggccagattaaactagccgactttggtctggccaggatatactcattccagatggccctcacctctgtggtggtgactttatggtacagagcaccggaggtcttgttgcagtctagctacgctacccccgtggacctgtggagcgtcggctgtatttttgcagaaatgtttaggcgtaagccactgttccgcggttcctctgacgttgaccagctaggcaaaatactcgatgtgattggtctgccaggagaggaagactggcccagggacgtggctctgcctaggcaggctttccattcaaagagtgctcagcccatagagaaattcgtgactgacatcgacgaactggggaaggatctgctcctgaaatgcctgaccttcaaccctgctaaacgcattagtgcatactccgccctcagccacccatactttcaggatttagagcggtgcaaagaaaacctcgactcacaccttcccccatctcaaaatacatccgagttaaatacggcctag

SEQ ID NO: 28243 - DNA, 1041 bp, synthetic construct
  misc_feature 1..1041: note = Description of Artificial Sequence: Synthetic coding sequence
  source 1..1041: mol_type = other DNA
atggcgctggatgtgaaatcacgcgctaagagatatgaaaagctcgactttctgggtgagggccagttcgctacagtgtataaagctagagacaaaaatacaaaccagatagtcgcaataaaaaagataaagcttggacacaggagcgaagcgaaagatggcatcaatcgcaccgccctgcgggaaattaagttgttgcaggagctgagccatcctaacattattggactgctcgacgcctttgggcacaaatcaaatatctccctggtgttcgactttatggagactgacttagaggtgatcatcaaggacaattccctcgtcttgacgccaagtcacattaaagcctacatgctgatgactctgcagggccttgaatacctgcaccagcactggattttacaccgggacttaaagccaaacaatctgctgttggatgagaacggcgtcctgaagcttgccgacttcgggttggccaagtcctttgggtccccaaaccgagcatacacacatcaggtcgtgacccgatggtaccgcgctcctgagctcctgtttggcgctcgcatgtacggcgtgggcgtggacatgtgggcagttggatgcatcctcgcggagctcctcctcagagtccccttcctccccggtgactcagacctggatcagctgacccggatctttgagactctgggaactcctaccgaggagcagtggcctgatatgtgttctcttcctgattacgttaccttcaaatccttcccagggatcccactgcaccatatcttttcagccgctggcgacgacctattggacctcatccaaggcttatttttattcaacccgtgtgccagaatcacagccactcaggcacttaagatgaagtatttttccaatcgacccggacccacaccgggttgccagctgcctcggcctaattgccccgtggagacattgaaggagcagtccaacccagctctggctattaagcgcaaacgaacggaagcgctggagcagggtggcttgccaaaaaaattaattttttag

SEQ ID NO: 28244 - DNA, 1395 bp, synthetic construct
  misc_feature 1..1395: note = Description of Artificial Sequence: Synthetic coding sequence
  source 1..1395: mol_type = other DNA
atggattacgattttaaagtgaagttgtcctccgagagagagcgcgtggaggacctttttgaatatgaaggatgcaaggtaggtagaggcacttacggccacgtctataaagccaagcgcaaagacggcaaagatgataaagattacgctctgaaacaaatcgagggaaccgggattagtatgtcagcatgtagagagatcgccctgctccgggagttgaagcacccaaatgtaattagcttgcaaaaggtgttcctgtcacatgcagaccggaaggtttggttgctttttgattatgccgaacacgacctttggcatatcattaagttccacagagcctccaaggctaacaaaaaacccgttcagttgccacgcggtatggtgaagtctttgctctatcaaattttggacggaattcattacctgcatgctaattgggtactgcaccgtgatttaaagcctgctaacatcctggtgatgggcgagggcccagagcgtggtcgcgttaaaatagccgatatggggtttgcccgtctctttaactcccctctcaagcccctggcagacctggacccagtggtggttaccttctggtaccgcgcacccgaactgctcctgggagcacgccactacactaaggctatcgacatttgggcaatcggctgtatctttgccgagttactcacgtcagagcctattttccactgccgccaggaagacattaagacatcaaacccttatcatcatgaccagctcgataggatcttcaacgtgatgggcttccctgccgacaaggattgggaagacatcaaaaaaatgcccgagcacagcaccctcatgaaggactttaggcggaacacctacacgaactgtagcttgattaagtacatggagaagcataaggtgaagcctgatagcaaggcctttcaccttctgcagaaacttcttacaatggaccctattaagcggataaccagcgagcaggctatgcaggacccttatttcctagaagatcccttgcctacgtctgacgtcttcgccggatgtcagataccctaccccaagcgcgaattccttaccgaggaagaacccgatgacaagggtgacaagaagaatcagcagcagcagcaggggaacaatcacacgaacggcaccggacatcccggaaatcaagactcatcccatacacagggcccaccacttaaaaaggttcgcgtggtgcccccaactaccacaagcgggggattgatcatgactagtgattaccaacgcagtaaccctcatgccgcttacccaaacccgggaccctccacctctcagccgcagagcagcatggggtattcagccacatctcagcagccgcctcagtatagccaccaaactcatagatactag

SEQ ID NO: 28245 - DNA, 495 bp, synthetic construct
  misc_feature 1..495: note = Description of Artificial Sequence: Synthetic coding sequence
  source 1..495: mol_type = other DNA
atggactacgatttcaaagttaagttgtcatccgaacgagagagagttgaggatcttttcgagtatgagggctgtaaggtggggcgtggaacatacgggcacgtctacaaggccaaaagaaaggacgggaaagacgataaggattatgcattgaaacagatagaaggaaccgggatttccatgagcgcatgcagggaaatagccctgttgagggaactgaagcatccaaacgttatctcgctgcagaaggttttcctgtcccacgctgacaggaaagtctggcttttattcgattacgcagagcacgatctgtggcacattatcaagttccaccgagcttccaaggccaacaagaaacctgtccagttacccagaggtatggttaaatcactcttataccagattctggacggcatccactatttgcacgctaactgggtcctccatagggaccttcttacatgggcactacccgattacctgatccatctgtag

SEQ ID NO: 28246 - DNA, 1119 bp, synthetic construct
  misc_feature 1..1119: note = Description of Artificial Sequence: Synthetic coding sequence
  source 1..1119: mol_type = other DNA
atggccaagcagtatgacagcgtagaatgtccgttttgcgacgaggtttccaaatacgagaaactcgctaaaattggccaggggacttttggggaggtctttaaagcgagacaccggaagacgggccagaaagttgccttaaaaaaagtgctgatggaaaatgagaaagaagggttcccaatcaccgcactccgagagataaagattctgcaactccttaaacacgaaaatgttgtaaatcttatagagatttgtcgaaccaaggccagcccctataatcgctgcaaagggagtatttacctggtgtttgacttctgcgaacacgacctcgccggtcttttgagcaacgtgttggtcaaattcaccctgagcgagatcaagcgcgtgatgcagatgctccttaatggtctgtactatatccatcgaaataagatcctacaccgagatatgaaggcagccaacgttctgattactcgggacggggtgcttaaactggcagatttcggccttgctcgcgctttctctttagcaaaaaattctcagccgaatcgttatacaaaccgggtcgtaactctgtggtataggccaccggaactgctgcttggtgagcgtgactacggccctccaatagatctctggggtgccggatgtatcatggctgagatgtggactcgctcgcctatcatgcaggggaatacagaacagcaccaacttgcactgatatcccagttatgcggatcaatcacacccgaagtttggccaaacgtagacaactacgaattatacgagaagctggaactagtcaaggggcagaagcgaaaagtcaaggaccgcttaaaggcttatgtgcgtgatccctacgctctggatttaatcgataaattgctcgtgttggacccagcacaaagaatagattccgatgacgcccttaatcatgattttttttggagcgacccaatgccttccgacttaaagggaatgctctcgactcacctcacaagtatgttcgagtacctggctccccctcgcaggaagggcagccagatcacccagcagtcaactaaccagtctcggaatccagctacaactaatcagactgaattcgagcgcgtattctag

SEQ ID NO: 28247 - DNA, 1470 bp, synthetic construct
  misc_feature 1..1470: note = Description of Artificial Sequence: Synthetic coding sequence
  source 1..1470: mol_type = other DNA
atgcaaagggacgcaccacctcgggctcccgctcccgctcccaggttgcctgctccccctatcggggctgctgcctcaagcggtggagggggaggcggtggcagcggcggtggcggtggcggagcttccgctgcacctgcacctcctgggctgtcaggtacaacgagtcccagaggcccagggggtggcagacgagccgaggaggccggttctgcgccacgaggtcgaaaatggccttggaggaggaaatggcgcggaagaggtggcgcttggagtgccgctgccgctggtccaggggctggtgctgcagctgcagccaccgggggagggggaggggctctcgaggcggctatggccaagcagtacgacagcgtggaatgtccgttctgcgatgaggtatctaaatacgaaaagctcgccaaaatcgggcagggcacttttggcgaggttttcaaggcccgacacaggaaaactggacagaaagtggccctcaagaaggttctgatggaaaatgagaaggaaggatttccaatcaccgcactccgcgagatcaagatcttgcagctgctgaagcacgagaacgtggttaacttgattgagatttgccggactaaagcatcaccctataaccgctgtaaaggatcgatctatcttgtgttcgatttttgtgagcatgatctcgctggcttgctctctaacgttctggtgaaattcactctgtcagagataaagcgcgtgatgcagatgctcctaaacgggctttattatattcatcgaaataaaattctccacagagacatgaaggcagctaatgttctcataactagggacggcgtgctcaagctcgccgactttggattggccagagccttctcattagctaaaaactcccaacctaacagatacactaaccgggttgttacattgtggtacaggccccctgagctacttctgggcgagagggactatggacctccaatcgatctctggggagcgggatgcattatggcagagatgtggactcgtagcccgatcatgcagggcaacaccgaacagcatcaactcgccttgatttcccagctgtgtggttctatcacgccagaagtttggcctaacgtggataactacgagttatacgagaagctggagctagtgaaaggccaaaagagaaaagtcaaggacagactcaaagcatatgtgagggacccctacgcgctggacttgattgacaaactgctcgtcctggatcccgctcagaggatcgacagtgacgacgcgctcaatcacgacttcttctggtccgatccgatgccatccgaccttaagggcatgctttcaactcatctcaccagcatgttcgagtatctggccccaccgcgacggaaggggtctcagattactcaacagtccacaaaccaaagtcgtaaccccgcaacaacaaaccaaaccgaatttgaaagagtcttttag

SEQ ID NO: 28248 - DNA, 585 bp, synthetic construct
  misc_feature 1..585: note = Description of Artificial Sequence: Synthetic coding sequence
  source 1..585: mol_type = other DNA
atgcagagggatgctcctccgagagcccctgctcctgcaccaagattgcccgctcctcccattggggctgctgcatctagcggcggagggggtgggggtggctcagggggagggggtggcggtgccagcgctgctcccgctcctccgggtctctctggtacaacatcccctcggggacccggtggaggcaggcgcgctgaggaagcgggtagtgcccctcggggacgcaagtggccttggcgacgcaagtggagaggcagaggaggagcttggtccgctgctgctgccggtccaggcgctggtgctgccgcagccgctaccgggggagggggaggggctctggaggccgctatggccaagcagtatgactctgtggaatgccctttctgcgacgaggtctccaagtacgaaaagttggcaaaaataggccaggggacattcggtgaggtgttcaaagctagacatcggaagaccggccagaaagtcgctctgaagaaagtgctgatggagaacgagaaggagggtttccccatcaccgcactgcgcgagataaagatcctgcaattacttaagcacgaaaactag

SEQ ID NO: 28249 - DNA, 495 bp, synthetic construct
  misc_feature 1..495: note = Description of Artificial Sequence: Synthetic coding sequence
  source 1..495: mol_type = other DNA
atgagcgaacccgcaggcgacgtgagacagaacccctgcggatccaaggcatgtaggagactgtttggcccagtagactccgagcaattaagcagggattgcgatgccctcatggccggttgtattcaagaggccagagaaaggtggaattttgatttcgtgaccgaaacacccctggaaggcgatttcgcctgggaacgcgtccgcggtctgggtctaccgaagctgtacctgccgacaggcccaaggagagggcgtgatgagctaggaggagggcgacgtcctggcactagcccagccctattacagggtaccgccgaagaggatcacgtcgacttaagcctgtcatgtaccctggtgccccgttctggggagcaggccgagggttcaccagggggtcctggtgactctcaagggagaaagcgcagacagacttcaatgacagacttctaccacagcaagaggcggctgattttctccaagcggaagccatag

SEQ ID NO: 28250 - DNA, 495 bp, synthetic construct
  misc_feature 1..495: note = Description of Artificial Sequence: Synthetic coding sequence
  source 1..495: mol_type = other DNA
atgagcgagccggctggcgacgttcgccagaacccttgcggatcgaaggcctgccggaggttgtttggtcctgtcgactccgagcagctttctagggattgcgatgctcttatggccggttgtatccaagaagctcgggagcgctggaacttcgactttgtgactgagacacccctggagggcgattttgcctgggagagggtgcgcggactcggactgcctaagctgtatctccctacaggccctagacgtggccgagacgaattgggcggaggccgaaggcctggcacctcacccgctctgctgcaggggactgccgaagaagatcacgtcgatctatctctgagttgcacgctagtgccacgcagcggcgaacaagccgaagggagcccagggggtcctggcgatagccaaggtcgtaaacgtaggcagacaagcatgaccgacttttatcactcaaaaagacgtttaatattcagcaagaggaagccttag

SEQ ID NO: 28251 - DNA, 495 bp, synthetic construct
  misc_feature 1..495: note = Description of Artificial Sequence: Synthetic coding sequence
  source 1..495: mol_type = other DNA
atgagcgagccagctggagatgtgagacaaaatccctgcggctcaaaagcctgccggaggcttttcgggcctgttgacagtgagcagctgagcagagattgcgatgctctcatggccggatgcattcaagaagctagagaaaggtggaattttgattttgtcacagagacccctctcgaaggggactttgcttgggagcgtgtgaggggtctcggcctccccaaattgtacctccccactggaccccgacgaggacgcgacgagctcggcggaggcagacgccctggtacatcaccagccctgctccaggggacggccgaggaggaccacgtggatcttagtctgtcttgtaccctggtgccacggtccggtgaacaagccgagggctctcctggcggtccaggtgacagtcaaggtcgtaaacggcgtcagactagcatgacagacttctaccactcaaaacgaaggttgattttctccaagcgcaaaccatag

SEQ ID NO: 28252 - DNA, 597 bp, synthetic construct
  misc_feature 1..597: note = Description of Artificial Sequence: Synthetic coding sequence
  source 1..597: mol_type = other DNA
atgtggggggtgtttcgcagacagactactcactcctcaaaccctcccctccccggtcagcaaagctgttgtaaccaccgagacttcttctgttctggcgcaatgtccgagcccgctggagatgtcaggcagaatccctgcggctccaaggcttgtagacggctgtttggccctgtggattccgaacagctgtccagggattgtgacgccctgatggcagggtgtattcaagaggcaagggagcgttggaattttgattttgttaccgaaaccccactggagggcgactttgcttgggagcgggtgaggggcttggggctgcccaaactctacttgcccaccggccctaggcgcggtcgtgatgagctaggagggggaaggcggccagggacgtctcccgcattgctgcagggcacggcagaagaggaccacgtggacctaagcctcagttgcacgctcgtcccgaggtccggtgagcaggccgaggggagccctggtggacccggagattcccaaggccgaaaacgccgacagacttctatgaccgacttctatcactcaaagcggaggctaatcttctcgaaaaggaaaccttag

SEQ ID NO: 28253 - DNA, 363 bp, synthetic construct
  misc_feature 1..363: note = Description of Artificial Sequence: Synthetic coding sequence
  source 1..363: mol_type = other DNA
atggacgattccaaggtcgtgggcggaaaggtcaaaaaaccgggtaaacggggaagaaaacctgctaagatcgatctaaaggccaaactggagcggtctcggcagtcggcccgagagtgtagggccagaaaaaagctgaggtatcagtacctggaggaactggtgtcttcccgggagcgtgccatttgtgctcttagggaagagttggaaatgtataagcaatggtgcatggctatggaccagggtaaaatcccatctgaaataaaagccctgctgactggtgaggagcaaaacaaatcccagcagaatagctccaggcacacgaaagccggaaagaccgatgcaaactctaatagctggtag

SEQ ID NO: 28254 - DNA, 444 bp, synthetic construct
  misc_feature 1..444: note = Description of Artificial Sequence: Synthetic coding sequence
  source 1..444: mol_type = other DNA
atggaggaggcctctcagaggaagtggaacttcgacttccagaaccataagcccttggaaggaaagtacgagtggcaggaagtcgagaagggctcccttcctgagttttattacagaccgcctagacctcccaaaggcgcttgcaaagtgcctgcacaggagagtcaagacgtgagtggaagccggccagccgctccactgatcggcgctcccgctaatagcgaagacacacatttagtcgatcctaaaaccgacccgagcgactcccagacgggactcgcggaacagtgtgctgggatacgcaagcgcccagcaaccgacgatagcagcacgcagaacaaaagagcaaacagaactgaggagaacgtgagtgacggctcacctaacgccggatctgttgagcaaacccctaaaaagccaggactgcgcagacgccaaacttag

SEQ ID NO: 28255 - DNA, 918 bp, synthetic construct
  misc_feature 1..918: note = Description of Artificial Sequence: Synthetic coding sequence
  source 1..918: mol_type = other DNA
atggagcgactagtggcccgaggtacgtttcctgtactggttaggaccagtgcgtgtaggtctttatttggacccgttgaccatgaggagctgtctagagagctgcaggccagactagccgagctgaacgctgaggaccagaacaggtgggactacgatttccagcaggacatgcccctcagaggccctggacgattgcagtggacagaagtggacagcgattcggtccctgctttttacagagagacagtgcaggtagggaggtgtcgattactgttagcaccccgtccagttgccgtggcagtggctgtgagtccacccctggagccagccgctgaatctctggatggcttggaggaggccccagagcaactgccctcggtgcccgtgccagcacccgcttccacccccccacctgtccctgtcttagcccctgctcctgccccagccccagcccctgtcgcagcccctgtcgcagctcccgttgccgtggccgtcctggctccggctcctgcccctgctcctgcgccagcgcctgcgcctgctccagtggcagctcccgcacctgcaccagctccagcccctgctccagcgccagcgccagccccagccccagacgcagccccacaggaatccgcagagcagggggctaaccagggacagcgaggccaagaacccttagccgaccagctgcattctggaatttccggtagaccggcagccggtacagctgccgcttctgccaacggcgcagctattaagaaactttctgggcctcttatttccgacttctttgccaagcggaagagatctgctcctgagaagtcttcaggggacgtgcctgctccgtgtccatcccccagtgcagcaccaggagttgggagcgtggaacagacacccaggaagagactgagatag

SEQ ID NO: 28256 - DNA, 951 bp, synthetic construct
  misc_feature 1..951: note = Description of Artificial Sequence: Synthetic coding sequence
  source 1..951: mol_type = other DNA
atgagtgacgcttctctccggagtactagcaccatggagcgcctcgttgccagaggaacctttccagtgctggtccggactagtgcatgtcgatctctgttcggtcccgtggaccacgaggagctgtcccgtgaactccaagctcgcctcgccgaattaaacgccgaagaccagaatcgctgggactacgacttccaacaggatatgccgcttaggggaccaggcagactacaatggacggaagtggattctgatagcgtgcccgcattttatcgggaaactgtgcaggtgggcaggtgcagacttctcctggcccctcggcctgtggcggtggccgtcgccgtgtcaccgcctttggaacccgcagccgaaagcttggacggcctggaggaggctccggagcagctaccatccgtgccagtgccagctccggcttctactcctcctcccgtcccggtcttagctccagctcccgcacctgcacccgctcccgtcgccgcaccggtcgccgcaccagtggccgttgcagttctcgctccagcccctgcgcctgccccagccccagcgccagccccagccccagttgcagctccagctccagctcccgcacctgccccagccccagcacccgctcccgctcctgcccctgatgcagcaccccaggagtcagccgagcagggcgctaaccaagggcagagaggtcaggagcccttggccgaccaactacactcagggatcagtggtaggcccgctgccggtacagctgccgcttctgccaatggggcagccattaagaagctgtctgggcctctgatatctgatttcttcgccaaaagaaagcgatcggcccctgagaagtcgtccggcgacgtgcctgcgccttgtccctccccaagtgcagcacctggcgtgggttcagtggaacagactccgcgaaagcggttgcggtag

SEQ ID NO: 28257 - DNA, 951 bp, synthetic construct
  misc_feature 1..951: note = Description of Artificial Sequence: Synthetic coding sequence
  source 1..951: mol_type = other DNA
atgtcggacgcaagtctccgctcgacctcaacaatggaacgcctcgtggctcggggaaccttccccgtgctcgtgcgtaccagcgcatgtcggtccctctttggccctgttgaccacgaggagctctctcgcgagctacaagccagactggcagagcttaacgcggaggaccagaatcgttgggattatgactttcagcaggacatgcctctcagggggcctggtagactccagtggacagaagtggactccgatagtgtccctgccttctatagggaaacagtgcaagtaggcagatgcagattactactggctccgcgacccgtggccgtggccgtcgcagtgtcgcctcctctggaaccggctgcagaatcccttgatggactggaggaagcgcctgagcagctgccgtctgtcccagtacctgctcctgcctcaacacctcccccagtgccggtcctcgctcccgcacccgcacccgcacctgctcctgtcgcggctccagtggcagctccggtggcagtcgctgtcttggccccagcacctgctcccgctcctgccccagcccctgcaccggctcccgtagccgctcccgctccagcaccagcgccagctccagcccctgctcctgccccagcccctgcaccagatgccgctcctcaggagtctgccgaacagggagccaaccagggacagcggggtcaggagccattagccgatcagctgcacagcgggattagcgggagacctgccgctgggaccgccgctgcttcggctaatggagccgcaattaaaaaattgtcgggaccactcatctcggatttcttcgctaagagaaaaaggtccgcgcctgaaaagtcatccggcgatgtacctgccccatgcccctcgccatctgctgctccaggcgtcggttcagtggagcaaactccaagaaagcgactgagatag

SEQ ID NO: 28258 - DNA, 918 bp, synthetic construct
  misc_feature 1..918: note = Description of Artificial Sequence: Synthetic coding sequence
  source 1..918: mol_type = other DNA
atggaacggttggtggctcggggaactttccctgtgttggtacgtacatccgcctgcagatctctatttggccctgtggaccacgaagagctaagccgagaattgcaagccagactggcagagttgaatgccgaggatcagaatcgttgggactacgacttccagcaagatatgccacttaggggccctggcaggctgcagtggactgaagtcgactccgatagtgtaccggcattctacagggagactgtgcaagtggggcgttgtcggcttttgctggctcctcggcctgttgccgtggccgtggcggtgagcccccctctggaacctgctgcagagtcgctggatgggctagaagaagccccagaacaactgccctcagttcccgtgccagctcccgctagtaccccccctcctgtgccagttctggccccagctcccgctcctgctcccgctccagtggcggcacccgtggcggctcccgtggccgttgcagtgctggcacccgcacccgctcccgcaccagcccctgctcctgctccagcccctgtggctgcccctgcccctgcacctgcccctgctcccgctccagcaccagcccctgcgcctgctcccgatgccgcacctcaagagtccgctgaacagggcgcaaatcagggtcaaaggggtcaggaacccctggctgatcagctgcattccggtataagtggcaggcctgcggcaggcactgccgcagccagtgccaacggggctgccatcaagaagttgtctgggccacttatttcagacttttttgccaaacgcaagagaagcgccccagaaaaatcgagtggagatgtgcctgccccatgcccttctccttccgctgcccctggtgttggtagtgtggagcagacgcccaggaaaagacttagatag

SEQ ID NO: 28259 - DNA, 504 bp, synthetic construct
  misc_feature 1..504: note = Description of Artificial Sequence: Synthetic coding sequence
  source 1..504: mol_type = other DNA
atggagcccgcagccggaagtagtatggagccctcagcggactggttagccaccgcagccgctcggggacgggttgaggaggttcgcgctttgttggaagctggtgcacttcccaacgccccaaattcatacggccgtagaccaattcaggttatgatgatgggcagcgccagggtagccgagcttctcttgcttcatggggctgaaccgaattgcgctgaccctgccaccttgacaagacctgtgcatgatgccgctagggagggatttctggacacccttgttgtactgcatagagctggcgctcggttggatgtgagagacgcctgggggagactgcctgtggatttggctgaggagctcggccacagggatgttgctcgttacctgcgggctgccgctggcggaacccgcggtagcaatcatgcccgaatcgatgcagcagaggggccttctgaaatgatcggaaatcacctgtgggtgtgtagaagccgccatgcttag

SEQ ID NO: 28260 - DNA, 471 bp, synthetic construct
  misc_feature 1..471: note = Description of Artificial Sequence: Synthetic coding sequence
  source 1..471: mol_type = other DNA
atggagcccgctgccggtagttccatggagccctcggcagattggctggccaccgctgctgcccgtggaagagtggaagaggtaagagcactgctcgaggcaggagctttaccaaatgccccaaactcttacggcagacgacccattcaggtgatgatgatgggatcggcccgtgtggccgaacttctgctgctccacggcgcagaaccaaattgcgccgaccccgctacattgacacgcccagtccacgacgccgcaagggaaggcttcttggataccctggtcgtcctacatcgagcaggggctcggctcgacgtcagagacgcatggggcaggctgccagttgacctggctgaggaactgggccatcgtgatgtggctcgctacctgagagccgctgcgggaggaacccgaggctcgaatcatgctcgtattgatgccgctgaggggccatccgacatcccagactag

SEQ ID NO: 28261 - DNA, 522 bp, synthetic construct
  misc_feature 1..522: note = Description of Artificial Sequence: Synthetic coding sequence
  source 1..522: mol_type = other DNA
atgggcagaggccgttgcgtgggcccatcgctacaactgagggggcaggagtggaggtgcagtccgctagtccccaaaggcggagccgcagccgctgaacttggcccaggagggggagagaacatggtcagaagattcctggtgaccctgaggatcagacgcgcttgcggccctcccagagtgagagtattcgttgtgcatattccacgcctgacaggcgagtgggcagcccctggcgctcccgcagccgtggcccttgtactgatgttacttcggtcacagcgcttaggccagcagcctctgccacggcgacccggacacgacgacgggcagcggcctagcggcggagccgctgcagccccacggcgaggcgcacaactgagaaggcctagacattcacaccctaccagggccagacggtgccctggtggcttacccggtcatgcaggcggtgctgctccaggaaggggagcagccggacgggctcgctgccttgggccatcagcgaggggtccaggatag

SEQ ID NO: 28262 - DNA, 504 bp, synthetic construct
  misc_feature 1..504: note = Description of Artificial Sequence: Synthetic coding sequence
  source 1..504: mol_type = other DNA
atggaacccgctgccggttcatctatggagccgagtgccgattggttggctacggccgcagctagaggacgggtggaggaagtaagagcactgctcgaggctggcgctctacctaatgcgcctaacagctacgggcgtcgtcctatccaggtgatgatgatgggcagcgcaagggtggcagaacttttgctgctccatggtgcagaacctaactgcgccgaccctgccactttgacgagaccagtgcatgacgcggcaagagaaggctttctggacaccctcgtagtgctgcatagggcaggggcacgcctggacgtgagggacgcctggggccgtctcccagtggacctggccgaggagctggggcacagggatgtggcacgctacctacgggctgcggcaggaggcacacgcggtagcaaccatgctaggatcgatgccgcagaaggcccaagtgaaatgatcggaaatcacctgtgggtgtgccgaagtcgccacgcatag

SEQ ID NO: 28263 - DNA, 399 bp, synthetic construct
  misc_feature 1..399: note = Description of Artificial Sequence: Synthetic coding sequence
  source 1..399: mol_type = other DNA
atggtgcgaaggttcctggtgacactacgcataaggcgggcatgtggcccacctagggtccgggtttttgtcgtccacataccaaggctgaccggggaatgggccgcaccaggggctcctgccgctgttgcccttgtcctaatgctcctcagaagccaacggctggggcagcagcccctgcccaggcgccctggccatgatgacggccaaagacccagcggcggagccgcagccgctcctcgtcggggagcccagctgcggcgaccacgacatagtcacccgactcgggcacggcgatgcccaggtgggctgcccggacatgccggaggtgcggcacctggccgtggggcagccggacgagccaggtgtctgggaccatcggctcgtgggcctggatag

SEQ ID NO: 28264 - DNA, 417 bp, synthetic construct
  misc_feature 1..417: note = Description of Artificial Sequence: Synthetic coding sequence
  source 1..417: mol_type = other DNA
atgagagaggagaataaaggtatgccctccggagggggatctgacgaggggttagcaagtgccgcagccaggggcttggtcgaaaaagtgagacagctgctagaggcaggggctgacccaaacggggtgaacagattcggcaggcgggctatacaggttatgatgatggggtccgccagggtcgctgagctcctcctgttacacggcgcagaacctaattgtgctgacccagcgaccctgaccaggccggtgcacgacgccgctcgcgagggcttcttagacacactggttgtcttacaccgagctggtgcacgcctggatgtgagagacgcatggggcagactgccagtggatctggcagaggaacggggtcacagagatgtcgcgggatatctgcgcacggccactggagactag

SEQ ID NO: 28265 - DNA, 237 bp, synthetic construct
  misc_feature 1..237: note = Description of Artificial Sequence: Synthetic coding sequence
  source 1..237: mol_type = other DNA
atgcgtgaggagaataaaggtatgccttctggcggtggaagcgacgaggggcttgcttccgccgcagctcggggacttgtggagaaagtgcgacagctgctagaggcaggagccgatcctaatggcgtcaatcgatttggcagaagggccatacaggtggccggagccccagggccaaggagacagggcgctagggagcgcggtgcccgtcctagacgcatcggagccggaacatag

SEQ ID NO: 28266 - DNA, 237 bp, synthetic construct
  misc_feature 1..237: note = Description of Artificial Sequence: Synthetic coding sequence
  source 1..237: mol_type = other DNA
atgagagaggaaaacaagggtatgccttctggtggtggtagtgatgagggcctcgcttcagcggctgctcggggtctcgtggaaaaggtacggcaactcctcgaagccggtgcggatcctaacggcgtcaatcgctttggaaggagggccattcaggtcgctggagctcccggtccccgtcgtcaaggcgctagggaaaggggcgcacggccacgccgtatcggcgctgggacatag

SEQ ID NO: 28267 - DNA, 507 bp, synthetic construct
  misc_feature 1..507: note = Description of Artificial Sequence: Synthetic coding sequence
  source 1..507: mol_type = other DNA
atggccgaaccctggggcaatgaactggcatctgctgcggcacgcggagacctcgagcagctaaccagtctgctgcagaataatgttaatgtgaatgcacaaaatggtttcggtcggactgctctgcaagtaatgaagcttgggaaccctgagatcgcgagacgccttcttctccgcggtgctaaccccgacctgaaggaccgtacagggtttgccgtaattcacgatgcagctcgcgcaggttttcttgataccttgcagaccctgctcgagttccaggccgacgtcaacattgaagataacgagggcaatctgcccctgcacttagcagcaaaagaaggtcatctcagggttgtggaattcctggtgaaacatacagcaagcaacgttggccatcgcaaccataagggggatactgcatgcgacctggccagactgtacggcagaaatgaggtagtctccctcatgcaggccaatggcgctggaggcgctacgaacctgcaatag

SEQ ID NO: 28268 - DNA, 507 bp, synthetic construct
  misc_feature 1..507: note = Description of Artificial Sequence: Synthetic coding sequence
  source 1..507: mol_type = other DNA
atggccgagccatgggggaatgagctagcatcggcagctgctagaggggaccttgagcagttgaccagcttacttcaaaataacgtgaacgtgaacgctcagaacggattcggcagaactgctctgcaggtcatgaaactcggcaatcccgagatcgccaggcggctactgctgagaggcgctaatcccgatcttaaggatcgcactggttttgccgtgatacacgacgccgctcgggctgggtttctggacacgttacagaccctgctcgagtttcaggctgatgttaacatagaggacaacgagggcaacctgcccctgcatctcgccgctaaggaaggtcacttgcgtgtagtggagttccttgtcaagcatacggcaagcaatgtaggccatagaaaccataagggagacactgcctgcgacctggccagactttacgggaggaatgaagttgtgtcgttaatgcaggccaatggggctgggggtgctacaaacctccagtag

SEQ ID NO: 28269 - DNA, 507 bp, synthetic construct
  misc_feature 1..507: note = Description of Artificial Sequence: Synthetic coding sequence
  source 1..507: mol_type = other DNA
atggcagagccctgggggaatgaacttgcatctgcggctgcaagaggtgatttggagcagcttacgagtttgttgcaaaataacgtgaatgtgaatgcacagaatggcttcggacgtaccgcccttcaggtcatgaaactggggaaccctgagatcgccaggaggctcctgctgcgcggtgcaaatccggacctgaaagaccgtactggattcgcagtaatccatgatgcagcgcgagctggattccttgacactctgcagacacttctggagtttcaggccgacgttaatattgaggataatgaggggaaccttccgctgcatctggctgcgaaagagggccacctgcgggtcgtggagttcctggtgaaacacacagctagcaatgttggacacaggaaccataaaggcgacaccgcatgcgacctggccagactttacggacgcaatgaagtggtcagcttgatgcaggctaacggcgctggcggagcaaccaacctgcagtag

SEQ ID NO: 28270 - DNA, 501 bp, synthetic construct
  misc_feature 1..501: note = Description of Artificial Sequence: Synthetic coding sequence
  source 1..501: mol_type = other DNA
atgctactggaagaagtaagagctggcgaccgcctcagcggcgcagctgcacgtggtgacgtgcaggaagtgaggagattgcttcatagggagctcgtgcatccagacgctctcaatcggttcggcaagactgccctgcaggtgatgatgtttgggtcgacagcaatcgccttagagttgctaaaacagggcgcttctccaaatgtacaagacacctcagggacttcaccggtgcatgatgctgctcgaacaggtttcctggatacgcttaaggttctggtcgagcatggagctgacgtaaatgtacccgacggtacaggtgcgctgcctatacacctcgccgtacaggaaggtcatacagctgtagtgagcttcttagccgctgagtcagaccttcatcgaagagatgctaggggtttgactccactggagctcgctctgcagcgcggagcgcaggatttggtcgatatcctacagggccacatggtcgcccctttgtag

SEQ ID NO: 28271 - DNA, 501 bp, synthetic construct
  misc_feature 1..501: note = Description of Artificial Sequence: Synthetic coding sequence
  source 1..501: mol_type = other DNA
atgctgctcgaggaagttagagctggagataggctgtctggggcagctgccagaggtgacgttcaagaggtgcgtagactgcttcaccgagaactggtccacccagatgcacttaacaggttcggaaagacggccttgcaggtcatgatgtttgggtccacagcaatcgccttggagctcctcaagcagggagcctcacccaatgtgcaggataccagcggcacatcccccgttcatgacgccgctcggaccggctttctggatactctgaaagtgctcgtcgagcacggagccgacgtcaatgtgcccgatggtactggagctctgcctattcacctcgccgtgcaagaaggccacaccgctgtcgtgagttttctcgcagctgaatcagatctgcatcgcagagatgcacgcggactgacccccctggaattagccttgcagcgaggggcacaggatcttgttgatattctccaaggtcatatggtcgcccctctctag

SEQ ID NO: 28272 - DNA, 639 bp, synthetic construct
  misc_feature 1..639: note = Description of Artificial Sequence: Synthetic coding sequence
  source 1..639: mol_type = other DNA
atgaaaccaccttcttccatccaaacctccgaattcgattctagtgatgaggaacccattgaagatgaacagacaccgatccatatcagctggctgtcgctgtctagagtgaattgtagccagttcctcgggctttgtgctcttcccggttgcaagttcaaggatgtccgcagaaacgttcaaaaggataccgaagagcttaagtcctgcggcatccaggacatttttgtgttctgtacaagaggtgagctatcaaagtacagggtgcccaacctgctggatctctaccagcagtgcgggatcattactcaccaccatcccatagccgatggtgggaccccggatatcgcttcatgctgtgaaataatggaggaactgactacctgcctcaagaactaccggaaaaccctaatccattgttatggcggtttgggaaggtcgtgtttggtagctgcctgcttacttttgtacctgagcgacacaatcagtcccgaacaggctattgattcactccgagatctgagaggctctggtgccattcagacgattaagcagtataactatctccatgagtttcgcgacaaattggctgcacacctctcctccagggactcccagtcacggtctgtgtctcgatag

SEQ ID NO: 28273 - DNA, 501 bp, synthetic construct
  misc_feature 1..501: note = Description of Artificial Sequence: Synthetic coding sequence
  source 1..501: mol_type = other DNA
atgaatccgtgctgtaaatttaaggatgtgaggagaaacgtgcagaaagacactgaggagctgaagagttgcgggatccaggacatcttcgttttctgcactcggggagagctctctaagtacagagttcctaacctgctcgacctgtatcagcaatgtggtataatcacccaccaccaccctatcgcagacgggggaacaccagatatcgccagttgttgtgagattatggaggaattgacgacatgcctcaagaactatcgcaaaacgctcattcactgttacggcggacttgggaggtcctgtctcgtagccgcatgccttttgctgtacctttccgatacaattagcccggagcaggcgatcgactccctacgggatttgaggggatcaggggctatacaaaccatcaagcaatacaattacctccacgaatttagagataaactggccgctcacctgtctagcagagatagccagagcagaagtgtgagtaggtag

SEQ ID NO: 28274 - DNA, 210 bp, synthetic construct
  misc_feature 1..210: note = Description of Artificial Sequence: Synthetic coding sequence
  source 1..210: mol_type = other DNA
atgaaaccaccaagctctatccaaacgagtgagttcgactcctccgacgaagagcctatcgaggacgagcaaactcccatacatattagttggctgtcactgtcaagggtgaactgttcacagtttctgggactttgtgcactgccaggctgtaagttcaaagacgtgcgacgcaatgtacagaaggagaaaaagaaaaagaagaaatag

SEQ ID NO: 28275 - DNA, 624 bp, synthetic construct
  misc_feature 1..624: note = Description of Artificial Sequence: Synthetic coding sequence
  source 1..624: mol_type = other DNA
atgaagcccccatcctcaattcagacgtccgaatttgactccagcgatgaggaaccgattgaagatgaacagacccccatccacatctcatggctgtctctgtcccgcgttaactgctctcagttcctgggactgtgcgcactacctggatgtaaattcaaggacgtgcgaaggaacgttcagaaggataccgaggagctgaaatcatgtggaattcaggacatattcgtgttttgcactcggggagagttgagtaagtatcgcgtcccgaacctgctggacctgtatcagcaatgtggtatcataacccaccaccatccaatcgctgatgggggaactcctgatatcgccagctgttgcgagattatggaggagcttacaacatgtttgaaaaatctcttttgctatggtggcctggggaggtcttgcttggttgcggcatgcctcctgctgtatctctctgacactatcagcccagaacaggcgatcgattcattgcgggatctgagaggatccggcgcaatacagaccatcaaacagtataattatcttcacgagttccgcgataaattggctgctcacctcagcagtagagactcccagtcacggagcgtgagcagatag

SEQ ID NO: 28276 - DNA, 519 bp, synthetic construct
  misc_feature 1..519: note = Description of Artificial Sequence: Synthetic coding sequence
  source 1..519: mol_type = other DNA
atgaaacctccttcaagcatacagacgtcatgtaaatttaaggatgtccgaagaaatgttcagaaggacactgaagaacttaaaagctgcggcatccaggacatctttgttttctgcacccggggagagttgtcaaagtaccgggtgcccaacttgttagatttgtaccagcaatgcggtattataacccaccaccaccccattgctgatggaggtaccccagacattgcgagttgttgcgagatcatggaagagctgacaacttgtctgaagaattaccggaagaccctcatccattgctatggtggccttgggaggagttgtctggtcgccgcttgtctcctgctctatctcagcgacaccatttcgcccgagcaggccattgattcgctgagggaccttagaggttccggtgcgattcagaccattaagcagtataattacttgcacgaatttagagataaactggccgcacatctgagctcccgggacagtcagtcacgttccgtctccaggtag

SEQ ID NO: 28277 - DNA, 2871 bp, synthetic construct
  misc_feature 1..2871: note = Description of Artificial Sequence: Synthetic coding sequence
  source 1..2871: mol_type = other DNA
atgagtagcgggttatggagccaggagaaggtgaccagcccctattgggaagaacgaatcttctacttgctcctccaggagtgttctgtgacagataagcagacccagaaactcttgaaggttcctaagggcagtattggccagtacatacaagacagaagcgtaggccactctagaattccctctgccaaagggaaaaaaaaccagatcgggttgaaaatactagagcagccccatgccgtgttatttgtggacgagaaagatgtcgtagagattaacgaaaaatttaccgaactgctgcttgcaatcaccaactgtgaagaacggttttcactcttcaagaataggaatagactgtcaaagggactccagattgatgtgggctgcccagtcaaggtacagttacgatctggcgaggaaaaattcccaggcgtggtgaggtttcgcggacccctactcgcagagcgcacagtgtctgggatctttttcggggtagaactgctcgaagaaggacggggacaaggtttcacagacggcgtgtaccagggaaaacagctattccaatgcgatgaggactgcggagtctttgttgccctcgataagctggagcttattgaggatgatgacaccgcactagaaagcgactacgcaggaccaggtgacacgatgcaggtcgagctgccgcctctagagataaatagtcgagtttcactgaaggtgggcgagactatcgaaagcggtacggtaatcttctgtgacgtgctgccgggtaaagaaagtctagggtacttcgtgggagttgacatggataaccccattggcaattgggatggacgctttgatggcgtccagctgtgctccttcgcttgtgtggagtccacaattctcctccatatcaatgacatcataccggctctctccgagtctgtcacccaagagcggagacccccaaaattggcctttatgagtaggggggtaggcgacaagggatctagtagtcataacaagccaaaggcaaccggctctacttccgaccccggtaacaggaatagaagtgaactgttttatactctaaacggctcttccgtagacagtcaaccccagagtaaaagcaaaaatacatggtacattgacgaggtagccgaggatccggcaaagtcgctgactgaaatttcgactgattttgaccgatcatccccgccactccaaccgccacccgtgaattccctcaccaccgagaacagatttcacagcttacccttcagcctgacgaagatgcccaataccaatggaagtatcggacattcacccctgagcctgtcagcccagagtgtgatggaggaacttaatacagcacccgtccaggagtcaccaccactggccatgcccccaggaaatagtcacggtcttgaggtgggatcacttgctgaggttaaagagaaccctccgttctacggcgtgatccgctggataggccagccgcctggactgaatgaggtactggccggactggaactcgaggacgagtgcgctggatgcacagatggtacatttaggggaacccgctactttacatgcgcactcaaaaaggctctctttgttaaactcaaatcttgccgtccggacagtcgcttcgcctctctgcagcccgttagcaatcagatagaacgctgcaattctttggcttttggtgggtacctctcggaggtggtggaagagaacactccgcctaagatggagaaggagggtttagaaattatgatcggcaagaagaagggcatacaagggcactataattcatgttatctggatagcaccctcttttgcctgtttgccttttcatcagtgctggacacggtcttgctacggccaaaggagaagaatgacgtggaatactatagtgaaacccaagagctgctacgaaccgaaattgtcaatccattgcgaatatacgggtatgtgtgcgccaccaaaattatgaagctgcggaagatacttgagaaggttgaggccgctagcggtttcacttcagaggagaaggatccagaagaatttctcaacatactgttccatcatatactccgggtggaaccacttcttaagatccgctccgcgggtcaaaaggtccaggactgctacttctatcaaatctttatggaaaaaaatgagaaggtgggggttcctacgattcaacagctcctcgaatggagctttattaattccaacctgaaattcgctgaggcaccgagttgccttattattcaaatgccacggttcgggaaggattttaaactctttaaaaaaatttttccaagcctggagctcaatatcaccgacctcctggaagacacacccaggcagtgcaggatctgtggaggcctggctatgtatgaatgtcgggagtgttacgacgatcccgacatctctgccggtaagatcaaacagttttgtaagacgtgcaatacacaggtgcacctgcaccctaaaagactcaaccataagtacaatcctgtctctctgcccaaagaccttccagactgggactggaggcacgggtgtattccgtgccagaacatggagctattcgcggtgctgtgtatcgagacgtcacactacgtggcttttgtgaagtacggtaaagacgacagcgcctggttgttctttgacagtatggctgatcgcgacggagggcagaacgggtttaacattccgcaggttacgccctgccccgaggtgggtgagtacctgaagatgagcttggaggacctacactctctcgacagtcgtcgcattcagggttgcgccagaagattgttgtgtgatgcctacatgtgtatgtaccagtcgccaaccatgtccctgtataagtag

SEQ ID NO: 28278 - DNA, 2862 bp, synthetic construct
  misc_feature 1..2862: note = Description of Artificial Sequence: Synthetic coding sequence
  source 1..2862: mol_type = other DNA
atgtcctcaggcctatggtcccaggagaaggtgaccagcccttattgggaagaaaggatcttttacctgcttctgcaggagtgtagcgtcactgacaagcaaactcagaagctgctgaaggtgccaaagggctctatcggtcaatatattcaggatcgctccgtgggacattctcggatcccctccgctaagggaaaaaaaaatcaaatagggttgaaaatacttgaacagccccatgccgtgttatttgtggatgaaaaggatgtggtggagattaacgaaaagttcaccgaacttttgctcgcgattaccaattgcgaggagaggttttcccttttcaagaaccgaaaccggctgagcaagggcttgcagattgacgtgggctgtcctgtgaaggtccagctgagatctggggaagagaagttccccggagtcgttcggttcaggggacctctgttggccgagaggactgtctcagggattttttttggcgtggaacttctagaagaggggagaggccagggtttcaccgacggggtctatcagggtaaacagttattccagtgtgacgaggattgcggcgttttcgtcgctctggacaagctggagctgatagaggacgacgacactgccctcgaaagcgactatgccggaccaggagatacgatgcaggtcgaattgccgcctctagaaataaattcacgagtgagcctgaaagtcggggagaccattgaatccggcacagtgatcttctgtgacgtcctccccggaaaggaatccctgggatactttgtgggcgtggacatggataatccaatcgggaactgggatggaagatttgacggagtgcagctctgctcttttgcctgcgttgagagcacaatcctactccatatcaatgacattatccccgaaagtgtcacccaggagagaaggcccccaaagctggcgttcatgagtcggggagtcggggacaagggatcgtcctcacacaacaaacctaaagcaacaggctccacaagcgacccaggcaacaggaaccgcagtgaacttttttataccctgaacggctcaagtgtggatagtcaaccacagagtaagtctaaaaacacgtggtacatcgacgaggttgccgaggaccctgccaaaagcttgactgagatcagcaccgattttgaccgtagcagtccaccactccaaccaccgccagtcaactccctgacaacggagaataggtttcacagtttaccattcagtcttacaaaaatgccaaacacaaatgggtcgatcggtcatagccccctgagcctcagtgcccagagtgtgatggaggaactaaacacagccccagtacaggaatctcctccactggcgatgcctccgggaaatagtcacgggctggaggttggctcactcgctgaagtcaaagagaacccacctttctatggggtcataaggtggatcggccagccgccaggcctgaatgaggtgctggctggactcgaacttgaagatgaatgcgctggatgtacagatgggacatttagggggactcgttacttcacgtgcgctctcaaaaaggctttgttcgtgaaattgaagagctgccgtcccgacagccgcttcgcttccctccagcctgtctccaaccagatagagcggtgtaattccctagcgttcggcggttaccttagcgaggtcgttgaggaaaacactcctcctaaaatggagaaagagggcctggagattatgatcgggaagaagaaaggcatacagggtcattacaacagctgttatctggatagtaccctattttgcctgtttgctttctcaagcgtgctggataccgtcttgttaagacccaaggagaaaaatgatgtggagtattactcagaaacccaagagctcttgaggacggagattgtcaatcctctgcggatttatggttacgtctgcgctaccaaaattatgaagttaagaaagatcctggagaaggtggaagcggcttctggatttaccagcgaggagaaagacccggaggaattcctgaacatcctctttcaccacatactacgcgtggaacctctcctcaagataagatccgcagggcagaaggtgcaggactgctacttctatcagatattcatggagaaaaatgagaaagttggcgtgccaaccattcagcagctgcttgagtggtctttcatcaatagtaatctcaagttcgctgaagccccaagctgtctgataatccagatgccgagatttggcaaggattttaagttattcaagaaaatcttccctagtctcgaactgaacataacagacttgctcgaggacacacctagacagtgtcgaatctgcgggggactcgcaatgtacgagtgccgtgagtgctatgatgacccagacatcagtgccggaaaaatcaagcagttctgcaagacttgtaatactcaagtgcatttgcatcccaagagactcaaccacaaatacaaccctgtttcattgccaaaggacctgcctgactgggactggagacacgggtgcatcccttgtcaaaacatggaactgtttgcagtactttgcattgagacttctcattacgtcgcgttcgtgaagtacggaaaagatgactccgcgtggctgttcttcgactccatggcagatcgtgacgggggacagaatgggttcaatatcccccaagtgaccccttgcccagaagttggggaatatctgaagatgtctctggaagatttgcattcactagatagccgtaggatccagggctgtgccaggagactcctatgcgacgcctatatgtgtatgtatcagtcccccaccatgagtctctataaatag

SEQ ID NO: 28279 - DNA, 2862 bp, synthetic construct
  misc_feature 1..2862: note = Description of Artificial Sequence: Synthetic coding sequence
  source 1..2862: mol_type = other DNA
atgtcatctggtctttggtctcaggagaaggtgaccagcccttactgggaagagaggatattttacttactgctgcaggaatgttctgttaccgataagcagacccagaagctcctgaaggtgcctaaagggtccattggccagtacatccaggatagatcggtgggtcattccagaattccatccgcaaaaggcaagaagaaccagataggcctgaagatcctggagcagccccatgcggtcttgtttgtcgacgaaaaggacgtggtggagattaatgaaaaattcaccgaactgctgctcgcaattactaattgcgaggaaaggttctccctgtttaaaaacaggaatcgcctctcaaaaggactccagattgatgtgggttgtccagtgaaagtccaactgcgatccggagaggaaaaatttcctggtgttgtgcgctttcgcggacctctgctcgctgagagaaccgtgtcaggaatcttcttcggcgtcgaactgctggaggagggcagaggccagggatttacggacggggtgtaccagggcaaacagttgtttcagtgtgatgaggactgtggagtttttgtcgctctcgacaaattagagcttatagaggatgatgacactgccttggagtccgactatgctggacccggagatactatgcaggtggaattaccaccgttggagatcaactcccgcgtgagcctgaaagtgggtgagaccatagagagcggaacagtcatattctgtgacgtcctgcccggtaaagagtccttgggttacttcgtgggggtcgatatggataatccgattggaaactgggacggcaggttcgatggtgtgcagctctgtagcttcgcctgcgtagagagtacaattttgctacacatcaacgatatcatcccagaatccgtcacccaggaaaggagaccaccaaagctggccttcatgtcacggggagtgggagataaggggagttccagccataataaacctaaggctacaggcagtacaagcgacccaggcaacagaaatcggagtgagttgttttacacacttaatggaagttcagtagatagccagccacagtctaagtcaaaaaatacctggtacatcgatgaagtcgccgaggacccagccaagtcattgaccgaaatttcgacagactttgacagaagctcacctcccttgcagcctccccctgtcaactctctgactacagaaaacagatttcatagccttcccttttcgctaaccaagatgccaaatacaaacggatcaatcggtcactctcctttgagtctatcagcccaatccgtcatggaagaactgaacaccgcaccagtacaggaatcaccaccgctggcgatgcccccaggtaattcccacggtctcgaagtgggatctctcgccgaggtaaaggaaaaccctccgttctacggcgtgatcagatggatcggccagcctcctggtttgaacgaagtcttagccggacttgagttggaggatgaatgcgcaggttgtacggacgggacttttcgaggcaccagatactttacttgcgctctgaaaaaagcactgttcgtaaagctcaaaagctgtaggcccgacagcaggttcgcatccctccagcccgttagtaatcaaatcgaacgctgcaattccctcgccttcggaggatacttatcggaggtggttgaagaaaatacacctccgaagatggagaaagagggattggagattatgatcgggaagaagaaggggatacaggggcattacaacagttgctacctggactctactctgttttgcttgtttgctttttcttccgtattagacacagtcctcctcaggcccaaggagaaaaatgacgtggagtactatagcgaaacacaggaattactgagaacagaaatcgttaacccccttcgcatatacggatatgtgtgtgccacaaagattatgaaactgaggaagattctcgaaaaagttgaggccgctagcggttttacaagcgaagaaaaggacccggaggagtttttgaatatcttattccaccacattctgcgagtagagcctttactaaaaattcggtccgccggacaaaaggtgcaggactgctacttttatcagatttttatggagaaaaacgagaaggtaggagtccccacaatacagcagctgctggaatggtctttcattaattcgaatctaaaattcgccgaagcaccctcatgcctcatcatccagatgccaaggtttggcaaggatttcaagctgttcaagaagatatttccttcactggagttgaacattactgatttgctggaagatacaccaagacagtgccgcatctgcggaggactcgctatgtacgaatgcagggaatgctacgatgaccctgacatttctgccggaaagatcaaacagttttgtaaaacttgcaacacacaagtgcatttacacccaaagagactgaatcataaatataaccctgtatctctgccaaaggatctgcctgactgggactggcggcatggttgcattccgtgtcaaaatatggaattatttgctgtgttgtgcatcgagacctcccattacgtggccttcgttaagtacggcaaggatgattctgcctggctttttttcgacagcatggcggaccgagacggcggacaaaacggattcaacatccctcaggtgaccccctgcccagaggttggcgagtacctcaagatgtccctcgaggacctgcacagcctggactctcgcaggatacagggttgcgccagacgcctgctgtgtgatgcctacatgtgcatgtatcagagcccaaccatgtcgctttacaaatag

SEQ ID NO: 28280 - DNA, 2871 bp, synthetic construct
  misc_feature 1..2871: note = Description of Artificial Sequence: Synthetic coding sequence
  source 1..2871: mol_type = other DNA
atgagctctggattatggtctcaggaaaaagtgacttcaccctactgggaagaacggatcttttacctgctgctccaagaatgctctgttaccgataagcaaacccagaagttactaaaggttccaaagggcagtattggccagtatatccaggatagatccgtcggtcacagcagaataccaagtgctaaaggcaagaagaaccaaatcggtctcaaaatcttggaacagccacacgccgtcctcttcgttgatgaaaaggacgttgtggagattaacgagaaatttactgagctacttctggcaatcacgaattgcgaggagcgcttttccctgtttaagaacagaaaccggctgtccaaaggactgcagattgatgtcggctgtcctgtgaaggtccagcttcggtctggagaagagaaattccccggagtcgttcgcttccggggtcctcttttggcagagagaaccgtgtcaggtattttctttggggtggagctcctggaggaaggcaggggccaggggtttaccgatggggtgtaccagggaaagcaattgtttcagtgtgacgaggactgtggagttttcgttgccctcgacaaactagagctgattgaggatgacgacacagccctggaaagcgattatgccggtcccggtgataccatgcaagtggaactgcccccacttgagataaacagccgcgtctctttgaaagtgggtgagacaattgaaagcgggacagtgatcttttgtgacgtcctgcctggaaaggaatcactggggtactttgtgggagtggacatggataaccccatcggaaattgggacgggaggtttgatggggttcagctatgctcctttgcgtgtgttgaatctaccatccttctgcacatcaatgatatcattcccgctgtgagcgagtctgtgactcaagaacgtagacccccaaagctggcattcatgagccggggtgtgggcgataagggcagcagttcccataataagcccaaagcgactggaagcacctctgatcccggtaataggaatcgaagtgaactgttctatactctaaatgggagctcagtggattctcagccacagtcaaaatctaagaatacatggtacatagacgaagtcgctgaggaccccgcaaagtctctcacagaaatttcaacagattttgaccgatccagcccgccactgcaacctccgcctgtcaattctctgacaaccgagaaccgattccactctctacccttctctcttaccaagatgccgaacaccaatggcagcatagggcacagcccacttagcttatccgcccagtccgtaatggaagaactgaatacggcccctgtgcaggaaagcccacctctggccatgcctcctggcaactcacacggcctcgaagtcggaagcctcgcggaagtcaaggagaatcctcccttttacggggtgatccgctggattgggcaaccacctggtcttaatgaggtcttagccggactggagttggaggacgagtgcgcgggatgcactgacggaaccttccgtggcacacgctattttacttgcgcattgaaaaaagccctgtttgtgaaactgaagagctgcagacctgactccagattcgccagcttgcagcccgtgagcaatcaaattgaacgatgcaactcactagcgttcgggggatacctctctgaagtagttgaggaaaacacaccccctaaaatggagaaggaagggctcgagataatgatcggaaaaaaaaagggtatccagggccattacaacagctgttatttggacagcaccctgttttgcctgttcgcattttcaagcgttctggacactgtcctgttgagacctaaggagaaaaacgacgtggaatattactctgagactcaagaactgttgcgtactgagatcgtcaatccactgcggatctacggatacgtgtgcgctacaaaaatcatgaaattacgcaagattctggaaaaagtggaggccgcttcaggctttacaagtgaggaaaaggatccagaagaattccttaatatcctatttcatcatatcttgcgggtggaacctctgttaaagatccggtctgcaggccagaaggtccaggactgctacttttaccagatttttatggagaaaaacgagaaagtgggggtgccaacaattcagcagctgctggagtggagcttcattaatagtaatttgaaattcgctgaggctcctagctgcctcattatacaaatgccacgctttgggaaggacttcaagctgttcaaaaaaatatttccttccctagaactgaacattacggatctgctcgaggacacaccccgacagtgccgaatttgtgggggactggccatgtatgagtgccgagaatgttacgatgaccctgacatatctgccggaaagattaagcagttctgcaaaacatgcaacacacaggtccatctgcaccccaagcgtttgaaccacaagtacaatcctgtgtctcttcccaaggatctgccagactgggactggagacatggatgtattccatgccaaaatatggaactgtttgccgtgctgtgcatagagacttctcattacgtcgcttttgtaaagtatgggaaagacgattcggcctggcttttctttgactcgatggctgaccgcgatggaggacagaatggcttcaacatcccacaagttaccccatgtcccgaagtcggagagtacctcaagatgtctctcgaagatttacactcgcttgatagtcgcaggatccagggctgcgcaagacgactgctatgcgacgcttacatgtgcatgtatcagtctcctaccatgtcgctctataaatag

SEQ ID NO: 28281 - DNA, 450 bp, synthetic construct
  misc_feature 1..450: note = Description of Artificial Sequence: Synthetic coding sequence
  source 1..450: mol_type = other DNA
atggctagatctaatctgccactggcgctcggcctggctttggtggctttttgcctgcttgcgctgcccagagacgcgcgtgctaggccacaggagagaatggtgggagagttgcgtgatctcagcccggatgacccacaagtgcagaaagctgcacaggcagcagttgcttcatataatatggggagcaattccatttattatttccgcgacactcacatcattaaggcacagtcccaactggtcgccggaatcaagtatttcttaaccatggagatgggcagtacagattgcagaaaaactcgggtcaccggggaccacgttgacttaactacatgccccctggctgcaggtgcgcagcaggagaagctccgttgcgatttcgaagtattggttgtcccctggcaaaattcatctcagttacttaaacataactgcgtgcagatgtag

SEQ ID NO: 28282 - DNA, 504 bp, synthetic construct
  misc_feature 1..504: note = Description of Artificial Sequence: Synthetic coding sequence
  source 1..504: mol_type = other DNA
atgctgcctgagaaggctttacacggccaccctcagctgcctcggactgtgcccactagagctgccatgcgggctgccggaaccctgttggcgttctgttgtttagtcctgtcaactactggcggaccatccccagacacttgtagtcaggatcttaactctcgggtgaagcctggatttcccaagaccatcaagacaaatgatccaggggtgctgcaggccgctcggtattctgtggagaagttcaacaattgcaccaatgacatgtttttgttcaaggagagcagaatcacacgcgcactagtccaaatcgtgaagggtctgaaatacatgttagaagtggagattgggagaacaacctgtaagaagaatcagcacttgcgtttggacgactgtgatttccaaactaaccataccctgaagcaaaccttaagctgctacagcgaggtctgggtcgtgccctggttgcagcacttcgaggtccccgtcctacggtgtcactag

SEQ ID NO: 28283 - DNA, 438 bp, synthetic construct
  misc_feature 1..438: note = Description of Artificial Sequence: Synthetic coding sequence
  source 1..438: mol_type = other DNA
atgagggctgctggaaccctgctcgcattctgttgtttggtcctcagcaccacagggggacctagtccagacacatgctctcaggatctgaattctcgagtgaagccaggttttccaaaaacgatcaagacaaacgaccccggagtgctccaggccgcacggtactcagtcgagaaatttaacaattgtacaaatgatatgttcctctttaaggaaagccgtattacacgggcactcgtccagatcgtgaaaggcttaaagtacatgttggaggtcgaaataggtaggacaacatgcaagaagaaccagcatttgcgactagatgactgcgacttccagacaaaccataccttgaagcaaacactgtcctgttattctgaggtttgggtggtaccgtggctgcagcacttcgaagtccccgtgctcagatgccattag

SEQ ID NO: 28284 - DNA, 453 bp, synthetic construct
  misc_feature 1..453: note = Description of Artificial Sequence: Synthetic coding sequence
  source 1..453: mol_type = other DNA
atgctaggagcagcccttcgccgatgtgccgtcgccgctaccactagggctgatccgaggggcctgttgcattcagcgcgaactcccggtccagccgtcgcaattcagtcagtgcgttgttactcccatgggagccaagagacagacgaggagtttgacgctcggtgggtgacctatttcaacaagccggatatagatgcttgggagctgaggaagggcatcaacacgctggtgacttacgacatggtgcccgagccaaagataatcgacgccgcattgcgagcttgccggagactcaacgattttgcttcaacggtgcgcatcctggaggtcgtgaaggataaggctgggccacacaaggaaatttacccctacgttatccaggagttacgcccaacattgaacgagctcggtattagtacgcccgaagaactgggactggataaggtttag

SEQ ID NO: 28285 - DNA, 318 bp, synthetic construct
  misc_feature 1..318: note = Description of Artificial Sequence: Synthetic coding sequence
  source 1..318: mol_type = other DNA
atgggcgatgtggagaagggcaaaaaaatttttattatgaagtgttctcagtgccatactgtcgagaagggcggtaaacataaaactggaccaaacctgcacggactatttgggaggaagactggacaagctcccggatactcatatacggctgctaacaagaacaagggaattatttggggcgaggacacactgatggagtatctggagaacccgaagaaatatattccaggtactaaaatgatatttgtcggcatcaaaaaaaaagaggaacgcgctgacttaattgcctacctaaaaaaagccactaacgaatag

SEQ ID NO: 28286 - DNA, 318 bp, synthetic construct
  misc_feature 1..318: note = Description of Artificial Sequence: Synthetic coding sequence
  source 1..318: mol_type = other DNA
atgggcgatgtggagaagggaaaaaaaatttttataatgaaatgcagtcagtgtcatacagtggaaaagggaggcaagcacaaaacgggaccaaacctccacggcttgtttggtaggaaaacgggtcaggcacccggatattcctatacagctgctaataagaacaaggggattatctggggagaagatactctgatggaatacctcgaaaaccctaaaaaatatatacctgggacaaaaatgattttcgtggggattaagaagaaggaggagagagctgacctcatcgcttatttaaagaaggctactaacgagtag

SEQ ID NO: 28287 - DNA, 318 bp, synthetic construct
  misc_feature 1..318: note = Description of Artificial Sequence: Synthetic coding sequence
  source 1..318: mol_type = other DNA
atgggtgacgtggagaaaggcaaaaagattttcattatgaaatgcagccagtgtcacacagttgagaaaggaggcaagcacaagacaggacccaatttgcacggcttatttgggcgtaagaccggtcaagccccaggatacagctatactgccgcaaataaaaataagggcataatctggggagaagataccttgatggagtacctggagaaccctaaaaagtatatccccggaacaaaaatgatctttgtagggataaagaagaaagaggagagggcagatttgatcgcctacctgaagaaggccaccaatgagtag

SEQ ID NO: 28288 - DNA, 306 bp, synthetic construct
  misc_feature 1..306: note = Description of Artificial Sequence: Synthetic coding sequence
  source 1..306: mol_type = other DNA
atgggagacgttgagaagggaaagaaaatctttattatgaaatgttcccagtgccatacagtggagaaggggggaaagcataaaacaggcccaaatctccatggccttttcggcagaaagaccgggcaggcgccaggatacagttacacggccgcaaataagaacaagggtataatttggggtgaggacactttgatggaatatcttgagaatcccaagaaatatattcctggcaccaaaatgatcttcgtaggcatcaaaaagaaagaggagcgggctgatctgatcgcatatttgaagaaatag

SEQ ID NO: 28289 - DNA, 1632 bp, synthetic construct
  misc_feature 1..1632: note = Description of Artificial Sequence: Synthetic coding sequence
  source 1..1632: mol_type = other DNA
atgggaacttccctgagcccaaacgatccctggcccctgaatcccttgagcattcagcagaccaccctactcctcttactttctgttctcgcaaccgtccacgtgggccagcggctgctgcggcagagacgcaggcagctcaggtccgctcccccagggccattcgcatggcctctgattggcaatgcggcagctgttggccaggcggcacacctgtcgttcgcccgactggctcgtaggtacggggatgtcttccaaatacgtttgggcagctgccccattgtggtcctcaacggtgaacgggctatccaccaggccctcgttcagcagggctcggcattcgcagacagaccagctttcgctagctttagggtggtgagcggcggacgaagcatggcctttggccactatagtgaacattggaaagttcagcgacgggctgcccactcaatgatgagaaattttttcacccggcaacctcgctcacgacaggtgctggaggggcacgtcctcagtgaggcgcgagagctggttgcgctgctcgttagaggatctgcagatggggctttcttggaccctcggccattgacagttgtggcagtggccaacgtcatgagcgccgtctgttttggatgccggtactctcacgatgacccagaattccgcgagttgctgtcgcataacgaagagttcgggagaaccgtcggcgcaggctcgctggttgacgtgatgccctggcttcagtactttccaaaccccgtaaggactgttttccgcgagttcgagcagctaaacaggaacttcagcaattttatcctggacaaattcttaagacactgcgagtcgctccgccctggtgcagcccctagagatatgatggatgccttcatccttagtgcagaaaagaaggccgctggagactcgcatggaggcggagctcggctggatctcgaaaacgtacccgcaactatcacagacatctttggagcatcacaggacacactcagcacggccttgcagtggctcttattgctcttcactcgatacccagatgtacagaccagggtgcaagcggaattggatcaggtcgtgggccgagatcggcttccctgtatgggtgaccagccaaatctgccgtacgttctggcttttttgtatgaggcgatgcggttctcttcttttgtaccagtgacgatacctcacgccacaacagccaatacctctgtactgggataccatattcctaaagatactgtggttttcgtcaaccaatggtccgttaatcacgatccggtcaaatggccaaacccggagaacttcgatccagcccgattcttggataaggacggattgatcaacaaggacctgacgtctcgcgtgatgatcttctctgtgggaaaacggagatgtatcggagaagagctcagcaaaatgcagctatttctctttatcagcatactggcccatcaatgcgacttcagagctaatcccaacgaacctgcaaaaatgaattttagttatggactcaccattaagcccaagagttttaaggtcaatgtgactttgagagagagtatggaactgctggattccgctgtgcaaaatcttcaggctaaggagacctgccagtag

SEQ ID NO: 28290 - DNA, 1632 bp, synthetic construct
  misc_feature 1..1632: note = Description of Artificial Sequence: Synthetic coding sequence
  source 1..1632: mol_type = other DNA
atgggtacgagtctcagccccaacgatccatggcctctgaaccctctctccatccaacagactacactcctgttactactgtccgtactggcaacagtacacgtcggccagaggcttctccggcagcgaaggcgtcagctacgctctgcaccccctgggccattcgcttggcctttgattggcaacgctgccgcagtgggccaggccgctcacctaagcttcgccaggctcgctagacggtatggggatgtgttccagatccgtctcggtagctgtccgatcgtagtgctcaatggcgagcgggcaatacaccaggccctggtgcagcagggttctgcctttgccgatcggccagctttcgcaagtttccgggttgtctcaggcggacggtccatggcgttcggtcactactctgaacactggaaagttcagcgaagggccgcacactctatgatgcgtaatttctttacaagacagccccgttctcggcaagtcctggagggacacgtattatcagaggcacgcgagctcgtggcacttcttgtcagaggaagtgcagacggagcatttctggacccgagacctctcacggtagtggctgtggcaaacgtcatgtcggccgtttgcttcgggtgcagatactcgcatgatgatcccgagttccgcgaactgctgtcccataacgaggagtttggtcggactgtgggtgccggaagtttagtcgatgtgatgccatggttgcagtactttccaaaccctgttaggacagtgtttcgcgagtttgagcagctgaacaggaacttctccaatttcattctggacaaatttctgagacactgtgagagtctgcgacccggtgccgctccccgtgacatgatggatgcctttattttgtctgcagaaaaaaaagcagccggagactcccacggaggaggcgcacgtctggatcttgaaaatgtacctgccactattactgatatattcggggcttcacaggacactctcagcacagcactccagtggctcctgctgctgtttactcgctaccccgacgtgcagacccgggtccaggcggagttggaccaggtggtgggaagggaccgactgccatgtatgggggatcagcccaacctgccttatgtgctggccttcttgtatgaagcgatgcgattttcctcattcgtacccgtcactattccccacgctaccacagcgaatacttcagttctgggttaccatattcccaaggacacagtcgtgttcgtaaaccagtggtctgtgaaccacgaccctgtaaaatggccgaacccagaaaactttgatcctgccaggtttctggacaaggacggactcataaataaggatttgaccagtagagtgatgatcttctctgttgggaaaaggagatgcataggcgaagagctctctaaaatgcagctcttcctgttcatatccattctggctcaccagtgcgactttcgggcaaatcccaacgagccagccaaaatgaacttctcttatggtctgaccattaaacctaaaagcttcaaggtaaatgtgactctcagggagagcatggaactgcttgattccgccgtacagaacttacaggcaaaggagacctgccagtag

SEQ ID NO: 28291 - DNA, 3399 bp, synthetic construct
  misc_feature 1..3399: note = Description of Artificial Sequence: Synthetic coding sequence
  source 1..3399: mol_type = other DNA
atggagcccgacagccttctggaccaggatgattcttacgagtcccctcaggagcgaccaggatctcgccgaagtctccctggatccctcagtgagaaatcccctagcatggagccctcagcagccacgcctttcagagtcactggattcttatctaggagactgaaagggtcgatcaaaaggacaaagagccaaccaaagctcgaccggaaccactcctttagacatattttaccgggattcaggtccgcagcagccgctgccgctgacaatgaacgcagccatttgatgccacgactgaaggagtcacggtcccacgagtctctgctgtcaccatcctcagctgtggaagcgctggacctaagcatggaggaggaggtagtcattaaaccagtgcattctagtatccttggccaggactactgcttcgaagtcaccacatcttccggcagcaaatgcttcagttgccggagcgctgcagagcgcgacaaatggatggaaaacctacgccgagccgtgcatccaaacaaggataattcccgcagggtcgagcacatcttgaagctctgggtgatagaggctaaggacctccccgcaaaaaagaagtacctttgcgaactctgtcttgatgacgtgctctacgcccgaactactggcaaactcaaaaccgataacgtcttctggggtgaacatttcgaatttcataatctcccccctttaaggacagtaaccgttcacctgtaccgggaaacagataagaagaaaaaaaaggaacggaacagctacctggggctggtaagtctccccgcagcttcagtcgctggtagacaattcgtagaaaagtggtacccggtggttacccctaacccaaagggagggaaggggccaggacctatgatccgtataaaggcaagataccagaccataaccatccttccaatggagatgtataaggaattcgcagagcacatcacgaatcattacttgggactttgcgccgcactggagcctattctgagcgccaaaacaaaggaggagatggcaagcgccctggtacacatactgcagagcaccggtaaagtcaaggatttccttaccgacctgatgatgagcgaagtggaccgttgcggggacaatgaacacctgattttccgggaaaatacccttgccaccaaggcaatagaggagtacctgaaattggtgggccaaaagtacctccaagacgccttaggtgaattcattaaggccctttatgaaagtgatgaaaattgtgaggttgatcctagcaagtgctccgccgcagaccttcccgagcatcaggggaacttaaagatgtgttgcgagttagcgttttgcaaaatcatcaacagttattgcgtgttccctcgagagctgaaagaagtgtttgccagctggaggcaagaatgctcgtccaggggaagaccggacatttccgagagattaatctctgctagcctgtttttgagattcctttgcccagccattatgtcaccctctctgttcaatctcctgcaggagtacccagacgacaggaccgccagaaccctgactttgatcgccaaggttactcagaatctggcgaattttgcaaagtttggttcaaaggaggaatatatgagctttatgaaccaatttctcgagcatgagtggacaaacatgcagaggttcctgctagagattagtaacccagaaacactgtctaacactgccggttttgaggggtatattgacctgggcagggagcttagcagtctgcattcacttctgtgggaggcagtgtcccagcttgagcagtccatcgtgagcaagctcggacccctgcctcgcatccttcgcgatgttcacactgctctatccaccccaggctcagggcagttgcccggaaccaatgatctggcctccaccccaggaagtggctctagctccattagcgccggacttcagaaaatggtgattgagaacgacctgtccgggctaattgacttcactaggctgccatctcctacacctgagaacaaggatctcttttttgttactcggagctcaggcgtacagcctagtcctgcccgttccagtagttatagcgaggcgaacgagcccgatcttcagatggcgaatgggggaaagtccctctctatggtggatcttcaggacgccagaactctggatggggaagcaggaagcccagccggtccagacgtcctgcctactgatgggcaggccgcagctgcgcagctcgttgctggctggcccgcaagagctacccctgtgaatctcgctggtctagccactgtgagaagggcgggacagacacccacaacacccggaacttctgagggcgcaccaggcaggccccagttactggcacccttgagttttcagaaccccgtgtatcagatggccgctggcctgcctctgtccccaagaggtctgggagattctggcagcgagggccactcaagtctttcgagccattcaaatagtgaggagctggccgctgctgccaaactggggtcattctcaaccgccgctgaagaactcgccagaaggccgggtgaactcgccagacgacagatgagcctaacagagaaaggtggccaacctaccgtgccaagacagaactctgcaggacctcagcgacggatagaccaaccccctccaccccctccccctccaccacctgccccacgcggtagaaccccgccaaatctgctgtctacccttcaatacccgcgacctagttctggcaccctggcatctgccagcccggactgggtcgggccttccacaaggctccgccagcaatcatccagctcgaagggagattccccagaactgaagcctcgggctgtccataagcagggtccgagcccagtgagtcccaacgctttggataggactgccgcttggttgctcaccatgaatgcacaactgttagaggacgaaggcctgggcccagaccccccacatagagatagactgcgtagtaaggatgaattaagccaggctgaaaaggacctcgccgtgctgcaggataaactgcggatatcaacaaaaaagttagaagagtatgaaactctgtttaaatgtcaggaggagaccacgcagaaacttgtccttgagtaccaggccaggttggaagaaggcgaggagaggctccgccgacagcaggaggacaaagacatccagatgaaaggcatcatcagcaggttaatgagcgtcgaagaggagcttaaaaaggaccacgcagaaatgcaggccgctgtggactccaagcagaagattattgatgctcaggaaaagcgtatcgccagccttgatgcggctaatgcacgactaatgtcagctttgactcagctcaaggaaagcatgcattag

SEQ ID NO: 28292 - DNA, 3198 bp, synthetic construct
  misc_feature 1..3198: note = Description of Artificial Sequence: Synthetic coding sequence
  source 1..3198: mol_type = other DNA
atgccacggttgaaggagtctaggagccatgagtctcttttgtcccccagctcagccgtggaggccttggatttgtccatggaagaggaagtcgtgatcaaaccggtccacagctccattctgggtcaggactactgtttcgaagtgacgacgtccagtggaagcaagtgcttttcctgtcggagcgcagcagagagggataagtggatggagaatctgaggcgcgctgtgcaccctaataaggataattctaggcgagtcgaacatattttgaagctttgggtaatcgaggctaaggacctacctgctaagaagaaatatttatgcgaactgtgtttggatgatgttctgtatgctcgaaccaccggaaaattgaaaactgataatgtgttttggggtgagcacttcgagttccacaatctgccacccctgcgcactgtaaccgttcacctgtaccgagagactgataaaaagaagaaaaaggaacgcaattcctaccttggcctggtgagcttaccagccgcttccgtggccggaagacaattcgtcgaaaagtggtaccctgtagtaactccaaaccccaaggggggtaagggacctggcccaatgattcgcatcaaggctcgatatcagaccatcacgattctgcccatggaaatgtacaaggagttcgctgagcatatcacaaatcactaccttgggctatgcgcagccttggagcccattctgtctgccaagactaaggaagaaatggcttctgcacttgtccacatcttacagtccacagggaaagtaaaggacttcctgacggatttgatgatgtcagaggttgatagatgcggagacaatgaacatttaatattccgcgaaaacactctggccaccaaagcaattgaggagtatctcaagctggtaggccagaaatacctgcaggacgcattgggtgagtttattaaggccctttacgagtctgacgaaaactgcgaagtggacccatcaaagtgttccgccgcagacctgcccgagcaccaggggaacctcaaaatgtgctgtgagctcgcattctgcaagatcatcaatagctattgtgtcttcccaagagagctcaaagaagtattcgcatcttggaggcaagagtgttcttctcgaggtcgcccagacatttctgagagacttattagtgcttcattgttcctgagattcttgtgccccgctattatgtccccaagcctttttaatctgctgcaggaatatccagatgaccgcacagcacgcacattgaccctgatcgcaaaggtgactcagaatctcgctaatttcgccaaattcgggagcaaagaggagtacatgtccttcatgaaccagtttctggagcacgagtggaccaatatgcaacggttcctgcttgagatatctaacccagagacactgagcaacaccgccggatttgaaggctacattgatctggggcgagaactgagctctctgcattccctcttgtgggaagctgttagtcaattggagcagtctatcgtatccaaactcggcccactgccccgtatcctgagagacgtccacaccgctctgtccacccccggttctggtcagctacctggcacaaatgacctggcgtctaccccaggctcaggatcttcctccatatctgccggactacagaagatggtgattgagaacgacctgagcggactgatcgatttcacccgcttgccctcccctacaccggagaataaggacttattcttcgtaacacggagtagcggggtgcaaccatctccggcaaggagtagttcttattccgaggccaatgagccggatctgcagatggccaacggcggaaaaagtctgtctatggtcgatctgcaggacgctagaactctcgatggtgaggcgggaagccctgccggtcccgatgtgcttcctaccgatggtcaggctgcagccgcacagttggttgctggttggcctgcgagagctacccccgtaaacttggctggcctcgctacagtgaggagagcaggccagactcctaccacaccaggtacatccgaaggggcacctggccgtccgcaactgctcgctcccttgtccttccagaacccagtgtaccagatggctgctggactccccctgtcccctcgagggctgggtgatagtggcagcgaggggcatagcagcctctcaagtcattccaacagcgaggagcttgctgccgctgccaagctgggttcattctccactgccgctgaggagctggcaaggagaccgggtgagctggcaaggcggcagatgtccttaaccgagaaaggcggacaacccacggttcccaggcagaattccgcaggaccgcagcggaggatcgatcagccaccacccccacccccaccccctcctcccgcacctcggggtcgaaccccccctaatcttctgagtaccctgcagtatccacgcccatcgagcggaacattagcgtctgccagcccagactgggtggggccatccactcggctgaggcagcaatcaagttcatcaaagggagatagccctgaactcaaacccagggctgtacataaacaaggaccatcccctgtcagtccaaacgctcttgatagaaccgcagcctggctcttgaccatgaacgctcagttgttagaagacgaaggcttggggcctgatccccctcatcgagacaggctaaggtccaaagacgagctgagccaggccgaaaaggatctcgccgtgcttcaggataagcttaggatttccaccaaaaagcttgaagagtacgaaaccttgttcaaatgtcaggaggaaactacacaaaaactggtcctggaatatcaggccagactggaagagggcgaggagcgactgcgacgccagcaggaagataaggatattcagatgaaggggattatctcacgccttatgtcggtcgaggaggagcttaagaaagatcacgccgaaatgcaggcggcagtagactcaaaacaaaaaatcatcgatgcacaggaaaagcggatagcctcactggacgccgcaaatgcacgccttatgagtgctctgacgcagctgaaggagcggtatagtatgcaggccagaaatgggatctcccctactaatccaacaaagcttcagatcaccgaaaatggcgagttcagaaattcgagcaattgttag

SEQ ID NO: 28293 - DNA, 3210 bp, synthetic construct
  misc_feature 1..3210: note = Description of Artificial Sequence: Synthetic coding sequence
  source 1..3210: mol_type = other DNA
tcccaaccaaaactcgaccggaaccattcttttcggcacatccttccaggtttccgaagcgcggcagccgctgcggctgacaatgagaggtcccacctcatgcccagactgaaggagagcagaagtcatgaaagcctgctctcaccctcaagcgcggtggaggccttggacctctctatggaagaagaggtcgtaataaaacctgtgcactcatcaatactaggacaagattactgctttgaggtcaccacctcaagtggatccaagtgttttagctgcaggagtgcagcggagagagacaaatggatggagaacctcagacgggcagtacatccaaacaaggacaacagccgcagggtggagcacatcctcaaactgtgggtcattgaggccaaggacctgcctgcaaaaaaaaaatatctgtgcgagttgtgcctagacgatgtgctctacgccagaaccacaggaaagctgaagaccgataatgtgttctggggtgagcacttcgaattccacaacttacctccattgaggactgtcactgttcacctgtaccgggagactgataaaaaaaaaaagaaggagaggaattcgtatcttggcctggtgtctctccctgctgccagcgtggccggaagacaatttgtcgagaagtggtaccctgtggtgacacctaatccaaaaggagggaaaggaccgggacctatgatacggattaaggctagataccagacaattactatcctgcccatggaaatgtataaggagttcgcagagcatatcacgaaccattatcttggtctctgcgccgctttagagccgattctgtcagccaaaaccaaggaggaaatggcctccgccttagtgcatattctgcagtctacgggcaaggttaaggattttctcactgacctgatgatgtccgaagtagatagatgtggcgacaacgaacaccttatatttagagagaacactcttgcaaccaaggccattgaagaatacttgaaactagtgggccaaaagtacctgcaggatgccttgggcgaatttatcaaggcactgtacgagagcgacgaaaactgtgaggtggatcccagcaagtgcagcgctgccgacctccctgaacatcagggtaatctgaagatgtgctgcgagctcgccttttgtaagatcattaattcttattgcgtgttccctcgagaactgaaagaggtgtttgctagctggcgccaggagtgtagcagccgcggacggcctgatattagtgaaaggttaatctccgctagtctatttctgagatttctttgccccgctattatgtcaccatcactgttcaacttgttgcaggagtatcccgacgatagaacagccagaacactgaccctcatcgcaaaggtaacccaaaatctggccaacttcgccaagttcggcagcaaagaggaatacatgtcatttatgaaccaatttcttgagcatgaatggaccaatatgcagagatttttgctggagatatcgaacccagaaacgctcagcaacaccgctggtttcgagggctatatagatcttggtcgggagctgagctcactgcacagcctcctgtgggaggcagtctcacagctggaacagtctatagtctccaaactaggcccactaccacgaatcctgagggatgtccacacagctctgagcacacctgggtcaggtcagttgccaggaactaacgacttagctagtactccagggtccgggagctcctccatcagtgctggcctccagaaaatggtcatcgagaatgacctgtcgggcttgattgactttacccgcttaccttctcctacaccagaaaataaggatctgtttttcgtgactcgcagttccggagtccagccgtcaccagccagaagttcctcttactcagaggcaaacgagcctgatcttcagatggccaatggaggcaaatcattatcgatggtggaccttcaggatgccagaacactggatggggaggcagggagtccagccggtcccgatgtcttacctacagatggacaggcggcagccgcacagcttgtagctgggtggcctgctcgggcaacaccggttaatctggctggcttagccactgtccgtagggccggacagactccgaccaccccaggcacaagcgagggcgcaccgggaaggccccagctgcttgccccactttcctttcaaaaccctgtgtaccagatggctgcaggtcttcctctgagcccccgaggtttgggcgatagcggctcagagggccatagttcactgagctcgcatagtaactcagaagaacttgctgctgccgcaaaacttggatcttttagtacagccgcagaagagttagcccgtaggcccggagaactcgcacgaaggcagatgtcgctgacagagaaaggtggacagcctactgtgccccgtcagaattccgcagggcctcagagaaggatcgatcagccacctccgcctcccccaccccctcctcccgctcccagaggtcgtactcccccaaatctcctgagcacattgcagtacccaaggcccagcagcgggaccttggccagcgccagccctgattgggtcgggcctagcacccggctgcggcagcagtcatcatctagcaagggtgattcccccgaacttaagcctcgtgccgtgcataaacaaggcccatcgcctgtgagccccaatgcgttggacaggacagcagcctggttactcaccatgaatgcccaactcctggaggacgagggacttgggcctgatcctccacatcgcgatcggctgcggtctaaggacgaactcagccaggcagaaaaggacctcgcagtcctacaggataagctcagaatctccactaagaagctcgaagaatatgagaccctgttcaagtgccaggaggagactacccagaaattggtcctcgagtaccaagcccgtctggaagaaggggaggaacggctacggcgacagcaagaggacaaggatatccagatgaaaggcattattagccgtctcatgtccgtcgaggaagagctcaaaaaggatcacgctgagatgcaggccgctgttgactcaaaacagaaaattatagacgcccaggaaaagcgaattgcttccttggacgcagccaatgcacgcttgatgagcgccctgactcagctcaaggagagtatgcattag

SEQ ID NO: 28294 - DNA, 876 bp, synthetic construct
  misc_feature 1..876: note = Description of Artificial Sequence: Synthetic coding sequence
  source 1..876: mol_type = other DNA
atggagcctgattcattgctggatcaggatgactcttatgagagtcctcaggagcggcctggtagccgccgtagtctgccaggaagtctgtcggagaagtcaccatcgatggaaccctccgctgccactcctttccgcgtcactgggttcctctctaggcgactcaagggttctatcaagcgcactaaaagccagccaaaactggacagaaaccattccttcagacacatccttcccggattcaggtcagcagccgcagccgctgcagataatgaacggtcccacctgatgcctagacttaaggaaagtaggagtcatgaaagcctgctctctccctctagtgctgtcgaggcacttgacctgtccatggaagaggaagtggtgataaagccagtgcactcgtcaatcttgggacaggattattgcttcgaggtaacgacctcctctggtagtaagtgtttctcctgtcgctccgctgccgagcgggataaatggatggaaaatttgcggagagccgtgcatcccaataaagacaacagtaggcgggtagaacacatcctgaagctgtgggtgattgaagctaaggatctgcccgcaaaaaaaaaatacttatgtgaactgtgcctggacgatgtgctgtacgccagaactaccgggaagcttaagactgacaacgtgttttggggtgaacactttgaattccataacttgccacctctgagaaccgtgactgtgcacctctaccgcgagactgataagaaaaagaaaaaggaaaggaactcctatctgggattagtttcacttccggcagcctctgtggcagggcgacaattcgtggaaaagtggtatcctgtggtgaccccaaaccctaaatag

SEQ ID NO: 28295 - DNA, 3570 bp, synthetic construct
  misc_feature 1..3570: note = Description of Artificial Sequence: Synthetic coding sequence
  source 1..3570: mol_type = other DNA
atgtcggcgggaggtagcgcaaggaagagtactggcagaagttcttattattatcggctactgaggcggccaagactgcagcgccagcgcagtaggtctagatcacggaccaggcctgcacgtgagtctccacaagagcgtccaggatcacgtaggagtttgcctggatccctctccgagaagtcccctagcatggagccttctgcggctacgccattccgggtgaccgggtttctgagccgtcgcctgaaaggctctatcaaaaggaccaagtcgcagcctaagctcgatagaaaccattcattcaggcatattcttccagggtttcgctctgctgccgctgccgctgcggataatgaacgatcccacttgatgcctaggctcaaagagagccggagccacgaatctttactgagtccctcttctgcagtcgaggctctggacctgtcaatggaggaggaagtggttataaagccagttcactcgagcatcctcggacaggattactgcttcgaagtcactacctcaagcggctccaagtgcttttcatgccgcagtgcggctgagcgagacaagtggatggagaacctgaggagggcagtacaccccaacaaagataattcccggagggtggaacacatcttgaaactgtgggtgattgaagctaaggatttgcccgcaaagaaaaaatacctgtgcgagctctgcctcgacgatgtgctttacgccagaaccactggtaagctcaagaccgataatgttttttggggcgaacacttcgaattccacaacctgccccctttacggaccgttacagttcacctgtatagggagacagataagaaaaagaaaaaggaacgcaattcctacttgggactggtcagcctgcctgccgcaagcgtcgccggtaggcagttcgttgagaagtggtatccggtcgtcactcctaacccaaaggggggtaaaggcccaggtcctatgatccggatcaaagccaggtaccagaccattaccattttgcccatggaaatgtataaagaatttgccgaacatatcacaaaccattacctgggcctgtgtgccgctctggaaccaatcctcagcgccaaaactaaggaagaaatggcttccgctctggtgcacattctgcagtcaaccggaaaggtgaaggacttcctgactgacctcatgatgtcagaggtggatcgctgtggtgataacgagcacctaatcttccgcgagaacacactcgctactaaagccatcgaggaatatctgaaactggtagggcagaagtatcttcaggatgcattaggggagtttattaaggctctctatgaatctgacgagaactgtgaggtggatcctagcaaatgtagtgctgcagatttgccagagcaccagggcaatctaaagatgtgctgtgagctcgcattctgcaaaataatcaattcttattgcgtgttcccacgggagctaaaagaggtctttgcgagttggagacaggaatgttcatcccgcggacgcccagatatcagcgaacgcctgatcagcgcatcgttgtttttaaggtttctatgcccagcaatcatgagtccatctctgttcaacctcttacaggagtatccagacgatcggacagccagaacactcaccctgatcgcaaaggttacccagaatttagccaatttcgccaagttcggcagtaaagaagagtacatgtctttcatgaaccagtttcttgaacatgagtggaccaacatgcagagattcctgctggagatctcaaaccccgagacgctgtccaacaccgccggatttgagggctatatagatctgggacgggaactgagtagcctacactcccttctgtgggaagctgtctcccagctcgagcagagcattgtttcgaaactcggacccctgcctcgaatcctccgggacgtgcacaccgcactttcaaccccaggaagtggccagctgcccggtactaacgatctggctagcacacctggatctgggagttccagcatctctgctggtttgcaaaaaatggttattgaaaacgatctaagcgggctgattgattttacacgactgcccagtcctacaccagagaataaggacctattcttcgttacgaggtcttccggtgtgcagccctcgccagctaggtcatctagctactcagaagctaatgagcctgatctgcagatggctaatggcggtaagtccctgagcatggtcgacttgcaggatgctaggaccctggacggtgaggccggaagtcctgcgggacccgatgttcttcctaccgatgggcaggcggcagcggcacaattggtggcagggtggcccgcaagggctacccccgtgaatctggctggattggccacagtgcgcagagccggacagaccccaacgacccccggtaccagtgaaggggcaccagggaggcctcagctgcttgcccctctgtctttccagaatcccgtctaccaaatggccgctgggctccccctgtcccctcgcggtctgggtgactcgggctcagagggacactcctccctcagctctcacagtaatagcgaagagctcgccgctgcagccaaactgggctcattttcaacagccgctgaagagctggctcgcagacctggggagcttgccagacggcagatgtcactcacagagaaaggcggtcaacctaccgtgcccaggcagaattcagctgggcctcagagacgcattgatcagcctccaccacccccaccccctcccccaccagccccaagagggcgaactccaccaaacctgctgtcaacactccagtatcccagaccctccagcggaacgttagctagtgcctcccccgattgggtcggaccctccaccagattacggcaacagtccagctcaagcaagggggacagtcccgaactcaaacctagggccgtgcacaagcaggggccaagccccgtaagccccaatgctctcgatagaacagctgcatggttgctgaccatgaacgcgcaactgctcgaggacgagggactggggcctgatcctccccatcgagatagactacgatctaaagacgagctgagtcaggccgagaaggacctggccgtcctgcaggataaactgcggattagcacaaagaagctggaagagtatgagaccctcttcaagtgccaggaggagacgacacagaaactggttctcgagtaccaagcgcgactggaagagggcgaggagcgcctgcggagacaacaggaggacaaggacatacagatgaaagggattatctccagactgatgtcagttgaggaggagctgaaaaaggatcatgcagaaatgcaggcagcggtcgatagcaagcagaaaattattgacgcgcaggagaagaggattgccagcttagatgcagctaatgcgcgactgatgagcgccctgacccaactcaaagaaagatactccatgcaggccaggaatgggatctccccgaccaacccaaccaagcttcagatcactgaaaatggggaattccgcaactcatccaactgctag

SEQ ID NO: 28296 - DNA, 690 bp, synthetic construct
  misc_feature 1..690: note = Description of Artificial Sequence: Synthetic coding sequence
  source 1..690: mol_type = other DNA
atgccacgactgaaggagtctaggtcgcacgagagcctcctttcaccaagttctgccgttgaggctctggatctgagcatggaagaggaagtcgtgatcaagcctgtccattccagcatactagggcaggattactgtttcgaggtaactacaagctccgggagcaagtgtttttcctgcaggtcagcagcagagcgggacaagtggatggagaacctgcggagagcagtgcaccctaataaggacaatagccgaagggtcgagcatattctgaaactgtgggtgatagaggcgaaggatctgcccgcaaagaaaaaatacctgtgcgagctgtgcctggacgacgtgctatatgctcggactaccggtaagctgaagaccgacaacgtgttctggggcgaacattttgaattccacaatctaccaccactgcgcactgtgacagttcacctctaccgcgaaacagacaagaaaaaaaaaaaggaaaggaactcttatttggggctggtgtcactgcccgctgcctctgtggcgggacggcagtttgtcgagaagtggtatcctgtggtcacccctaaccctaagggaggaaaggggccaggaccgatgatcaggatcaaggcacgctatcaaactatcacaatcctacccatggagatgtacaaggagttcgccgagcacattacttag

SEQ ID NO: 28297 - DNA, 3423 bp, synthetic construct
  misc_feature 1..3423: note = Description of Artificial Sequence: Synthetic coding sequence
  source 1..3423: mol_type = other DNA
atgagctacaattatgtcgttactgcccaaaagcctaccgcagtcaacggatgcgtcaccgggcatttcacatccgctgaagatttaaacctactcattgccaaaaacacgcggctggagatttacgttgttactgctgaaggtctgcggcctgtgaaggaagtgggaatgtacggaaaaatcgcggtgatggaacttttccgcccaaagggcgagtccaaagatcttctttttatcctgaccgcaaaatacaacgcatgcattctcgaatacaaacagagtggagagagcatcgatatcattacacgtgctcatggaaacgtgcaggacaggataggtcgtccatctgagaccggaattatcgggattatagatcctgagtgtcggatgatcgggttacggttgtacgatgggctcttcaaggtaatcccactggaccgagataataaggagctgaaagcatttaatatccggctggaagagctgcacgtaatcgacgtgaagttcctttatggttgccaggctcccacaatttgttttgtatatcaagatccccaggggaggcatgtcaagacctacgaagtttctctgcgcgagaaggagttcaataaaggaccttggaagcaggagaacgttgaggcagaagctagtatggtgatcgccgtgcctgagccatttgggggtgccattattattggtcaggaatcaatcacgtatcacaacggggataagtacttagccatagcgccacccatcatcaaacagtccaccatcgtctgtcacaatagggtggatcccaacggttcacggtatttactgggagatatggaggggcgtctctttatgctgctgctggagaaagaggagcagatggacggcaccgtcactttgaaggacctccgagtcgaactcctgggagagacctctattgccgagtgcctcacgtacttagataacggggtcgtgttcgtcggctctagactaggagactcacagctggttaaactgaatgttgacagtaacgaacagggcagctacgtcgttgcaatggagacgtttactaatctaggcccaatagtggatatgtgtgtggtggatttagagcgacaggggcagggccagctggtgacctgtagcggtgcttttaaggaaggttctctaagaataattagaaatggtattggcatccatgagcacgctagcattgatctgcccggaatcaagggactgtggccacttagaagtgatcctaatcgggagaccgatgacacgttggtactctcctttgtgggacagacacgggtcctcatgctgaacggcgaggaagtggaggaaacagagctcatgggcttcgtggacgatcaacagacgttcttctgcggtaatgtcgcacatcagcagctcattcaaataaccagcgcttccgtgcgtctggtgtcacaggaacccaaggccctggtcagcgagtggaaggagccccaggcgaagaatatctcagtcgctagctgcaattcaagccaagtggtggttgccgtgggcagagccttgtattacctgcaaatccatcctcaggagctgcgtcagatttcacatacagagatggagcacgaggttgcctgtctggatatcactccccttggcgactccaacggcttaagccctctctgtgccattggcctctggaccgatatctccgcaagaatcctcaaattgcccagctttgagctcctccacaaggagatgctcggaggagaaattatacctcgttcaattttaatgacaaccttcgaatcatctcactacctactgtgtgctctgggcgacggggctcttttttacttcggcttgaatattgaaacgggactgttatccgataggaaaaaggtcacgctgggaactcagccaaccgttctgcgaacttttcgaagtttaagcacgaccaacgtcttcgcgtgcagcgatcggccaaccgtcatttactcgtcgaaccacaagttagttttttccaatgtcaacctcaaagaggtaaactacatgtgccctcttaatagtgatggataccccgacagtctggccctggccaataattcaactctgaccataggaactatcgatgaaatacaaaagctgcacattcgtacagtgcccttgtatgagtcgcccaggaaaatatgctatcaggaggtgagtcagtgttttggggtgctgagctctagaatcgaggtgcaggataccagtggtggaaccactgctctgcggccaagtgcgagcacacaggccctgtcttcctcagtttcatccagcaaattatttagctcttcaactgcaccacatgagacatcattcggtgaggaggttgaggtgcataatctgctgattatcgatcagcacaccttcgaggtccttcacgctcatcagtttttgcagaacgaatacgctctgagcctggtatcttgtaaactcggaaaggacccgaacacatactttattgtggggaccgccatggtttatccagaggaggcggagcccaagcaaggtaggatagttgttttccagtacagcgatggcaagttacagactgtggccgagaaggaggtgaaaggagccgtgtactcaatggtagaattcaacggaaaattgctggcttccatcaatagtactgtccgcctctacgagtggaccaccgaaaaagagctccgtactgagtgcaaccactacaataacattatggcgctgtacctgaagacgaagggggatttcatcttggtgggcgatttaatgcgtagtgtgcttctgctggcatacaaacccatggaaggcaatttcgaggagatcgctcgagatttcaaccctaattggatgtctgcagttgagattttagatgatgacaacttcctcggtgcagaaaacgcttttaatctattcgtctgtcagaaagactctgcagcaacgaccgatgaagagcgacagcatctccaggaggtcgggctcttccatctgggagagtttgtgaatgtcttctgtcatgggtcactggtgatgcagaacttgggtgaaacctctacccccactcaggggagcgtcctattcggcacggtgaacgggatgatagggttagtgacatctttatccgaaagttggtataatcttcttttggatatgcaaaatcggcttaataaagtgatcaagtccgtcggtaagatcgagcactcattttggaggtcttttcacacagagagaaaaaccgaaccagccactggcttcattgacggcgacttaattgaatctttcctggatatttcccgcccaaagatgcaagaagtcgtggccaatcttcagtacgatgatgggagcggaatgaagcgcgaagccactgccgacgatctgattaaggtcgtggaggaattaactcgcatccattag

SEQ ID NO: 28298 - DNA, 1356 bp, synthetic construct
  misc_feature 1..1356: note = Description of Artificial Sequence: Synthetic coding sequence
  source 1..1356: mol_type = other DNA
atgagctacaattacgtggtgaccgctcagaagccaaccgcagttaacggctgtgtgaccgggcacttcacatcagccgaagatctgaatctgttgatcgcgaaaaatacaaggctcgagatctacgttgtaacagctgagggtttacgccctgtgaaggaggtaggaatgtacgggaaaattgccgtcatggaactgttccggccaaaggccttatcttcttcagtgagtagttccaagttgttcagtagctctacggcccctcacgaaacatccttcggagaagaagtggaggtgcataacttgctcattattgatcagcataccttcgaggtactgcacgcccaccagtttctgcagaatgagtacgcgctctcactggtaagctgtaagctggggaaagatccaaatacttactttatagtcggcacggcaatggtgtaccctgaagaggctgagcctaagcagggacgaattgtcgtatttcaatacagtgacggtaagctccaaactgtagcagaaaaggaggtaaagggagcggtctacagtatggtagagttcaacggaaagttgttggcctcaatcaattctactgtacgcctgtacgagtggaccaccgagaaggagctccgcacggaatgtaatcattacaataacataatggccctgtacctcaagaccaaaggagacttcatacttgtgggagatctcatgcgcagtgtcctgctccttgcgtacaagcccatggaggggaatttcgaagagattgctagagacttcaaccccaattggatgagcgctgtagaaattctcgacgacgataacttcctgggtgctgagaacgcctttaacctatttgtgtgccagaaggattctgccgcaactaccgacgaggagcgacaacaccttcaagaagtggggctgttccatttaggtgagtttgtgaatgtcttttgccacggctctctggttatgcaaaatctgggggagacctccacacctactcaaggatccgtgctcttcggaaccgtgaacggcatgattggcctcgtcacgtccctgtcagagtcgtggtacaatttgctcctggatatgcagaatagactgaacaaggtcattaagagcgtcggtaaaatcgagcacagcttctggcgttcctttcacaccgaacggaagactgaaccagctacgggattcatcgacggcgacctgattgagtccttcctggatattagccgcccaaagatgcaggaggtcgtcgctaacctccagtacgacgacggctcgggtatgaaacgggaggctactgcagatgacctcattaaggtggtggaggagctgacgagaattcattag

SEQ ID NO: 28299 - DNA, 441 bp, synthetic construct
  misc_feature 1..441: note = Description of Artificial Sequence: Synthetic coding sequence
  source 1..441: mol_type = other DNA
atgtcgtacaactatgttgttacggcccaaaagcctactgccgtgaacgggtgtgtgaccggccacttcacgagcgccgaggatctgaatctgttgattgcgaagaatacgcgcctcgagatttatgtggtcacagctgaagggctgcggcctgtaaaagaagtgggcatgtacggtaagatcgcagtcatggagctgtttaggccaaagggagagtcgaaagaccttctgttcattcttacagccaagtacaatgcctgtatcctggagtacaagcagagtggcgaaagcattgatattattacgagggcgcacggcaacgtccaggaccggattggacgccctagtgaaacaggcatcattggaataatagaccctgagtgccggatgatcgggttgagactgtatgacggactcttcaaggtgatccctcttgattag

SEQ ID NO: 28300 - DNA, 330 bp, synthetic construct
  misc_feature 1..330: note = Description of Artificial Sequence: Synthetic coding sequence
  source 1..330: mol_type = other DNA
atgagttacaattatgtggtgacagctcagaagcccacagccgtgaatgggtgtgtaaccgggcactttacctcggccgaggaccttaacctcttgattgcgaaaaacacgagactggaaatatacgttgtgaccgccgaagggctgcgccctgtgaaagaggttggcatgtatggtaagatagcagtcatggagctctttcgccctaagggcgagtctaaagatttattgttcatcctgacggcgaaatacaatgcctgtattctggaatacaaacagtccggtgagagcattgatatcatcactagagcccatgggaacgtacagtag

SEQ ID NO: 28301 - DNA, 1284 bp, synthetic construct
  misc_feature 1..1284: note = Description of Artificial Sequence: Synthetic coding sequence
  source 1..1284: mol_type = other DNA
atggccccaaaaaagaggcccgagactcaaaagaccagtgagattgtgctcagaccaagaaacaagagatccaggtccccactcgagcttgaacccgaggcgaagaagctgtgcgcaaaggggtctggcccttccagaaggtgtgattcagactgtttatgggtgggactggccggtcctcaaatcttacctccttgccgctctattgttaggacgctgcaccagcacaaactcgggagggcgtcatggccttctgtgcagcagggcctgcagcagtcttttcttcacaccttggactcgtataggatcctccagaaagccgcaccctttgacagaagagcgacctctctcgcttggcatcccacccatccaagcactgttgcggttggcagtaagggtggggatataatgctctggaacttcggaattaaagacaagcccactttcatcaaaggcatcggggctggcggaagcataaccggacttaaatttaatcctctgaacaccaaccaattttacgcctcctccatggaaggtaccacgagactgcaggactttaaaggcaatatcctgcgggtattcgcatcttcagatacaattaatatctggttctgttctctggacgtatcagcctcttctcgcatggtcgttaccggtgataacgtaggaaatgtgatcttgctcaacatggatggcaaagaactgtggaatctcagaatgcacaagaagaaggtgactcatgtggcattaaatccctgctgtgattggttcctggccactgcatccgtggatcagacagtgaagatttgggatctcagacaggttagagggaaggcctcattcctgtacagtctgccacaccggcatcccgtgaacgccgcatgctttagcccagacggagctcgcttactcacaacagaccagaagagtgagatccgggtgtattcagccagtcagtgggactgtcccctgggcttaatcccccatccccaccgccattttcaacacctgactcccattaaagctgcttggcatccacggtacaatttgatcgtggtggggaggtaccctgacccaaactttaagtcatgcacaccatacgaattacgtaccatcgacgtgttcgacggcaacagtggtaagatgatgtgccagctatacgatccagagtcgtcgggaattagtagcctaaacgagttcaaccccatgggcgatacactagcgagtgcaatggggtatcacattctcatttggtcccaggaggaggcgagaaccagaaagtag

SEQ ID NO: 28302 - DNA, 717 bp, synthetic construct
  misc_feature 1..717: note = Description of Artificial Sequence: Synthetic coding sequence
  source 1..717: mol_type = other DNA
atggcaccaaaaaagagacctgaaactcagaaaacttcagagattgttctgagacctcgaaacaaacggtccagaagcccactcgaactcgaacctgaggccaagaagttatgtgcaaaagggtccgggccttccagacggtgtgattcggattgtctttgggttggccttgctgggcctcaaatccttccgccatgtaggtccatcgttcgaaccctgcaccaacataaactggggagggcttcgtggcccagcgtgcagcaggggctgcagcagagtttcttgcacaccctggactcctacaggatcctacagaaggctgctcctttcgatcggagggcaaccagtttagcgtggcaccctactcacccttctacagttgccgtcggaagcaagggaggtgacataatgctctggaactttggcattaaggacaaacccacatttattaaaggcgctgcatggcacccgaggtacaatctgattgtcgtgggtagatatcccgaccccaactttaaatcatgcactccctatgaacttcgcaccattgatgtctttgacggcaatagtggcaagatgatgtgccagctctatgaccctgagagtagcggcatctccagtctcaacgaattcaacccgatgggagataccctggcaagcgcaatggggtatcacatactcatctggagtcaggaggaagccaggactcgcaagtag

SEQ ID NO: 28303 - DNA, 735 bp, synthetic construct
  misc_feature 1..735: note = Description of Artificial Sequence: Synthetic coding sequence
  source 1..735: mol_type = other DNA
atggccccaaaaaagagacccgagacacagaaaaccagtgagatcgttcttcggcctcgaaataagcggagtcgatcccccctggagttggagcccgaagccaaaaaactgtgtgctaagggaagcggaccctcacgtcggtgcgactctgactgcttgtgggttggcttagcaggccctcagatactgcccccttgccggtcaattgtgcgcacactgcatcaacacaaactgggccgagcttcttggccctctgttcagcagggcctacaacaatcatttctccatactcttgactcctatagaatcctgcagaaggctgcaccattcgacagacgcgcaacatcactggcctggcaccctactcacccttctactgtcgcagtgggttccaagggaggagatatcatgctgtggaactttggcatcaaggacaagcccacattcattaaagggataggggcaggcggaagcataaccggactgaaatttaaccccctgaataccaaccaattttacgctagttccatggagggcacaacgcgcctccaagattttaaggggaatatcctcagagtttttgcctcttccgatacaatcaacatctggttttgcagtctagacgttagtgcctcttcaaggatggtcgtgactggcgataatgtgggcaatgtaattctgttaaacatggacggcaaagagttggtgagcgtccccatggaaccagggtcttag

SEQ ID NO: 28304 - DNA, 1092 bp, synthetic construct
  misc_feature 1..1092: note = Description of Artificial Sequence: Synthetic coding sequence
  source 1..1092: mol_type = other DNA
atggctcccaaaaaaaggccagaaactcaaaagaccagtgaaatcgtgctgcgccctaggaataagcgatctcgctcacctctcgaactggaacccgaggcaaaaaagctttgtgcaaaaggtagcggtccctcacgcagatgcgactctgactgcctgtgggttgggctcgctggacctcagattctgcccccttgtaggagtatagtgcggacgttgcaccagcataaactcggacgggcttcctggcctagcgtacagcagatcggagccggtggatctatcacaggtctcaaatttaatcccctgaacactaatcagttttatgcaagcagcatggaaggaaccactaggctgcaggactttaaaggaaacattctccgcgtgttcgcctcatctgataccattaacatctggttctgttcactagatgtttcggccagttccagaatggtggtgactggtgacaatgtgggcaacgtaatcttgttgaacatggatgggaaggaactttggaatctaaggatgcacaagaagaaggtgacccacgtggctcttaacccctgctgtgattggtttctggctactgcttccgtagaccaaacagtcaaaatctgggaccttcgtcaagtgagaggcaaggctagcttcctgtatagtttaccccataggcacccagtgaacgccgcatgttttagcccagacggggctcggcttttgaccactgaccagaagtcggagatccgagtgtattccgcgtctcagtgggattgcccactgggcctgatcccccacccacaccggcactttcaacatttgaccccgattaaagcagcatggcatcctcggtacaacctcatcgttgtcggacgatacccagatcccaacttcaagagctgcaccccttatgagctgcggaccatcgatgtgttcgacgggaatagcggaaaaatgatgtgccagctgtatgaccccgaatcctcaggaatatcctcattaaatgaatttaatccaatgggagacacacttgctagcgcgatgggctatcacatcttgatttggagtcaggaagaagccaggacccgcaagtag

SEQ ID NO: 28305 - DNA, 1119 bp, synthetic construct
  misc_feature 1..1119: note = Description of Artificial Sequence: Synthetic coding sequence
  source 1..1119: mol_type = other DNA
atgtccgaggccggagaggcaaccaccacaaccactacgaccctgccccaagcaccaaccgaggcggcagccgcagcacctcaggaccctgctcccaagagtcccgtagggtctggagctccacaggccgctgctcctgcgccagccgcacacgtcgctggcaacccaggaggcgacgccgctccagccgcaactggcaccgccgcagccgcatccctcgccacagcagctggatcagaggacgctgaaaagaaggtcctcgcaactaaggtcctcggaaccgtgaaatggttcaacgttagaaatggctatggattcatcaataggaatgacaccaaagaggatgttttcgttcaccagacggccataaagaaaaacaacccccgaaagtatctgcgctccgtgggggatggggagactgtagagtttgacgtggtggagggagagaagggagcggaggcagcaaatgtaactgggccagatggtgtgcccgtcgaaggcagccgttatgcagccgacaggcgaaggtaccgccgtggctactatggccgaagacgaggcccacccagaaactacgccggtgaggaggaggaagagggctctggatcaagcgagggcttcgacccacctgctacagatcggcagttcagcggcgctcgaaatcagctgcgacgtccacagtatcgccctcaatatcgtcagcgtcggtttcccccttatcacgttggacagacattcgatagacgctcacgggtgctgccccaccccaaccgaattcaggccggtgaaatcggcgagatgaaggacggggttcccgagggagcgcaactccagggacctgtgcatagaaacccaacttatcgaccgagatacaggtctcgcggtcctccgaggccaaggcctgcgccagctgtcggggaagcggaagacaaagagaatcagcaggctacttccgggccaaaccaaccgtctgttagaagaggctatcggaggccctacaactacagacgtcgcccaagaccccctaacgcaccttcgcaggacgggaaggaggcgaaggccggagaggcaccgactgaaaacccggctcccccaacacagcagtcttcagcagaatag

SEQ ID NO: 28306 - DNA, 867 bp, synthetic construct
  misc_feature 1..867: note = Description of Artificial Sequence: Synthetic coding sequence
  source 1..867: mol_type = other DNA
atggcaaacgaaacccagaaggtaggagccatccacttcccttttccgttcacaccttattcaatccaggaagattttatggccgaactgtacagggtcttagaggccggtaagataggtatttttgagtcacccacaggcaccggtaaatcactctctctgatctgtggtgccctctcgtggctgagggatttcgagcagaagaaaagggaggaggaagcacgcctactggaaactggtacagggccactgcatgacgagaaagacgagtctctgtgcctgtcctcgagctgcgagggggctgcaggcactcccaggcccgctggtgaacctgcgtgggttacacaatttgtacaaaagaaggaggaacgggaccttgtggacagactgaaagccgaacaagctaggagaaaacaaagagaagaacggctccaacagctccaacaccgggtgcagttaaagtatgctgctaaacggctgagacaagaggaggaggagcgcgaaaatctgctgcgtctctcccgcgaaatgctggaaactggacccgaagctgaaagactggagcagcttgaatccggtgaggaggaactggtcctcgccgagtatgaaagcgatgaggaaaaaaaagttgcttctcgcgcaccctctgacgccacatcaagcaggcacccccctgatgcaagcttccccgcagccctgaactttttacagcggactagaccaagcagcgtgctgtcggaagatttactgatgcagcgtgctgtcgccaaacaccccgctttgttgccgtggcagatgagttcctctccactccggcctggcagcgagtggatgcgcatgcgcatgacttggcggaagaacacatag

SEQ ID NO: 28307 - DNA, 2571 bp, synthetic construct
  misc_feature 1..2571: note = Description of Artificial Sequence: Synthetic coding sequence
  source 1..2571: mol_type = other DNA
atggccaacgaaacccagaaagtaggcgcaatccatttcccctttcccttcacgccttatagcatacaagaggattttatggctgaactttacagggtgttggaagccggtaaaatcggaatctttgagagtccaaccggcaccggcaaaagcttaagtctgatttgcggcgcactgagctggctcagggacttcgagcaaaagaaaagggaagaagaggctagattgctggaaactggcacaggccctctccacgacgaaaaagatgaaagtctgtgcttgagttcttcttgcgagggggctgctgggacaccccgacccgcaggcgagcccgcttgggtcacccagtttgtccagaagaaggaggaacgagacctggtggacagactaaaggccgagcaagcacgcagaaagcagagagaagagaggctccaacagctgcagcaccgcgttcaactcaaatacgcagccaaaaggctgcggcaagaggaggaagagcgcgaaaacctccttcgattgagcagagagatgctggaaacgggtcctgaagccgagagactggaacagctggaatcaggggaggaagaattagttttggctgagtatgaatcagatgaagagaagaaggtggctagccgggtggacgaagacgaagacgatctggaggaggaacatattaccaaaatctattactgctctagaacccacagccaactcgcccagttcgtgcacgaagtgaagaagtctccttttggtaaggacgtccgtttagtatctctcgggtcacgtcagaatctctgcgtcaacgaggatgttaagtccttggggtctgtgcagcttatcaatgataggtgcgttgacatgcagcgcagcagacatgaaaagaaaaaaggcgctgaagaggaaaaacctaagcggagaagacaggaaaaacaggcggcttgtcccttctacaatcacgaacaaatggggctcctcagagacgaggccctggccgaagtgaaagacatggagcaactccttgccctggggaaggaagcacgggcatgcccctactacggatctagactggctattcccgcagcgcaactcgtggtattgccgtatcaaatgctcctgcacgccgcaacccgccaagcagccggaatcaggctccaggaccaagtggttattatcgatgaagcacataatctgattgatacaatcactgggatgcatagtgtagaagtgagtggatctcaactgtgtcaggcccactcccaactcttgcagtacgtagaaagatatggaaaacgcctgaaggcaaaaaatctcatgtatcttaagcagatcttgtacttgctcgaaaagttcgtcgccgttctgggcggaaacattaaacagaatccgaacacacagagccttagtcagacaggcactgaactaaaaacaatcaatgactttctgttccagagccagattgacaacattaatctgtttaaagttcagagatattgtgaaaagtctatgatttctagaaaactctttgggttcacagagagatatggggcagtctttagctcccgggaacagcccaagcttgcgggatttcagcaattcttacagtcactccagccccgtacaacggaggcactcgccgctcccgctgatgaaagccaggctagcactttgcggccagcttcccccctgatgcatattcagggctttctagccgctttgaccaccgccaatcaagatgggcgtgtgatcctgtcacgtcaaggcagcctcagccagagcacccttaaattcttattattgaaccccgctgttcacttcgctcaggtggtgaaagagtgccgggcagttgtgatcgccggtgggactatgcagccagtaagcgacttcaggcaacagctgcttgcctgtgcgggagtcgaggccgagcgggttgtagagttcagctgcgggcacgttataccacctgacaatattctgcctctggtaatctgttccggcatttcaaatcagcctctggaattcacattccaaaagagagagctgccccagatgatttttcaggaaccaaagtcggcccaccaggtcgaacaggtgttgctcgcatatagccgatgcatccaagcatgcggtcaggagcggggacaggtgaccggggcacttttgctgtcggtggtgggcggtaagatgtccgagggtataaatttcagcgataatttgggaagatgcgtcgtgatggtcgggatgcccttcccaaatatcaggagtgcagagcttcaagagaagatggcatacctggatcagaccctgcccagggcccctggacaggcgcctcccggtaaggctctcgtcgagaacctctgcatgaaagctgtgaatcagtctattgggagagccattcgccatcaaaaggattttgcctccgtggtgctgctcgatcagaggtatgcccgacctccagtccttgccaagctgccggcatggattagggcaagggtcgaggtgaaggctactttcggaccagccatcgccgcagttcaaaagttccatagagagaagtccgcgtcttcttag

SEQ ID NO: 28308 - DNA, 1671 bp, synthetic construct
  misc_feature 1..1671: note = Description of Artificial Sequence: Synthetic coding sequence
  source 1..1671: mol_type = other DNA
gaggaagaacctctgtggcagggctgcagcgccggactcccatggttaccagcagagaaaaagaaaggggctgaggaggagaaaccaaaaagaagaagacaggagaaacaggctgcctgccctttctacaaccacgagcagatgggtttattgcgagatgaagctctggctgaagtaaaggacatggagcaactcctggcgctgggaaaagaggcacgggcttgcccatactatgggagccggctagcaattcccgctgcgcagttggtcgtattaccataccagatgctcctgcacgccgcaactcggcaggcagctggaattagattacaagaccaagtcgtgatcattgacgaggcccataacctgatcgatactatcacaggtatgcatagcgtcgaggtgtctgggtcccagctatgccaggcacactcccagctcctccagtacgtagagaggtacggcaaacggctgaaggccaagaatctcatgtatctcaagcagatcctgtatctcctggagaagttcgtggccgtgctcgggggtaacatcaaacaaaatcctaatacccagtccctttcccaaacagggaccgagttaaagaccattaatgatttcttattccagtcacagattgacaacataaatctgttcaaagtccagcgttactgtgagaaaagtatgatctctaggaaactcttcggtttcaccgagcggtacggagccgtcttctcctctcgtgagcagccgaaactcgccggattccaacagttccttcaatctcttcaacctcgaactacagaggcattggctgctccagcagatgagagtcaggcatccacgctgcgccctgcatcccccctgatgcacattcaggggtttctggctgctctcaccacggccaaccaggatggacgtgtgattctgtctaggcaggggtccctcagccagtcaacacttaaatttctgttactgaacccagcagtgcattttgcacaggtcgtcaaggagtgtcgagccgtggtgatcgccggaggaacaatgcagccagtgagtgacttccgccaacaacttttggcctgcgcgggtgtggaggctgaaagggtggttgaattcagctgtggacatgttatacctccagataatattctcccactagtgatttgtagtgggatcagcaaccagcccctggagtttacatttcaaaagagagaattgccccaaatgatggacgaggtcggtcggattctgtgcaatctttgcggggtggttccaggaggcgtggtgtgcttttttccttcttatgagtacttgagacaggtgcacgcccactgggaaaaaggaggcctgctgggccgactagccgctcgcaaaaaaatcttccaggagcccaaatcagcccatcaagtggagcaggttttgctcgcctactcccgatgtatacaggcctgcgggcaggaacgagggcaggtgactggagctctcctcttgagcgttgtaggaggtaaaatgagcgaaggcatcaacttttcagataacctgggtcgatgtgtcgtcatggtcggcatgcccttccctaacatcagatccgctgagttacaggagaaaatggcttatcttgaccagaccctcgctggaccctccggcacaaggaggattctgcccgcttag

SEQ ID NO: 28309 - DNA, 2913 bp, synthetic construct
  misc_feature 1..2913: note = Description of Artificial Sequence: Synthetic coding sequence
  source 1..2913: mol_type = other DNA
atggccaacgagacccagaaggttggggctattcactttccttttccctttacaccctattccatccaggaggattttatggccgagctgtatagagtactcgaggctggcaagatcggtatattcgagagccctaccggcaccggaaaatcactgtctctcatctgtggcgcactcagttggctcagagacttcgagcagaagaagagggaagaggaggccagattgctcgagacaggaactggcccactgcacgacgagaaggatgagtcgctttgcctgagctcatcgtgtgagggtgccgctggcacgccccgacccgctggtgagcctgcatgggtgacgcagttcgttcaaaaaaaggaagagcgagacttggtcgatagactgaaggctgagcaggcaaggcgtaagcagagagaggagagactgcaacagctgcagcacagagtccagctgaaatatgcggctaaaagacttagacaggaggaggaggaacgagagaatcttttgcggctgtctcgtgagatgctggagaccggccctgaggcagagcgcctggagcaattagagtccggcgaggaagagctggtcctcgcggagtacgagagcgacgaggaaaaaaaggtggcaagtagagtggacgaggatgaagacgacttggaagaagaacacattacaaagatatactactgctccaggacacactcccagctggcccaattcgtgcatgaggtgaagaaaagtccttttggaaaggacgtaaggctggtaagtcttggcagccggcagaacctctgcgttaatgaggacgtcaaatctctcggatctgtccagcttataaacgataggtgcgtggacatgcagcgttctcggcacgaaaaaaaaaagggagccgaggaggagaagcctaaacgcagacgacaggaaaagcaggctgcctgccctttttacaatcatgagcaaatgggcttgctccgcgatgaggctctggctgaagtgaaggacatggagcagcttctcgcattgggcaaggaagctagagcttgtccatattacgggtcccgactggccatccccgctgcccaactagtggtactgccttaccagatgttactccatgcagccactaggcaggcggcaggcattcgtctgcaagatcaggtggtgataatagatgaagcacataacctcatcgacaccataactggtatgcatagtgtggaagtttccggcagccaactgtgtcaggctcactcgcagcttctgcagtacgtcgaacgatatggtaagagactgaaagctaagaatctgatgtacctgaaacagatcctttacttacttgagaaatttgttgcagtgctgggtggaaacattaaacagaatccaaacacccaatccctcagtcaaacaggcactgagttgaagaccatcaatgatttcctgtttcagagccagatagataatatcaatctgtttaaggtgcaaaggtattgcgaaaaatccatgatcagccgcaagctcttcggcttcaccgagaggtacggcgctgtcttcagcagtcgagaacaacctaagcttgccggatttcagcagtttctccagtcactgcagcctagaacaaccgaggccctggctgcgccagccgacgagtctcaggcgagcacgctgcgccctgcgagccctctcatgcacattcaggggtttctcgctgccctcaccacggctaatcaagacgggagagtgatcctgtcacggcagggatccctgtctcagagcaccctgaagttcctgctgttgaacccagccgtccatttcgctcaggtggtgaaagagtgccgagcggttgtgatcgctggtgggacaatgcagccagtcagcgacttcaggcagcagctgctggcctgtgctggggtggaggccgaacgtgtagttgagttcagctgcggccatgtgatccctccagacaatatcctgcccttggtcatctgctcaggtatctcgaaccagcctctggaatttactttccagaaacgggaactgccacagatgatggacgaggtgggcagaatcctttgtaacctctgcggtgttgttccaggaggggtggtgtgtttttttccttcctacgaatatctccgacaagtgcacgcacactgggagaagggcggactgttgggcagactggcggcaaggaaaaagattttccaagaacccaaatcggcacaccaagtcgagcaggtgctgctggcctattccaggtgtatccaggcctgtggccaggagcgtggacaggtcaccggtgctctgctcctgagcgttgttgggggaaagatgtccgagggcatcaatttttctgacaacctaggtagatgtgttgtaatggtcgggatgccttttcccaacatacgctccgccgaattgcaggagaaaatggcatatttagaccagactctgtcacccagacctgggaccccacgagagggttccggaggtgaaccagtgcacgaggggaggcagccggtacaccgtcagggtcatcaggctcctgaagggttctgccagcggagtgcacccggtccagctatctgcccggcaccttgcccaggacaggctgccggattggacccttccccatgtggtgggcagtcatacctctggccacgacactgttgttgtgcggaggtctcccccggagaggttgggctttttctgatggggaatcacactacagcctggcgtagggctcttcccctgtcctgccccctagaaaccgtctttgtggtcggcgtggtctgtggtgaccctgttacaaaagtgaagccaagacggagggtgtggagtcctgaatgctgccaggaccccggaaccggggtgtccagccgtagacgcaagtgggggaacccagagtag

SEQ ID NO: 28310 - DNA, 675 bp, synthetic construct
  misc_feature 1..675: note = Description of Artificial Sequence: Synthetic coding sequence
  source 1..675: mol_type = other DNA
atggctgagttataccgtgtgctggaagctggaaagattggcatattcgaaagcccaacagggaccggcaagtcgctgagtctgatttgcggagccctatcgtggctccgtgatttcgaacaaaaaaaacgcgaggaggaagcacggcttctggagactgggactggaccgctccatgacgagaaagacgagagcctctgcctgtcatcttcgtgtgagggcgcagccggtacacctcgcccagccggagagcccgcatgggtaacccagttcgtgcagaagaaagaggaaagagatcttgttgatcggcttaaagccgagcaggctagacggaagcagagggaagagcgccttcagcaactgcagcatagggtgcagctgaaatatgcggctaagaggcttcgacaggaggaagaggaacgcgagaatctgctgcggctgtcccgcgagatgctggaaactggacctgaagccgagagactcgagcagttagaatccggcgaagaggaactagtgcttgcggaatacgaatcagatgaagagaaaaaagtggcctctcgagttgacgaagatgaggatgacctggaagaagaacatattacaaaaatctactactgttcaagaacccactcccagcttgcacagttcgtccatgaggttaaaaagtctccatag

SEQ ID NO: 28311 - DNA, 2721 bp, synthetic construct
  misc_feature 1..2721: note = Description of Artificial Sequence: Synthetic coding sequence
  source 1..2721: mol_type = other DNA
atggccaacgagacccaaaaggtgggggcaatccacttccctttcccatttactccttattctattcaagaagacttcatggctgagctgtaccgggtgctagaggccggaaaaatcggtatctttgaaagcccaacgggcacaggtaagagtctgtcccttatatgtggtgccctctcttggttaagggacttcgagcagaaaaagcgtgaagaagaagccagacttctggagacgggaactggtccccttcacgacgaaaaagatgagagtctgtgcctctccagttcctgtgagggcgcagctggcacacctaggccagctggagaaccagcctgggtgacccaatttgtgcagaagaaggaggagcgcgaccttgtagaccggctcaaagccgaacaggctcggcgtaagcagagagaggaaaggttgcagcagctgcagcaccgcgtgcagctcaagtacgcggcaaagaggctgcgacaggaagaagaggagagggagaacctcctccgcctgtcgagagaaatgctcgagaccggcccagaggctgaaaggttggaacagctggagagtggagaagaggagcttgtcctggctgaatatgaatctgatgaggaaaagaaagtggcatcaagagtcgatgaagatgaggatgatttggaggaagaacacattactaaaatttattattgttcccggacccatagccagttggcccagtttgtacacgaagtgaaaaagtcgccatttggaaaagatgtgcgcttggtcagcctcggctcgaggcagaacctctgcgtgaatgaagacgtgaagagtctgggtagtgtccagttaatcaacgatcggtgtgtcgacatgcagagatcacggcatgagaagaaaaaaggggctgaagaggagaagccaaagcgccgacggcaggagaaacaggcagcatgccctttctataatcacgaacagatgggactgctgagggacgaggcacttgctgaggtcaaagacatggaacagctactggcgttaggaaaggaagcaagagcttgcccttactatggttcccgcctggcaatacccgctgctcagctggttgttcttccataccagatgctccttcacgctgcaactcgccaagcagccggaatccgactgcaggatcaagttgttatcattgatgaggcccacaacctgatagatactatcactggaatgcactcagtggaagtgagtggctcacaactctgccaggcccacagccagctcctacaatatgtcgaaagatacggcaagcgactgaaggctaaaaacctgatgtatctgaagcagatactctacctcctggagaagttcgtagctgtcctaggtgggaacatcaagcagaatccaaacacacagtcactatcccaaaccgggacagaactgaagaccataaatgatttcctctttcagagccagatagataacataaacctgtttaaagtgcagcgttattgcgagaaatccatgatttctcgcaaattgtttggctttacggagagatacggcgctgtattcagtagtcgcgaacaacctaaactggcgggtttccaacagtttctgcagtcactgcagccgaggacgacagaggctctagcggctcctgcagacgagtcacaagctagcacactcaggccagcgtcacctctgatgcacatccaggggttcctcgccgctttaacgacggcgaatcaggacggcagggtcattttaagccgccagggctctcttagccagagcacacttaaatttctgctgctgaaccctgctgttcattttgctcaggttgtgaaggagtgccgtgcggttgtcatcgctggcggaaccatgcagcctgtatctgacttcaggcagcagctcctcgcttgcgctggggttgaagcagaacgcgtcgttgaattttcttgtggacatgtcatccctccggataacattctacctctcgtcatatgctcgggtatctcaaaccagccactagagtttaccttccaaaagcgtgaacttcctcagatgatggacgaagtggggaggattctctgcaacctgtgtggagttgtacccggaggagtggtatgcttcttccccagctacgaatatctgcgtcaggtacacgctcattgggaaaaggggggtctattgggtcggctggccgcacgcaaaaaaattttccaggagccaaaatccgcccaccaggtagaacaagtcctactggcttactctcgatgcatccaggcgtgtgggcaggagagaggacaagtgactggcgcactcttactatccgtggtgggcggaaaaatgtcggaaggtataaatttttccgataaccttggtaggtgtgttgtaatggtgggcatgcctttccccaacataaggagcgccgaattacaagaaaagatggcatacttggaccaaaccctaccccgagccccaggccaggccccaccaggaaaggccctggtggaaaacctgtgcatgaaagcagtgaaccagtccatcggaagggctattcgccatcagaaggatttcgcctccgtggtactgctggaccagcgctacgcgcgaccgcctgttctagctaaacttccagcctggatccgggcacgtgtggaggtgaaggccaccttcggtcctgccatcgccgctgtgcagaagtttcatagagagaaatccgcatccagctag

SEQ ID NO: 28312 - DNA, 2913 bp, synthetic construct
  misc_feature 1..2913: note = Description of Artificial Sequence: Synthetic coding sequence
  source 1..2913: mol_type = other DNA
atggccaatgagactcagaaagtgggcgcaatccacttcccgtttcccttcacaccctactcaattcaggaagatttcatggcagaattatatcgggttctcgaggctggcaaaattggaatattcgaatctcctaccgggactggcaagtcactgtctcttatctgtggggctctctcctggttaagggattttgagcagaagaaaagagaagaggaagctaggctgctggagaccggcactggtccgttgcacgacgagaaagacgaaagcttgtgcctgagctcttcctgtgagggcgcagccggaacacctagacctgcaggagagccagcgtgggtcacccagtttgtgcaaaagaaggaggaacgcgaccttgtggacaggcttaaggcagaacaggcacgaagaaagcagcgcgaggagcgcttgcagcagctccaacatcgggtgcagctgaaatacgcagcgaagcgcctgagacaggaggaggaagaaagagaaaatctcttgagattgagcagggagatgctagagacaggacctgaggctgaacgactggaacagctcgagtccggagaggaggaactggttctggctgaatacgaatctgatgaggagaagaaagtggcatcccgtgtcgacgaagatgaggatgacctagaggaagaacatattaccaagatttactactgcagtagaacacactcccaactcgctcagtttgtccacgaagtgaaaaaaagcccttttggaaaggacgtcaggctggtgtctctgggttcccgacagaacctttgcgtaaacgaggatgttaaatctctgggttccgtgcagctgattaatgacaggtgtgtggacatgcagcgatctcgacatgagaaaaagaagggggctgaggaggagaagccaaagcgtcgccgacaggagaagcaagccgcttgcccattctataatcatgagcagatgggtctcctgcgcgacgaagccctggctgaggtgaaagacatggaacagttgctcgccctgggcaaagaggcaagggcctgtccttattacggaagcagactggcaattcccgctgctcagctggtagttctcccctatcagatgctcctgcacgctgcaactcgccaagcagctggaatacgccttcaggatcaagttgtcatcatcgacgaggcccacaatctgatagacaccattacgggaatgcactccgtggaggtatcgggctcccaactgtgccaagctcactctcagttactgcagtatgtcgagaggtacggtaaacgcttgaaggccaaaaatctgatgtacctgaaacagattctgtatcttttggagaaatttgttgcagtgctgggcggaaatataaagcaaaaccctaatacccagtcactgagtcaaacaggcacggaactgaagacgattaacgacttcctgttccagtcccagatcgataatatcaatcttttcaaagtgcagagatactgcgagaaatcgatgattagccggaagctctttggcttcacagaaaggtatggagctgtcttctcatctcgagagcagcctaagctagcgggttttcagcagttccttcagagcctacagccgaggacgacggaggcattagccgcaccagcagatgaatcacaggcttcgacattacgaccagcttctcctctcatgcacattcagggcttcctggccgcattgacgacggcaaaccaggatggcagagttattctgagccgacagggcagtctgtctcagagcacacttaagttcctcctgttgaatccagccgtccacttcgctcaggttgtcaaggagtgtagggctgtggtcatcgccggtggtactatgcagcccgttagtgacttccggcagcagttgctggcctgcgcaggagtcgaggcagaacgcgtggtggagttctcgtgcggtcacgtgatcccccctgacaacatcctgccactggtgatctgttctggcatcagcaatcagcctttggagtttacattccagaagagggagctgcctcagatgatggacgaagttggcagaatactttgtaacctgtgtggcgtcgtgcctggcggagtggtgtgctttttcccctcttacgagtatttgcgccaggtccatgcccactgggagaaagggggtctcctcggccgtctcgcagcgcgaaagaagatcttccaggaacccaagtcagctcaccaggtggagcaagttttgctggcgtattctaggtgtattcaggcctgtggtcaggaacgcggacaggtcacaggggctttgctgctgagcgtcgttggtggaaagatgtccgaggggattaatttctcagacaacttgggcagatgcgtagtgatggttggcatgccttttccaaatatccgctcggctgaactccaagagaaaatggcctacctcgaccagaccctgagcccacgccctgggacccctcgcgaaggctcaggcggtgaacccgtacatgaaggccgacagccagtccatcggcagggccatcaagccccagaggggttttgtcagaggtctgcccctggacctgcaatctgtccggcaccatgcccgggtcaagccgctgggctggatcctagtccctgcggaggccagtcttacctgtggcctaggcattgctgttgcgcagaggtgtcaccaggagaggttggcctctttctgatgggcaatcacaccaccgcctggcgcagagctttgcctctcagttgtcctctcgaaactgttttcgtggtgggtgtggtctgcggggatccggtgactaaggtgaaacctaggcgcagggtttggtctcccgagtgctgccaggatcctgggactggggtgtcatcccggaggcgaaagtgggggaaccccgagtag

SEQ ID NO: 28313 - DNA, 4293 bp, synthetic construct
  misc_feature 1..4293: note = Description of Artificial Sequence: Synthetic coding sequence
  source 1..4293: mol_type = other DNA
atgaccgtctttagacaggagaatgtggacgattattacgacacgggggaggagctgggaagcgggcagttcgctgtggtcaagaaatgcagggaaaagagtactgggctgcagtatgccgcaaagttcattaagaaacgccgtactaagtcaagtcggagaggcgtatcaagggaagatatcgagagagaagtctccattcttaaagagattcagcaccccaatgttatcacacttcacgaagtttacgagaacaaaactgacgtgatcttgattctcgaacttgtagctggaggggaattgtttgattttctagcagaaaaggagtccctcactgaagaggaagctaccgaattcctgaagcagatcctgaacggagtttattatcttcactctctgcaaattgcacacttcgacctcaagcccgaaaacatcatgcttctggacagaaacgttcctaagcctcggattaaaattattgactttggcctcgcacataaaattgattttggaaacgaattcaagaatatttttggcacacccgagttcgtcgcacctgagattgttaattacgaacctctgggactggaggccgatatgtggtcaatcggtgtgatcacttatattctgctgtcaggcgcatcacccttcctgggcgataccaagcaggagacactcgctaatgtaagcgctgtgaattacgaatttgaggacgagtacttctcgaacacatctgctttggcaaaggattttattcgcaggttactggtgaaggatcccaagaagcggatgacgattcaagactccctgcagcatccatggattaagccgaaagatacgcaacaagcgctctctcgcaaagcatcagccgttaatatggagaagtttaagaagttcgccgctagaaaaaaatggaagcagagcgtacggcttatcagtctatgccagcgcctttccagaagttttctgagcaggagcaacatgtcagtggcacgatctgatgatacactggacgaggaagatagctttgttatgaaagctattatacatgccatcaatgacgacaacgtgcctggccttcaacatctactgggatcccttagtaattacgatgtcaaccagcccaataagcacggaaccccgccactgctcatcgccgcaggctgtggcaatattcagatcctgcagttgctgatcaaacggggttctagaattgacgttcaggacaaagggggttcaaatgctgtgtactgggctgccaggcatggtcacgtggacacacttaaatttttgtcggaaaacaagtgcccattggacgtgaaggataagagcggtgaaatggccttgcacgtcgcagcccgttacggccacgctgatgtggctcagctcttatgctcatttgggtcgaacccaaacatccaggacaaagaggaggagaccccattgcattgtgctgcctggcatggctactacagcgtcgctaaagcgctctgtgaagctgggtgtaacgttaacatcaaaaatagagagggcgaaactccactgctcacagcaagtgcaaggggataccacgatatcgtggaatgtctcgctgagcacggggctgatctcaacgcctgcgacaaagatgggcacatcgcgttacatctagccgtccgcaggtgtcaaatggaggtgatcaaaacactgctttcacagggatgcttcgtggattaccaggacaggcacggcaatacacctctgcacgttgcttgtaaagacggcaatatgccaatcgtagttgccttgtgcgaagccaactgtaatctcgacattagtaataagtacggacgcactccactccacctggcggcaaataacgggattctagatgtggttaggtacctgtgtctgatgggcgcatccgtggaggccctgacaaccgacggcaaaactgcagaggatctggccaggtctgagcagcacgaacatgttgcagggctgctcgctcgtttgcgaaaagatacccacagagggctcttcattcaacagctacgtcccacgcaaaatctgcagccaaggattaagctgaaactgtttggccactccggatccggcaagaccacgttggttgagagcctgaaatgtggcctgttacggtcctttttcaggaggcgtagaccaagactgagctcaacaaattcatccaggttccccccttcacctctcgcaagcaaaccaaccgttagcgtttcaatcaataacctctacccgggatgtgaaaatgtcagcgtgagaagcaggagcatgatgtttgagcccggacttaccaagggaatgctggaggtgttcgtggcccctactcaccacccccactgcagcgctgacgatcagtctaccaaggccatagatattcagaatgcctatctgaatggggtgggagattttagcgtctgggaatttagtgggaatcctgtttacttctgttgctacgactacttcgccgctaacgaccccacgtccattcacgtggtggtgttttcactggaggaaccgtatgaaatacagttaaaccaggtgatcttttggctgtcatttctgaagagcctggttccagttgaggaacctattgccttcggcggtaaactgaagaacccgctccaggtggtgctggtcgctacccacgcagatattatgaacgtcccgagacccgcaggcggtgagtttgggtatgataaggatacttcattactgaaagagattcgaaataggttcggcaatgatcttcacattagcaataagctatttgttcttgacgccggtgcctctggtagtaaagacatgaaagttctcaggaatcatctgcaggaaataagatcccagatcgttagtgtgtgccctcccatgacacacttgtgtgagaagataatttctacgctcccctcctggaggaagctgaatggccctaatcagttgatgagcttgcaacagttcgtctacgatgtgcaagatcagttgaatcccttggcatccgaggaggatttacgcaggatagcccaacagctccacagcactggcgagataaatatcatgcagagcgagacggtacaggatgtgctccttttggatcctcgatggctgtgcactaatgttctggggaagctgctttccgtagaaactccacgggcactgcaccactatagaggacgctatacggtggaagacattcagcgtttagttcccgactccgacgtcgaagagctgcttcagatcctggacgcgatggatatttgcgctcgggacttaagcagcggcactatggtggacgttcctgccctcataaagacggacaatctgcatcgctcttgggccgacgaggaagatgaggtcatggtttatggcggagttaggattgtcccggtggaacatctcaccccgttcccgtgtgggatctttcataaggtgcaggtaaacctttgtcgatggatacatcagcagagcactgagggtgatgcggatattcggctctgggtgaacgggtgcaaactggccaataggggcgcagaactactcgtgctcctggtcaatcatggccagggcattgaagtccaagtccgcggattggaaacagagaaaatcaagtgctgtctcctcctcgactctgtgtgtagtaccatcgagaatgtcatggcaactaccctgcccggattattgactgtgaagcattatctcagtccccaacaattgagagaacatcacgagccagtgatgatttatcaaccccgtgactttttcagggcccagacattgaaagagacaagcttgaccaacaccatggggggatacaaggaaagtttctcttccataatgtgcttcggctgccatgatgtctattcgcaggccagtctgggtatggatattcatgcaagcgatctcaatcttcttaccagacggaaactttctcgtttattagacccccctgaccccctcgggaaagactggtgtctcctagccatgaatctgggcctgccggacctcgtagccaaatacaatactagcaatggtgcacccaaggattttctccccagccccttgcatgcactgttgagagagtggacaacttacccggagtctacagttggcacgctgatgtccaagctgcgtgagttggggagaagggacgctgccgatttcctcctgaaggcgtcaagcgtctttaaaatcaacctcgacggaaacggccaggaggcctatgccagttcctgcaattcaggaacttcttataactcaatctcctcagtggtgtctagatag

SEQ ID NO: 28314 - DNA, 4293 bp, synthetic construct
  misc_feature 1..4293: note = Description of Artificial Sequence: Synthetic coding sequence
  source 1..4293: mol_type = other DNA
atgacagtgttcagacaggagaacgttgacgactactatgacaccggcgaggagctcgggtcggggcagttcgccgtggtaaagaagtgcagagagaaatctacagggctgcaatatgcggcaaagtttatcaagaaacgaaggacaaaaagttccaggcgaggggttagccgcgaagatattgaaagagaggtgtccattctgaaagaaatccaacatcccaacgtcataacgctgcacgaggtgtacgaaaacaagaccgatgtgatactgattctggaattagttgctggcggtgaattgttcgacttccttgccgagaaagagtccttaacagaggaggaggccaccgagttcctgaagcagatccttaacggagtatattatctgcactccttgcagatcgcccatttcgatctgaagccggaaaacataatgctcctggatcgcaatgtgcccaaaccaagaatcaaaatcattgacttcggattggcccacaaaatagactttgggaatgagtttaagaacatattcggtactccagaatttgtagcaccggagatcgtcaactatgagcctcttggcctcgaggccgatatgtggtcaatcggagtgataacttatatcttacttagcggagctagccccttcttgggcgacaccaaacaagaaacgcttgccaatgtctcagcagtgaactatgagtttgaagacgaatatttcagcaacacatcagctttggccaaagacttcatacgacgattgctcgtgaaggaccccaagaaacggatgactattcaggacagtctgcaacacccgtggatcaaaccaaaggacactcaacaggccctgtccagaaaagccagtgcagtgaatatggaaaagttcaagaaatttgcagccaggaaaaaatggaaacagtccgtgcgactcatttccctgtgccaaaggctatcaaggagttttctgagtaggagcaacatgtccgtcgccagatccgatgacacactggacgaagaggattccttcgtaatgaaagccataattcacgcaatcaacgatgataacgtgcctgggctgcagcacctgctcggcagcctcagtaactacgacgtgaatcagcctaacaagcatggaactcctcccctgctcatcgccgctggttgcggtaacattcagattctgcagcttctgattaagcggggaagccgcatagatgtgcaagataaaggaggctctaacgcggtttactgggccgctcgccacgggcacgtggacaccttgaaatttctgagcgaaaataagtgcccgcttgacgttaaagacaagtctggagagatggccctgcatgtggctgccagatatggtcacgcggacgtcgcccagctgctgtgcagcttcgggagtaatcctaatattcaggataaggaggaggagaccccgctccactgcgctgcgtggcatggatactactctgtggcaaaggccttgtgcgaggctggatgcaatgttaacatcaaaaacagggagggcgagacaccactgctcaccgcaagcgccagggggtaccacgatattgtggagtgcctggccgagcacggtgcagacctcaatgcttgcgataaagacggccatatcgccctgcacctcgccgtgcgccgatgtcaaatggaggtgattaagaccctgttaagccagggatgttttgtggactaccaggatcgccacggaaatacaccactgcatgtggcctgtaaggatggaaacatgcccattgttgtggcattatgcgaggcaaattgcaacctcgatattagtaacaagtacggcagaacccccttacatcttgcagcaaacaatggcatcttagacgtcgtcagatacttatgtctcatgggagcaagcgtggaggccctaacaactgatggcaaaacagcggaggatttagccaggtccgagcagcatgaacacgtcgccggtctgctagcacgactgaggaaagatacccaccgtgggctgttcattcagcagcttagacccacccagaacttgcagcctcgaatcaagctcaagcttttcggccattcagggagtggaaagacaaccctggtcgaatccttaaaatgtgggctccttcggtccttctttagacgcaggcgaccaaggctttcatcgacaaattcctcccgtttcccaccatctccactggcctcaaagccaaccgtcagcgtgtctattaataacctgtatcctgggtgtgaaaatgtgtcagtccggtcccgcagcatgatgttcgagccaggactgacaaaaggcatgttggaggtgtttgttgcaccaacccatcaccctcattgctcagcagacgatcagtcaaccaaagcgatcgatatccaaaatgcgtatcttaatggagtcggcgatttttcagtctgggagttctcaggcaaccctgtgtacttttgctgctatgactactttgctgccaatgacccaacttcaatccacgtggtggtgttttcgctcgaggagccatatgagattcagctgaaccaggtaatcttctggcttagctttctgaagtcactagttcctgtggaggagccaattgcattcgggggtaagctgaagaatcccctgcaggtagtgctcgtggcgactcacgctgacatcatgaatgtgccacgtcccgcaggtggcgagttcggttacgacaaagataccagccttctaaaggagattcgcaatcgatttgggaacgacctgcacatctctaataaacttttcgtcctggatgctggcgcatccggcagtaaggacatgaaagtcctgcggaaccaccttcaggaaattcgctctcagatcgtgtctgtgtgccctccaatgactcacttgtgcgagaagatcatctccacactccctagttggaggaagcttaatggccctaaccaactgatgtcgttacagcagttcgtatatgacgtccaggaccagctgaacccactcgccagtgaggaagacctgagacgtatcgctcagcagctgcatagtaccggggagattaacataatgcagagcgaaaccgtgcaggatgtgctcttgctggacccacggtggctctgcaccaacgttttaggaaagttgctgtcagtggagaccccaagggccctgcaccactaccggggacgctacaccgtcgaggatatccagcggctcgtgccagacagcgacgtggaggaacttctgcagatcctcgatgccatggacatttgtgcgcgagatctgtcttccgggaccatggttgacgtcccagccctgataaagacagacaacctgcataggagctgggccgacgaggaagacgaggtcatggtgtacgggggtgtaagaattgttccagtggaacacctcacaccttttccatgtgggattttccataaggtgcaggtgaatctgtgcaggtggattcaccagcaaagtaccgagggtgatgccgatatcaggttgtgggtcaacgggtgcaagctggcgaaccgaggtgccgagctcctggttctgttggtcaaccatgggcaaggcatagaggtacaggttaggggacttgaaaccgagaaaatcaagtgttgcctgctgctggatagcgtttgctcaacaatcgaaaatgtcatggcaacaactctccccggtttactaaccgtcaagcactatctgtcaccacagcagctgagggaacaccacgagccagtgatgatctaccaacctcgcgatttttttagggcccagacgctgaaggaaacctctctgaccaataccatgggcggatacaaggaatctttcagtagcatcatgtgcttcggatgccacgatgtctacagtcaagcaagcttaggcatggatatccacgcttctgacctgaacctgcttactcggagaaaactcagccgcctactggatccgcctgacccgctggggaaagactggtgcctgctggccatgaacctaggacttcccgacctggtcgccaaatacaacacctccaacggcgcacccaaggattttctgccctcaccccttcacgccctcctccgcgagtggaccacatatcctgaaagcaccgtaggcacgctcatgagcaagctgagagaattgggaagacgcgatgcggcagatttcctccttaaagcatcctccgtgtttaaaatcaacttggatggaaacggccaagaggcatatgcctctagctgcaacagtgggacctcatataactcaatttcatcagttgtaagtagatag

SEQ ID NO: 28315 - DNA, 4368 bp, synthetic construct
  misc_feature 1..4368: note = Description of Artificial Sequence: Synthetic coding sequence
  source 1..4368: mol_type = other DNA
atgaccgtgttcagacaagagaatgtcgacgattactacgacacaggtgaagaattgggtagcggccagttcgccgtggtgaaaaagtgcagagaaaagtcgaccgggttgcagtacgccgctaaatttattaagaagagacggaccaaatccagtcgaagaggcgtgagccgagaagatatagaacgagaggtgtctattctgaaagaaatccaacaccctaacgtaataacactgcacgaggtttacgagaacaagacggacgtgattctgatcctggaactggttgccggaggtgagctgttcgattttctggcagaaaaagaaagcctcaccgaggaggaggctactgagtttctgaaacaaatccttaacggggtgtactacttgcattcgttacaaattgcgcactttgacctgaagcctgaaaacattatgttgctcgaccggaatgtgccaaaacctcgaattaagataattgattttggactggcacataagatagactttggcaatgagtttaagaatatattcggcacgcccgagttcgtggctccagagattgtcaactacgagccactggggcttgaagctgatatgtggtccattggcgtcatcacttatattctgctcagcggagctagcccgtttctcggcgatactaaacaagaaacattagcaaacgtgagcgcagtgaactatgaatttgaagacgagtacttcagtaatacatccgccttggccaaggatttcatccgccgactcctcgtcaaggatccgaagaagagaatgacaatacaggatagcttacaacacccctggatcaaaccaaaagatactcagcaagcgctctcaagaaaagcatcagccgtcaatatggagaaatttaagaagttcgccgcacggaaaaagtggaagcagagtgtgaggctcatctcgctgtgccagaggctgagccgctcatttctatcaagatctaacatgtctgtcgctcggagtgacgacaccttggacgaagaagactcattcgtgatgaaagccattattcacgccattaacgatgacaatgtacccggactccagcatctactcgggtccttgtctaactatgatgtgaatcaacccaacaagcacggaacccctcccctgttaattgcagctggctgcggaaatattcagatcctgcagttactgatcaaaagaggctcccgaattgatgtccaggataagggcggttcaaatgccgtatattgggccgcacgccatggccatgtggacaccctgaagtttctgagcgagaacaaatgccccctagacgtaaaagacaaaagcggtgagatggcactccatgtggccgcacgctacggtcacgcggacgtggctcagctgctatgttccttcggcagtaacccaaatatccaagacaaggaagaggaaacccccctacactgcgccgcatggcacgggtattattcagttgccaaggctctttgtgaggctggctgtaacgtgaacattaaaaacagggagggtgaaacacctttacttacagcaagtgccagaggctaccacgatatcgtcgagtgcttagctgaacatggagctgacctgaacgcatgcgacaaagatgggcatattgccttacacctcgctgtgaggcgctgtcagatggaagtgatcaaaacgcttctgtcccaaggctgtttcgtggactaccaggaccgccatgggaacactccactgcacgtggcttgtaaggatgggaacatgcctatagtggtggccctctgtgaggccaattgcaatctggacataagtaataaatatggtcggacccctcttcacctcgcagcaaacaatggtatcctggatgtcgtccgttacttgtgccttatgggggcttccgttgaagccctgaccacagacggcaagaccgccgaggacttagctcgatctgaacagcacgaacacgttgctggattactggctagattgcgcaaggatactcatagaggcttgttcattcagcagctgcgacccacccagaacttgcagcccagaattaaactgaaactgtttggccactccggatctggtaaaactactttagtggagtcgttaaaatgtgggctcctcaggtccttctttcgccgtagacggccacggctgtcaagcaccaattcctcgaggtttccaccatcccctctggcgagcaagcctaccgtgagtgtatcgatcaataatctatatccgggatgcgaaaatgttagcgtgcgcagccggtccatgatgtttgaaccaggcttgacaaagggaatgctcgaggtttttgtggcaccaacccaccatccccactgcagcgccgatgaccagagcactaaggccatagacatccagaacgcctacctcaacggcgtgggggacttctcagtatgggagtttagcgggaaccccgtttatttctgttgctatgactactttgccgctaatgacccaacaagcatccatgtcgtcgtgttttctctggaggaaccttacgaaattcagttgaatcaggttattttctggttaagctttctaaaaagcctggtgccagttgaagaaccaatcgcctttggtggaaaattaaaaaaccctctgcaggtggtcctcgtcgccacacacgcagatatcatgaacgtgcctcggcctgccggtggcgagtttggctatgataaggacacgtccctgctgaaagaaattagaaaccgtttcggaaacgatcttcatatatccaacaaacttttcgtcttggacgccggagcctccgggtctaaagacatgaaggtcctgagaaatcatttgcaagaaattcggtcacaaatcgtaagcaagacattgccgtttaccccggacatattggtgggggtcccactgtggcatcaccaaaaaatcggcggtagccccgtgtgtccgccaatgacgcacctctgcgaaaagataatcagtacgttaccctcctggcggaagctcaatggccctaaccagctgatgagcctccagcaattcgtatatgacgtgcaggatcagctcaatccgctagcctcggaagaggatctcaggcggatcgcacagcagctccactcaactggagagatcaacatcatgcagtccgagacagtacaggatgttctcctgctcgatccaagatggctgtgtacaaatgtcctgggaaaactgctgagtgttgagacccccagggccctgcatcattacagagggagatacaccgtcgaagatatccagagactcgtgccagactccgatgttgaggagctactgcagatcctcgatgccatggacatctgcgcgagggacctgtcttcaggcaccatggtcgacgtgccagctcttataaaaactgacaacctccataggtcatgggctgatgaagaggacgaagtcatggtgtacgggggagtgaggatagttccagtcgagcacttgactccatttccatgtgggatcttccacaaggtacaagtgaacctgtgtcgctggattcatcagcagtccactgagggtgacgcagacattagactctgggtgaacggctgcaaattggccaaccgcggtgccgaactgctggtgctacttgttaaccacggccagggtatagaagttcaggtccgtggcttggagactgagaagattaaatgctgcctgctgctggatagcgtatgttcgaccattgaaaacgtaatggcaactaccctgcccggattgctgaccgtaaagcattacctgagtccccaacagctgcgagagcatcacgaacctgtgatgatctaccagcctcgtgatttctttagggcccagacattgaaggagacatctctcacgaacaccatggggggatataaggagtccttcagttccataatgtgcttcggctgccacgacgtgtactctcaagcttccttaggtatggacattcatgcctctgacctgaacctgctgacacggaggaagctgtcgcggctcctggatcctccggatcctctgggcaaggactggtgcctgttggccatgaaccttggcctgccagaccttgtcgccaaatataataccagcaatggggcacccaaggattttctgccttccccattgcacgctctactgagagagtggacaacataccctgagagcacagttgggacgctaatgtctaaactcagagaactcggccgacgagacgctgccgactttcttctcaaagcttcaagtgtgtttaaaatcaatctggacgggaacgggcaggaagcatatgccagttcttgcaattctggcacctcctataacagcataagttccgttgtgtctcgctag

SEQ ID NO: 28316 - DNA, 4293 bp, synthetic construct
  misc_feature 1..4293: note = Description of Artificial Sequence: Synthetic coding sequence
  source 1..4293: mol_type = other DNA
atgactgtgttccgccaggaaaatgttgacgattactacgatactggggaggaacttggctctggacagttcgcagtagtgaagaaatgtcgcgaaaaatctacgggcttgcagtacgcagccaagtttatcaaaaaacggaggacaaagagctccagaagaggagtgagtcgggaagatatcgagagagaggtgagcattttaaaagagatacagcacccgaatgtgatcaccttgcacgaagtctacgagaacaaaacagacgttattctgatcctggaactggtcgcaggtggagaactgtttgattttctggcagagaaagagtcactcacagaggaggaggcgacggagttcctgaaacagattttgaatggcgtgtattacctccactctctccagatcgcacactttgatcttaagccagagaacatcatgttgctggatcggaatgttccaaaaccaagaattaaaattattgacttcggactggcacacaaaattgactttgggaacgagtttaaaaacatattcggcacaccagagttcgtagccccagagatcgtgaattacgaacccctggggttagaagccgatatgtggtctatcggtgtgatcacatatatcttgctgagtggcgcaagtccttttctcggcgatacgaagcaggaaaccctagctaatgtctcggcagttaactacgaatttgaagatgagtacttttctaacacgagcgcccttgccaaggattttataagacgtctgctggtcaaagacccgaagaaaaggatgaccattcaggatagtctgcagcatccatggataaaaccaaaggacactcagcaggcactctcccggaaagcctcagctgttaacatggaaaagttcaaaaaattcgcagcaagaaagaagtggaaacagtccgtcaggctgattagtctatgccagcgactgtcccgctccttcctgtcccgcagcaatatgagcgtcgcacgctctgatgatactttggatgaagaagatagcttcgtcatgaaggctatcatccacgctatcaacgatgataacgtcccaggcctccagcatctgctgggctctctttcaaattacgatgtgaatcagcctaataagcatggtaccccacctctgctgatcgccgctggatgcggaaatattcagatactccaactactcatcaaacggggatcccggattgacgtacaagataaaggaggttctaatgccgtgtattgggccgctagacatggccatgtggatactctgaagtttctgagcgaaaataaatgtcccctcgacgtcaaagacaaaagcggagaaatggccctccatgtggcagccagatatggccacgctgatgttgcgcaactcttgtgctctttcggttcgaatccgaacatccaggacaaagaggaggagacgccgctccattgtgctgcctggcatggttattatagcgtggccaaagccctatgtgaggccggatgtaatgtaaacattaaaaaccgggaaggcgagaccccgctgctcactgcgtctgctagggggtaccatgatattgttgaatgtttagccgagcatggcgctgatcttaatgcctgcgataaggacggacatatcgccttgcatttagctgtccggagatgccagatggaagtgataaagacgttgctatctcagggctgtttcgtggactaccaagaccgccatggcaacacccctctccacgtagcttgtaaggatggcaacatgcccatcgtggtagcactgtgcgaggccaactgtaatcttgacatcagtaacaagtacgggaggacacccctgcacctagccgcaaataacggtatactggacgttgtaaggtacctgtgtttgatgggcgcaagcgtggaggcactgaccaccgatggcaaaacagcagaagacctcgccagaagtgaacagcacgaacatgtggccggtctcctcgccagattacggaaggatactcatagaggcctgttcattcaacagctgaggccgacccaaaacctgcaacctaggatcaaactcaagttgtttggccattccgggagtggcaaaactacactcgttgagagtttgaagtgcgggctactacgttcatttttccggcgacggcgtccccgtctctcctccaccaattcttccaggttccccccttccccactggctagtaaacccaccgtgtcagtgtccataaataatttgtaccctggatgcgagaacgtgagcgtgagatctcgaagcatgatgtttgagccaggcctcacgaaaggcatgcttgaagtctttgttgcccctacccaccaccctcactgttcggccgacgaccagagcactaaagccatcgatatccaaaacgcttacctgaatggtgtgggcgactttagcgtgtgggagttcagcggcaaccccgtatacttctgttgttatgattattttgccgcaaacgatcccacctccattcacgtagttgtcttttccctcgaagagccctatgaaatccagttaaatcaggtgattttctggttgtccttcctgaagagtcttgtgcctgtagaagagcctatcgcctttggtgggaagttgaagaatcccctgcaggtcgtgttagtcgctactcatgctgatatcatgaatgtcccacggcctgccggtggagagttcggctatgataaagatacgtctctgttaaaggagattagaaaccggttcggcaatgacctgcacatttcgaacaagctctttgtcttggacgcgggagccagtggttcaaaagatatgaaggtactgaggaatcaccttcaggagattagatcgcagatagtctctgtctgtcctccaatgacccatctgtgtgaaaaaatcattagtactttgccgtcctggcgcaaactgaacggccctaatcagttgatgtccctgcagcagttcgtctatgatgtgcaggaccaactgaatcctctggcatccgaagaagaccttcggcgtatcgctcaacaactgcattcaacgggcgagattaacatcatgcagtcggaaacggtgcaagacgtcctgctgctggaccccaggtggctttgcacgaacgtactgggcaagttgctgtccgttgagaccccacgtgcactccaccactatagaggtagatataccgtggaagacattcagcgacttgtaccagacagcgatgtggaggaattgctccagattttggacgccatggacatctgcgccagggacctaagctcaggaactatggtcgatgtgcccgctctcatcaagaccgataatctccaccgatcttgggccgatgaagaagatgaagtgatggtatacggcggtgtgcgtatagtgcccgtagaacacctcacaccatttccctgtggaatcttccataaggtgcaggtgaacctgtgccggtggattcaccagcagagcacagaaggcgacgctgacatccggttgtgggtgaatgggtgtaagttagccaatcgaggtgctgagctgctggtgcttctcgtgaatcacggccaggggatcgaagttcaggtgcggggactcgaaacagagaaaatcaaatgttgcctgctgttggattcggtgtgctcaactatcgagaacgtgatggcaaccacgctgcccggtctactgaccgtaaagcattacctgagcccccaacagttgcgagaacatcatgagcccgtgatgatatatcagccccgagacttttttcgcgctcaaaccctgaaggagacctccctgacgaatactatgggtggctacaaggagtcctttagcagtatcatgtgtttcggttgccacgatgtgtacagtcaggcgagtctcggcatggatattcatgcttccgacctcaatctgttgacccgccgaaaactttccagactgctggatcccccagatcccctgggtaaggattggtgcctcctggccatgaatctaggcttgccggacctggtggccaaatacaacaccagcaacggggcaccaaaagattttcttcctagccctcttcacgctctgctgcgtgaatggactacctaccctgaatctaccgttgggaccctgatgtcaaagctgcgggaactgggcagacgcgatgctgcagactttcttctgaaggccagctctgtcttcaagatcaatctcgacggtaacggtcaggaggcctacgccagtagttgtaattcaggcacttcatataatagcattagcagtgtggtcagccggtag

SEQ ID NO: 28317 - DNA, 4095 bp, synthetic construct
  misc_feature 1..4095: note = Description of Artificial Sequence: Synthetic coding sequence
  source 1..4095: mol_type = other DNA
atgaccgtcttcaggcaggaaaatgttgacgattactacgacaccggcgaagaactgggaagcggccagttcgcagtagtcaagaaatgtcgtgagaaatcaactggtctgcagtatgctgctaaatttatcaagaaacgccgtacaaaatcatccagaagaggcgtatcgagggaggacatagagagagaggttagcattctcaaggagatccagcaccctaatgttatcacactgcacgaagtgtacgaaaataagacagacgtgattttgatcctcgagctggtagcaggcggagaattgttcgatttcctggccgagaaagagtcccttactgaggaggaagccactgagttcttgaagcagatcctgaacggtgtatactaccttcactctctccagatcgcccacttcgacttgaaaccagaaaacattatgctcctagaccggaacgtccccaagccccgaatcaagatcatagatttcggactggcacataagattgattttggcaatgagttcaagaacattttcgggacccccgaattcgtggctcctgagattgttaactatgaaccgcttggactggaggctgacatgtggtccattggagttattacatatatcctgctaagtggagcctcaccgtttctcggcgacacaaaacaagagaccttggcaaatgtttctgctgtgaattacgaatttgaggacgagtactttagtaacacctctgccctggcaaaggatttcatcagaagattactggtgaaagaccctaagaaaagaatgacaatccaggactccctgcagcacccctggataaagcctaaggacacccagcaagccctctcgcgcaaagcatctgctgtgaacatggagaagtttaaaaagttcgctgccaggaagaagtggaagcagtctgtgaggctaatttccctctgccaacggctcagccggtcttttctctcacggagcaacatgagcgtggcaagatctgatgacactctggacgaggaggactcatttgtcatgaaggcaattattcatgccatcaatgacgacaatgtgccgggactacaacatttgctgggaagcttatccaactacgacgtgaaccagccgaacaagcacggcactcctcccttgctaatcgcggcagggtgcgggaatatacagatccttcagttgcttattaagcgtggttcgcgcatagacgtgcaggataagggcggaagtaatgctgtttattgggcggcacgtcatggccacgtggataccttaaagtttctctccgaaaacaagtgccctctcgatgtcaaagacaagtctggggagatggcattacatgttgccgcacggtatgggcatgctgacgtcgcccaattgctgtgttctttcgggtccaaccctaatatacaggacaaggaggaggaaactccactgcattgtgcagcttggcatgggtactactccgtcgccaaagccttatgtgaggcagggtgtaacgtcaacattaaaaatagagagggcgaaaccccactattgacggcttccgctaggggctaccatgacatcgtcgagtgcctggctgagcacggcgctgacctcaatgcttgcgacaaggacgggcatatagccctgcatcttgcggtcaggcgatgtcagatggaggtaataaagacacttttgagccaggggtgttttgttgactaccaggaccggcatggcaacactcctctgcacgtggcatgtaaggatggcaacatgcctatcgtagtggcactctgcgaagctaattgtaatttggatattagcaacaaatacggcagaactccgcttcatttggccgctaataacggcatcctggatgtcgttagatacctctgcctcatgggggcaagcgtggaggcgttaacgacagatggcaagactgccgaggacttggccagatccgaacagcacgagcacgtggccggtttgctagcgagacttaggaaagacactcaccgcggtctgttcatacagcagctgagacccactcaaaatttacaaccaagaatcaagctaaaactgtttggccacagcggctccggtaaaaccacattggtcgaatccttgaaatgtgggctgctgagatcatttttccgcagacgccgtccgcgtctatcctctactaattcttccaggttccccccatccccactcgcttcaaaaccgaccgtgtcagtctcaatcaacaatctctatccagggtgcgagaacgtctcagtgagaagccggtctatgatgtttgagccgggtcttaccaaggggatgctcgaagtattcgtagcgccaacccaccacccacactgcagtgccgatgaccagtccactaaggcaatcgacattcagaacgcatacctaaatgcgtttggcggtaagctgaaaaatcccctccaagttgtgctggtggccacgcacgctgacataatgaatgttcctcgccctgccggtggcgagtttggttatgacaaagacacgtccctgctgaaagaaatcaggaaccgcttcggcaacgatctacacatttcaaacaagctttttgttctggatgctggagccagcggtagcaaagatatgaaagtgctgcgtaatcacctccaggaaatccgctcccagattgtgtctgtctgtccgcctatgacacatttatgcgaaaagatcatcagcactttgccctcctggcggaagctgaacgggccaaaccagctaatgtccctgcagcaatttgtttacgacgtacaggaccagctcaaccctctggcatcggaagaggatctgcggaggatcgctcagcaactgcatagcacgggggagatcaacataatgcagagcgaaacagtccaggacgtactcttactcgaccccaggtggctgtgcactaacgtgttgggcaagctcttatccgttgagactccgagagcattgcatcactatcggggtcgttacacagtggaagacatccagagactcgtacccgatagcgatgtggaagaactccttcaaattctggatgcaatggatatatgcgccagagatctgtcttctgggacaatggtcgatgtccccgcactgatcaagaccgacaacctgcaccgcagctgggcggatgaagaagacgaggtgatggtgtatggcggtgttcggattgtacccgttgagcatctgactccttttccatgcggtatctttcacaaagtccaggtgaacttgtgtcgctggatacaccagcagtccactgaaggcgacgccgatatacgcttatgggtgaatgggtgcaaactggctaacaggggtgcagaactgctcgtgctcctggttaaccacgggcaagggattgaggtgcaggttagaggactggagacggagaagatcaagtgctgtctgctcctggatagcgtttgtagcaccattgagaacgtaatggccaccactctgcctggtctgctgaccgtgaagcactatctcagtccccaacagctacgagagcaccacgagcctgttatgatttaccagccacgggatttctttcgcgcacaaacactcaaggaaacctcacttacgaatacgatgggcggatataaagaatcatttagcagcatcatgtgctttggctgccatgatgtgtactcccaggcctcattggggatggacattcacgcttctgatttgaacctgttgacccgaaggaaactgtcaagactgttagacccccctgacccactgggtaaggattggtgcttgcttgctatgaacctcggacttcctgatctcgttgccaagtataacactagcaatggagcacctaaggactttctgccgagcccactccacgccctcttgagggagtggactacctacccagagagcacagttggcacgctcatgtccaagttaagggagctgggccgacgagatgccgcagactttttactgaaagctagctcagtattcaagattaatttggatggcaacgggcaggaagcttacgccagctcatgcaactccggaacttcctacaactctatctcctccgtcgtgagccgatag

SEQ ID NO: 28318 - DNA, 2223 bp, synthetic construct
  misc_feature 1..2223: note = Description of Artificial Sequence: Synthetic coding sequence
  source 1..2223: mol_type = other DNA
atggctacggctaactccattattgttttagacgatgacgacgaggacgaggcagcagcccaacctggcccttcccaccccctgccgaacgccgctagcccgggagccgaggcccctagttctagcgagccccatggagcccgtggctcgtcctcttcggggggtaagaagtgttacaaactggagaatgagaaactctttgaagaatttttggagctgtgcaagatgcagactgccgatcatcccgaggtggtgcctttcttgtacaacaggcaacagcgcgctcactccttatttctggcttccgctgagttctgcaatatcctcagcagagttctcagccgcgctcgctcacggcctgccaagctctacgtttatattaatgagctctgcacggtgttgaaggctcactcggcaaagaagaagttgaacctggctcccgctgcaacgacgagcaacgagccgtctggcaataaccctccaacccacttaagtctggaccccaccaatgctgaaaacacagcatcacaaagccctagaacaagaggctcaaggaggcaaatccagcggctagagcagctgttagcattgtatgtggctgagattaggagactgcaagagaaagagctggatcttagcgaactcgatgaccccgatagcgcctatcttcaagaggctcgcctgaaacggaaactgatacgactgttcggccgtctttgcgagttgaaagactgcagttcattaaccggtcgggtgatcgagcaaagaataccctataggggaacgcggtacccggaggttaacaggcgcatcgaacggctcataaataaaccagggccagacacatttcctgactacggagacgtcctgagagcagtcgaaaaagccgctgccaggcattctctagggctgccaagacagcagcttcagctaatggcgcaggatgcctttcgggacgtagggattagactccaggaaagacggcatcttgaccttatctacaattttggttgccatttgacagatgattatcggccaggggtcgatcctgcccttagtgacccagtcttggcgcgtcgtctgagggagaaccggagcctggccatgagtagacttgatgaggtgatcagcaaatatgctatgttacaagataaatccgaagaaggtgaacgcaaaaaacggagggctcgattacaggggacaagttcgcattctgcggacacacccgaggcctctctcgactctggggagggtccttctgggatggcctcacaggggtgtcctagcgcgtctcgggctgagactgatgatgaggacgacgaagaatctgatgaggaagaagaagaggaagaggaagaggaggaggaagaggcgaccgattctgaagaggaagaggacctcgagcagatgcaggaaggacaggaagatgacgaggaggaggacgaagaggaggaggccgcagccggtaaggacggggataagtctccaatgtcctccctgcagatttcaaatgaaaagaatttggaaccgggtaagcagatctcccgttcctccggggaacagcagaataagggtcgtattgtatccccgtccctattgagcgaggagcccctcgcccctagctccattgacgctgaatcaaacggtgaacagcctgaagagctaaccctcgaggaggaatcacctgtcagtcagctgtttgaacttgaaatagaggccttgcctctcgatacccccagctccgttgagacagatataagctcatccagaaaacagtccgaggagccttttaccacggtcctggagaatggtgcaggaatggtgtctagcacttcttttaatgggggtgtatcccctcataattggggagacagcggacctccctgcaagaagagccggaaggagaaaaaacagaccggcagcggacctctgggtaatagctacgtagagagacagagatctgtgcacgagaagaacggaaagaaaatctgtaccctccccagtcctcccagccccctcgctagcctggcgcctgttgctgattccagcacaagggtcgacagtccaagccatggactagtcacaagctctctgtgcatcccatccccggctagactgtcccagaccccacattctcagcctccccgtccagggacttgcaagacatctgtcgctacacagtgcgaccctgaggaaattatagttctctctgacagcgattag

SEQ ID NO: 28319 - DNA, 2223 bp, synthetic construct
  misc_feature 1..2223: note = Description of Artificial Sequence: Synthetic coding sequence
  source 1..2223: mol_type = other DNA
atggcaacagccaatagcatcatcgtcctcgacgatgatgacgaggacgaggctgctgcacagcccggtccatcgcacccattacctaacgccgcatcaccgggagcggaagctcccagttcatccgagccgcatggcgctagaggatcgtcttcttccgggggaaaaaaatgttataagctagaaaacgaaaagcttttcgaggagtttctcgaattatgtaagatgcaaacagcagatcaccccgaagtcgtgccattcctgtacaatcggcagcagagagcccactctctcttcctcgctagtgcagaattttgtaacattctgtcccgcgttctatcacgagccagaagccgccctgccaagctgtacgtgtatattaacgaattgtgcacagtgttaaaggcacactccgcaaaaaaaaagctaaatctggcccctgcagctactaccagcaacgaacctagcggtaacaatcccccaactcacctctcattggaccctacaaacgcagagaatacggcttctcagagcccccgaaccaggggctcaagacgccagatccagcgacttgagcagttactggcattatacgtggcagaaatccgaaggctgcaggagaaggagttagatctatcagagttggatgacccagattccgcgtacctccaggaagccaggcttaagaggaagctcatccgcctatttggaaggctatgtgagctaaaggattgctcctccctgacaggcagggtgatcgaacagcgcattccttatagaggaacgcggtaccctgaggtgaaccgcagaatagaacggctgatcaataagcctggcccagacaccttcccggactacggagacgtgctccgcgctgtggaaaaagccgcagctaggcacagcctgggcctgcctcgccagcagctacagctcatggctcaggacgcctttcgcgatgttggcatccgcctccaggagagacgccacttggatctaatctataacttcggctgccacctcactgacgattacagacctggagtggaccctgctctgtcagaccccgtcctcgcccgacggctccgggagaatcgatcactggccatgtcacggctggacgaggtgatctccaagtacgccatgctccaggataaatcagaggaaggcgagcgcaagaagcgcagagctcgtctgcaaggcacttcaagtcacagcgccgataccccggaggcttctctggactctggggaaggaccgagtgggatggccagccagggatgcccctctgcttcacgcgctgagacagacgacgaggatgacgaagagtccgacgaggaagaggaagaggaagaggaggaagaggaggaggaagcaaccgattcggaggaagaagaggatctggagcagatgcaagaagggcaagaggatgacgaggaagaggacgaggaagaggaggctgccgctggcaaagatggtgacaaatcaccaatgtcttcactgcagatttctaatgagaaaaacttggagcctggcaagcagatcagtagatcaagcggagagcagcagaacaaggggagaatcgtttcaccaagccttttgtctgaggagccccttgctccaagctcaattgatgctgagagcaacggggagcagcctgaggaactgacactggaggaggagagtcccgtctctcagctttttgagctcgagattgaagccctcccactcgatactccgtcatccgtcgagaccgacatttcctcaagcaggaagcagtctgaggaacctttcaccacagtgctggagaatggagctgggatggtgagcagcacctcattcaacggcggagtgagccctcataactggggagatagtggacccccatgtaagaaaagccgcaaagaaaaaaaacagactggctccggaccattgggaaattcctacgtggagcgccagcgctccgtgcatgagaagaatggtaagaaaatttgcacgttgccatctcctccttcccccctcgccagcttggcccctgtagcagactcctccacccgggtagattctccttctcacgggctggtaacttcttccctctgcatcccctcgcctgcccgactatctcagactccccacagccagccgccaagaccgggtacctgcaagacaagcgtagccactcaatgcgatcccgaagagatcattgtgttgtctgactcggactag

SEQ ID NO: 28320 - DNA, 1998 bp, synthetic construct
  misc_feature 1..1998: note = Description of Artificial Sequence: Synthetic coding sequence
  source 1..1998: mol_type = other DNA
atgcaaaccgccgaccacccagaagtggtcccctttctctataatcggcagcagcgcgctcacagtctgttcctggcgagcgccgaattctgtaacatccttagtcgggtcctgagccgcgctcgtagtcgacccgctaaactttatgtgtacataaacgagctatgcaccgttctgaaggctcatagcgcaaaaaaaaaactgaacctggccccagcagctactacatctaacgaacccagtgggaataacccccctacgcacttgagcctggaccccactaacgcagaaaatactgcgtcccagtctccacgtacccggggttctcgacgtcagattcagcggctcgagcagcttctggcactgtacgtcgctgagatcaggcgcttgcaagaaaaagaacttgatcttagcgagctggatgacccagattccgcatacctccaagaagccaggttgaagcggaagttgatccgtctttttgggaggttgtgcgaactcaaggattgctcatctctgaccgggcgtgttatcgagcagcggataccttatagaggaacaagataccctgaggtgaataggcgcatcgagcgtcttatcaataaaccaggccctgatacattccccgactacggagacgtcctccgagccgtggagaaagccgcagcaagacattctctgggattacctcgtcagcagctgcagctgatggctcaggacgcttttagggacgtgggcataaggctacaggagcgcaggcacctcgacctgatctacaactttggctgtcatctgacagatgattatcggcctggtgtagaccctgcactctctgatcctgtgctcgctagaaggctgcgagagaaccgctctctggccatgtccaggcttgatgaagtgatttcgaagtacgccatgctgcaagacaagtccgaggaaggcgagcgaaagaaacgcagagccagactgcagggcactagttctcactctgctgacacacctgaggcatctcttgattcgggagagggtccaagcggcatggcgagccaggggtgccccagcgcttcccgcgcagagacagacgacgaggatgatgaggagtccgatgaggaggaggaagaagaagaagaagaagaggaggaagaagctacagactctgaggaggaggaagacctagagcagatgcaggagggccaggaagatgacgaagaggaagacgaggaggaagaggctgcggctggcaaagacggagataaatctcctatgtcctccctgcagatatcaaatgaaaagaatctggagccaggaaagcagatctccaggagtagcggggaacagcagaataaggggaggatcgtttccccgagcctcttgagcgaggagcctttggcaccgtcatctattgacgctgagtccaatggcgaacaaccagaggagttgacactcgaagaagaaagtccagtttcacagttatttgagttggagatagaagccctgccgcttgatacaccttctagcgtggagaccgacatcagctctagccggaagcaatctgaagagccgtttacgaccgtgctcgaaaatggggcagggatggtttcctccacctccttcaatggtggggtctctccgcacaactggggcgattctggacccccatgtaagaaaagtaggaaggagaagaagcaaactggaagcggtcctctaggtaatagttatgtggaacgccaacgctcagttcatgagaagaacggaaaaaagatttgcaccctcccttctccaccttcaccactggcgtccctggcaccagtagccgactcctcgacacgtgtggactcaccttctcatgggctggtgacttcctcgctgtgtataccctcccctgcccgtctcagtcaaacccctcactcgcagcccccacggccaggcacctgtaagacatcagtggcaacacaatgcgatccagaggaaatcattgtgttgtccgattctgactag

SEQ ID NO: 28321 - DNA, 537 bp, synthetic construct
  misc_feature 1..537: note = Description of Artificial Sequence: Synthetic coding sequence
  source 1..537: mol_type = other DNA
atggccaccgcgaattccatcattgtgctggacgacgacgacgaggatgaggccgctgcccagcctgggccatctcatccattgccaaatgcggcatctccaggggcagaagctcccagcagttctgagccccacggcgcaagaggaagttcttccagcggaggaaagaagtgttataagttggagaacgagaagctcttcgaggaattcctggaactgtgcaagatgcaaacagctgatcatcccgaggtcgttccgtttctttacaaccggcagcaaagagctcattctctcttcctggcctctgctgaattttgtaatatcctctctagagttctttcacgggcacggtctcggcctgctaagctatacgtgtatataaacgagctttgtactgtgctcaaagcccactccgccaagaaaaaactgaaccttgctccggcagcaacaacgtcaaacgagccatcgggcaacaacccacctacacatttgagcctggatcctacaaacgctgaaaacacagctagccagtcctag

SEQ ID NO: 28322 - DNA, 147 bp, synthetic construct
  misc_feature 1..147: note = Description of Artificial Sequence: Synthetic coding sequence
  source 1..147: mol_type = other DNA
atggccaccgccaactctattattgttctggatgatgacgacgaggacgaggcagccgcacagcccggacccagccatcctctgccgaatgcagcaagtccgggagcagaggccccatcttccagcgagccccatggcgcaaggtag

SEQ ID NO: 28323 - DNA, 393 bp, synthetic construct
  misc_feature 1..393: note = Description of Artificial Sequence: Synthetic coding sequence
  source 1..393: mol_type = other DNA
atggccaccgctaattcaattatcgtgctcgacgatgacgatgaggatgaagctgctgcccagccgggtccttcacatccccttcctaacgccgcttcacctggcgctgaggccccatcatctagtgaaccccacggggcaaggggttcttcctcaagtggagggaaaaagtgctacaaactggaaaacgagaaactcttcgaagagttccttgaattgtgtaagatgcagaccgcagaccatcctgaagttgtgccattcttatacaaccgacagcagcgggcacacagtctgttccttgccagcgcggagttctgcaatatcctctccagggtgctctccagagccagaagtcgacctgcaaagctctatgtgtatattaatgaactgtag

SEQ ID NO: 28324 - DNA, 2316 bp, synthetic construct
  misc_feature 1..2316: note = Description of Artificial Sequence: Synthetic coding sequence
  source 1..2316: mol_type = other DNA
ggagtgcccgtgataaaatggaagaaagatgggatacatctcgccttgggcatggatgagaggaaacagcaactctctaacgggtctctgcttatccaaaatatccttcacagccgccaccataagcctgacgaggggctctaccaatgtgaagcgagccttggagattccggatcaattataagcagaactgcaaaagtggcggttgcgggtcctctgagattcctttcccagactgaaagtgttactgcctttatgggcgacacggttcttcttaaatgtgaggtgattggagagccaatgccaaccatccattggcagaaaaatcagcaagatttgactcctattccaggcgactcccgcgtggtggtgctccccagtggcgcactgcagatcagccgcctgcagcctggggatataggtatttaccggtgctcagcaaggaacccggctagctctagaactggcaacgaggcagaagtaaggattctgtccgacccgggtttgcatagacagctgtacttcctccaacgcccttctaatgtagtggccattgaaggcaaggatgcagtcctcgaatgctgcgtttcagggtatccaccgcctagctttacatggttacggggagaggaagttatccagctacggtccaaaaagtattccctcctggggggtagcaacctactgatctccaacgtcactgatgatgacagcggaatgtacacatgcgtggttacctataaaaacgagaatatttccgctagcgccgagttgaccgtactcgtgcccccttggtttctgaaccacccgtctaatctgtacgcctacgagtcaatggatatcgagttcgaatgtaccgtctctggtaagccggtgcccacggtgaactggatgaagaacggcgacgtggtcataccaagcgactattttcaaatcgtcggcggatctaacctccgcatcttgggcgtggtgaaatcagatgaaggcttctatcaatgcgtggccgagaatgaggctgggaacgctcaaacgagtgcccagctcattgtgccaaagcctgctataccctcctccagcgtgcttccctccgctcctcgcgatgtggtccccgtcctcgtgtcaagtcgttttgtcaggctgtcctggcgaccccctgccgaagccaaaggaaatatccagacattcaccgtgtttttcagtcgagaaggtgataatcgggagcgggctctcaacacgacccaaccaggctccctgcagctgacggtgggcaacctgaagcccgaagctatgtatacattccgcgtcgtggcatacaatgaatgggggcctggtgaatctagccaacccattaaggtagcaacccagcccgagctgcaggtgcccggtccagtggagaatctgcaggcagtctcaaccagtcccacctcaatcttaatcacatgggagccacctgcttatgctaatgggcctgtgcaaggataccgcttattctgcacagaggtcagcacagggaaggagcagaacattgaagtagatggtctgtcgtacaaactggaaggcttgaaaaagtttactgagtactctcttcgattcctcgcctacaacaggtatggtccaggcgtgagcacagacgatatcacagtggttacgctctcagatgtcccctcagcgcctccccagaacgtctccctcgaggtcgtgaatagcagaagtataaaggtgtcgtggctgcccccaccatcaggcacccagaacggatttattactggctacaagatccggcaccggaaaaccactaggcggggagaaatggaaaccctggagcccaacaatctgtggtatctttttaccggcctggaaaagggttctcagtattcattccaggtctccgctatgaccgtgaatgggacagggcctccatcgaactggtacactgccgagacccctgaaaacgaccttgatgaatcacaggtgcctgatcagccttcctcactgcacgtcagaccccagaccaattgtatcataatgagttggacacctccgctgaatccaaacatcgtcgtgaggggatacattatcggctatggagtcgggtccccctacgctgagaccgtgcgagtggattccaaacagcggtactacagtattgagaggctagaatctagcagccactacgtgatttcactgaaggccttcaacaatgccggtgagggtgtgcccctttatgagtccgcaacaaccaggtcaataaccgtgcggaggcataacattagcaaactgcactccaaccggcctcaaacaaagcataatgtctag

SEQ ID NO: 28325 - DNA, 2694 bp, synthetic construct
  misc_feature 1..2694: note = Description of Artificial Sequence: Synthetic coding sequence
  source 1..2694: mol_type = other DNA
atgggcgacaccgtgttactcaagtgcgaggtgatcggggagccaatgcctacaattcattggcaaaagaatcaacaggatctgactccgatccctggcgacagcagagtggtcgtgctgccatccggcgcactccagatctctagacttcagcccggtgacatcgggatctatcgttgcagtgccaggaatcctgcaagctcccgcactgggaacgaggcggaggtgcgcattctcagcgatcctggactgcaccggcagctgtactttctgcagcgaccgtcgaatgtggtggcaattgagggtaaagatgccgtgcttgaatgctgtgtatcaggctacccacctccttcatttacatggctgagaggggaagaagtaatccagttgcgttccaaaaagtattctcttctcggcggttctaaccttctgattagcaacgtcacagacgacgactccggcatgtatacctgcgtggtgacttacaagaatgagaatatttctgcgagtgctgagctgacagtgctagtgccgccatggttcctgaaccacccttccaacctttatgcctacgagagcatggatatagagtttgagtgcaccgtctccggaaagcctgtccccaccgtgaactggatgaaaaatggtgatgttgtcatcccttctgattactttcagatagtcggagggagtaatctgcggatcctaggagtggttaaaagcgatgagggcttctaccagtgcgtggccgagaatgaagctggcaatgcacagacgagtgcacaactcatagtccccaagcctgctattcccagcagctccgtcctgcccagcgcacctcgggacgtggttccagtgctcgtgagttccaggttcgtgagattgagttggagaccaccagccgaagctaaagggaatatccagacctttacagtttttttttctcgcgaaggggataatagagagcgcgctctgaataccacacagccagggtctctccaactcaccgtcggaaacctgaaaccggaagccatgtatacattcagagtggtagcgtataacgaatggggacctggggagtccagccagcctatcaaagtggccacccagcctgagttgcaggtgcccggaccagtcgaaaacctacaagctgtgtccaccagtcccaccagtattctgatcacctgggaacctcctgcatacgcaaatggacccgtacagggctaccgattgttttgcactgaggttagcacaggcaaggagcagaacatagaggtcgatggtctgtcatacaaactcgagggtctgaaaaagttcactgagtattctttaaggtttcttgcctataaccgatatggtcctggggtaagtaccgacgatatcacggttgttactttaagcgacgtgccctccgctcctccccagaacgtgtcactggaagtggtgaattctagatccattaaggtctcctggctgcccccaccctccgggacgcaaaacggattcattactggatacaaaattcgacataggaaaaccacaagacgtggagaaatggaaacactggagcctaataatttgtggtacctgttcactggattagagaaagggagtcagtattcattccaagtgagtgctatgactgtgaacggcaccgggcctccctcaaattggtacaccgccgagacaccagaaaatgaccttgatgaaagccaggtaccagaccaacctagcagcttacacgtccggccacagactaattgcattataatgagttggacaccaccactaaatcccaatatcgtagttaggggctacatcattgggtacggagttggttctccttacgctgagacagtgagggtggactccaagcagagatactatagcatcgagaggctcgaatcctcttctcactacgtgatctctctgaaggcttttaataacgccggtgagggagtccctctgtatgagtcagctacaacacgcagcataacagacctctcaacccctatgctccctcctgtcggcgtccaggctgtcgcactcactcacgacgcagtccgagtgtcttgggcagataacagcgtgccgaaaaaccagaaaacctccgaagtcagattgtacaccgtccggtggagaacctccttctccgcttccgccaagtataagagcgaagacaccacaagcctgtcttataccgccaccggactcaagccaaatactatgtatgagtttagtgtcatggtgacaaaaaatcgacggtcctcgacctggagcatgacagcccatgccactacttacgaggccgctcccacctcagcaccgaaggacttgacagtcataactagagaaggtaagcccagggctgtgatcgtgtcatggcaacctcctttagaggccaacgggaaaatcaccgcgtacatacttttctacaccttggacaagaacattcccattgatgattggatcatggagaccatttccggcgaccggctgactcaccagattatggacttaaacctcgatacaatgtattactttcggatccaagctcgcaacagcaagggggtgggacccctcagcgatcccattttgttccggactctcaaggtcgaacacccagataagatggccaacgaccaggacactggtgtcaccatcaatctggtgaacgaggtattgcttggctag

SEQ ID NO: 28326 - DNA, 4343 bp, synthetic construct
  misc_feature 1..4343: note = Description of Artificial Sequence: Synthetic coding sequence
  source 1..4343: mol_type = other DNA
atggaaaacagcctgaggtgcgtctgggtgccaaaattggcctttgttttgtttggggctagcctgttcagcgcacatcttcaagtgaccggattccaaatcaaagcattcaccgcgctacggttccttagcgaacccagcgacgccgtgaccatgcgaggcggtaacgtgctgcttgattgctctgcagagtcagaccgaggagtgcccgtgatcaaatggaagaaggacgggattcacctggcccttggaatggacgaaaggaagcagcagctttcaaatggtagcctgctgatccagaatatactacattctcgccaccataaacctgatgaaggtctctatcaatgcgaagccagtttgggggactccggatctattatttcccgcacagcaaaagttgctgtcgcgggtccactgcgctttctcagtcagaccgagtccgtgaccgcctttatgggagataccgtgctgttgaagtgtgaggtgattggtgagcctatgccaaccattcactggcagaagaatcagcaagatcttactcccatccccggagattcccgtgtggtcgttctgcctagtggagctctccagatatcaagactccagcccggtgacatcgggatctatcgctgtagtgctagaaatccagcctcttcccgtactggaaacgaggccgaggtgagaatcttatccgatcctggactccataggcaactgtattttctacagagaccttccaacgtggtcgccattgagggtaaagacgctgttctggagtgttgtgtctccggctacccccctccttcatttacctggctgcggggagaagaagtgatccagctgaggtctaaaaaatacagcctgttggggggttcgaatctgctgatatcgaacgtgacagacgacgactctggaatgtacacttgcgtggtgacttacaagaacgagaacattagtgctagtgccgagctaaccgttctggttccaccctggttcctgaatcaccctagcaatctctacgcttatgagtccatggacatcgagttcgagtgcaccgtgagcggcaaaccggtcccaaccgtaaattggatgaagaatggggatgtggtgatcccctctgattactttcagatcgtcggaggatctaacctgcgcatattgggagtagtgaaatccgacgaaggtttctaccagtgcgtggcagagaacgaagccggaaacgcacagacctcagcacagctcattgtacctaagccagcgatcccttctagctcagtgctccctagcgcaccccgtgacgtagtccccgtgctggtgagcagtaggtttgtcaggctgtcgtggcgacctcccgctgaagccaagggtaatatccagaccttcaccgtatttttttctcgggagggggacaacagagagagagctcttaataccacacaacccggtagccttcaactgactgtcggcaatctgaaacccgaagctatgtacacatttagggtagtggcctataacgaatggggcccaggagagagttctcagccgatcaaagtggctacccagccggagttacaggtgccagggccagtcgaaaacctgcaggctgtgtcaacaagccctaccagcatccttattacatgggagccacccgcatatgctaacggacccgtgcaggggtatcgcctgttctgtaccgaggtttctaccggaaaggaacaaaacattgaagtggacggcctgtcctacaaactggaggggcttaagaagtttaccgagtacagccttcgcttcctggcttataatcgctacggacctggcgtgagcaccgatgacatcacagtcgtgactctgtctgacgtgccatcagcacctccacagaacgtgtcactggaggttgtcaattcaaggtcaattaaggtgtcttggcttcctccgccatccgggacccagaatggctttattaccggctacaagataagacaccgcaagactacgcgtaggggggagatggagacactagagcctaataatctgtggtatttattcacgggactggaaaagggctctcagtacagttttcaagtttcagcaatgactgttaatgggactgggcctcccagtaattggtatacagcggaaacacctgagaacgatctggatgagtctcaggtgcctgatcagcctagctctctgcacgtgaggccccagaccaactgcattattatgtcttggactcccccattaaacccaaatattgtggtgcgaggctacattatcggatatggggtgggatctccatatgccgagaccgtcagagtggatagcaaacaaagatactatagcattgagcgtctggaatcgtccagtcattacgtcatctcattgaaagcattcaataacgccggagaaggtgtgccactttacgagagtgctacaacacgctctataaccgaccctacggatccagtagactattaccccttattggacgactttcccactagtgttcccgatcttagcacccccatgctccctccagtgggcgtacaagcagtggctctgacgcacgacgccgtcagggttagttgggctgataattcagtgcctaagaatcagaagacatcagaggtacgactctacactgtccggtggaggactagtttctccgcaagtgcaaaatacaaatcagaagacacaacctctttatcgtacaccgctacggggctgaagcctaacacaatgtatgagttttctgtaatggtgactaagaaccgccgatcttctacttggtctatgactgcgcacgccaccacatatgaggctgcaccaacttccgcaccaaaagacctcaccgtgatcacacgggagggcaaaccgcgagccgtcatcgtctcttggcagcctccgctggaggccaacgggaaaataactgcttacatcctgttttacacactggataagaatatccctatagatgattggatcatggaaactatctctggagatcggcttacacatcaaatcatggacctaaacctagacacaatgtactacttccgcatccaggccagaaactccaagggggtggggccactgtcggacccaattctgttcagaactttaaaggtggaacaccccgataagatggccaacgaccagggaagacatggagacgggggatactggccagtggacaccaacctgatcgatcggtccactcttaatgagccaccgattggccaaatgcatcccccacacggttccgtcactccgcaaaaaaactcaaacctgctcgtgataatcgtagtgacggttggggttatcacggtccttgtcgttgttatcgtggcagtcatctgcactaggaggagtagtgcccagcagagaaaaaaaagagccacacacagcgctggcaaacgcaaaggctcgcagaaggatctgcgaccacctgacctgtggattcaccatgaagagatggagatgaaaaatatcgaaaagccctcaggaaccgacccggctgggagagattcccccattcagagctgtcaggatctaacccccgtgagccattcccagtcggagacacagctgggaagtaagtctactagccatagcggacaagataccgaggaagcaggatccagtatgagtaccctggagaggtcactggcagcaagacgtgccccacgggctaagctcatgataccgatggacgcacagagtaacaatcccgcagtggtctccgctattccagtgccaactctggaaagtgcccagtaccctggcattctcccttctcctacttgtgggtatccccatccacagtttactctcagaccggtcccttttcccactttaagcgtcgatcggggattcggcgcaggacgatctcagtcagtgtccgaaggtccgacaactcagcagccacctatgctgcctccatctcagccggaacattcttcctccgaagaagcaccttcccgtacgattcccacggcttgtgtgcgccctactcaccctttacggtccttcgctaatccgctgctgcctcccccaatgagcgccatcgagccaaaagtgccgtacactccgctgctgtctcagccgggaccgacgttgcccaagacacacgtgaaaactgcctccctgggcctggccggaaaggcgaggagccctctcctgccagtcagcgtgcccaccgctcctgaagtcagcgaggagagtcataaaccgaccgaggattcagcgaatgtttacgaacaggacgacctgtctgaacagatggcaagcctcgaaggcctgatgaagcaattaaacgcaatcacaggttccgcatttta

SEQ ID NO: 28327 - DNA, 213 bp, synthetic construct
  misc_feature 1..213: note = Description of Artificial Sequence: Synthetic coding sequence
  source 1..213: mol_type = other DNA
atgacaatgaacgtcctcgaggccggtaagtggaagtcgattgtacctgcgcctggagagggtctgctggctgtcctgcacatgatggtattcacagacgctctgcacagagaacggagtgtgaaatggcaggcaggcgtctgttacaacggtggcaaggactttgccgtttcgttagctcgccctaaagccgctgaaggtattgccgattag

SEQ ID NO: 28328 - DNA, 1392 bp, synthetic construct
  misc_feature 1..1392: note = Description of Artificial Sequence: Synthetic coding sequence
  source 1..1392: mol_type = other DNA
atgagcgtggccattaggaagagatcatgggaggagcatgtcactcactggatgggacagccatttaactccgacgaccgcaataccgcgtgtcaccacggcctagtggctgattcactgcaggcctctatggagaaggatgctactctgaacgtggatcgaaaagagaaatgcgtttccctgccagactgttgccacggatccgaattaagagattttcccggtagacccatggggcacctgtccaaggatgtggatgagaacgatagccatgaaggtgaggaccagtttctctctctagaagcaagtactgaaacgctggtgcacgtgtcagatgaggataataatgccgacctgtgtctgacagacgacaaacaggtactgaatacacagggccagaaaacatctggacagcatatgatccaaggagcagggtcacttgagaaagccttacctattatacaatccaatcaggtgtcatccaactcctggggcatcgccggagagacagaactggctttagtgaaagaatccggggagcgcaaggtgactgactctatatccaagtccttggagctctgcaatgagattagcctgtcagagatcaaagatgccccaaaagtgaacgcagtggacacactcaatgttaaggacatagcacccgagaaacaactgctcaacagcgccgtgattgctcaacaacgtcggaaacctgatccaccaaaggacgaaaacgagcggtccacttgtaacgtcgtgcaaaacgagtttcttgacaccccctgtaccaatagaggcctacccctgctgaagactgatttcggttcctgccttttgcagcctcctagctgccctaatggcatgtccgcagaaaacggactagagaagtctggattcagccagcatcagaataagagcccacccaaggtcaaggcagaggacgggatgcagtgcttgcaactcaaggaaacgctcgccacccaggaacctaccgacaaccaagtcagactgcggaaacggaaagaaataagggaggatcgagaccgagcgagactggactctatggtgctcctgataatgaagttggaccagctggatcaagatatagagaatgctctgtccacctccagcagtccaagtggcacaccaaccaaccttcgacgccatgttccagacctggagagcgggagcgagagtggggctgacactatcagcgtcaatcagacacgcgttaatctgagctccgataccgaatcaacggatctaccaagctctaccccagtggcaaactccggtaccaagcccaagaccaccgccattcaaggtatatccgaaaaagagaaagctggcaaactcacattctggttttgtttcttggccaatttgttctag

SEQ ID NO: 28329 - DNA, 5267 bp, synthetic construct
  misc_feature 1..5267: note = Description of Artificial Sequence: Synthetic coding sequence
  source 1..5267: mol_type = other DNA
atggagactcgctctagcaagacccgcagatctctggcctcccggacgaatgaatgtcagggaaccatgtgggcccctaccagtccacccgctggctcttctagccccagtcagccaacctggaagtctagcctctactcgagtctggcttattctgaagcattccattattccttcgccgctcgccctcgtaggttgacccagttggcactggctcaaaggccagagccacagctcctgcgcctgcgcccttcatcgcttcggactcaagatatcagccacctgctcactggagtgttccgcaatttgtacagtgctgaggtgattggcgacgaagtgagtgccagcctcatcaaagccaggggcagcgaaaacgaacggcacgaggaatttgtggaccagctgcagcagattcgggaactctacaagcaacgcctggatgagtttgaaatgctggaacgccatatcacacaggcccaagctcgggctatagcagagaacgaaagggtgatgtcccaggcaggagtgcaggatctggaatcactagtgcggctccctcccgttaaaagcgtgtcacggtggtgcatcgactccgagctgctaaggaagcaccacctgatctctccagaagactactacacggacactgtgccgttccattctgcccctaagggcatatctcttcctggatgttccaaactgacctttagctgcgaaaaacggtctgtgcagaagaaagagctgaacaaaaaattagaagacagttgccgtaaaaaactggctgaattcgaggacgaattggatcacaccgttgacagtttaacctggaacctaactcccaaggccaaggaaaggaccagggagccactcaagaaggcttcacaaccgaggaataaaaactggatgaaccaccttagagtgccccaacgagagttggaccggcttctgctggccagaatggagtcaagaaatcacttcctgaaaaatcccaggttcttcccccctaacactcgctacggtgggaaatccttagttttcccaccaaagaaaccagcccctatcggggagttccaatctacggagcccgaacagtcatgtgccgacacaccggtctttctggcgaaaccgcctattgggttttttactgactatgaaataggccctgtgtacgaaatggtcatagctctgcagaacacgaccactaccagccgatatttacgtgtcttaccaccctccactccttactttgctctgggtctgggtatgtttcccggaaaaggcggaatggtcgcgccaggtatgacctgccagtatatcgtccagttttttcccgattgtcttggcgacttcgatgattttattctggtggaaacccaaagtgcgcatacgctgctgatccccttgcaggctaggaggcctcctcccgtcttgaccctgagtcccgtgttagattgcggatattgcctgataggaggcgtgaaaatgacccgcttcatttgcaagaatgtcggatttagcgtgggtcggttctgcattatgcctaaaaccagctggcctcctctcagctttaaagcaatcgcaacagttggctttgtggaacagcctcctttcggaatcttgcccagcgtttttgagctcgctccaggccacgccatcttggtagaggtcttgttcagcccaaaatctctcggtaaagctgaacagacattcatcattatgtgcgacaactgccaaatcaaagaactcgtgaccatcggcatcggccagttaattgctttggatctcatctacatcagtggtgagaagtcgcagcctgatcctggagagttaacggaccttacagctcagcactttatccgatttgagcccgaaaacttgcggtccacagccagaaaacaactgattatcagaaatgcaactcacgtggaactcgctttttactggcagatcatgaaaccaaatctgcagcctcttatgccaggggagacattctcaatggactccataaagtgttaccctgataaggagactgcattttcgatcatgcccaggaagggcgtgctttcccctcataccgatcatgaatttatactatctttttcgccccatgagttaagggacttccactccgtcctccagatggtattagaggaggtgccggagcctgtctcatcagaggcagaaagcctcgggcattctagctatagtgtggacgacgtgatcgtacttgaaattgaagtcaagggcagtgtcgaacctttccaggtcttgcttgagccatacgcacttatcatcccaggagagaactacatcggaatcaatgtcaagaaagcctttaagatgtggaacaacagcaagtctccaatccgatatctgtggggaaaaataagtgactgccacattatcgaggtcgagccaggcaccggcgtgattgaaccgtccgaagtcggggacttcgagctcaacttcaccggcggtgtcccaggtccaacatcccaggatcttctctgcgagattgaggattctccctcccccgtagtcctgcatatcgaggctgttttcaaaggcccagccttgattattaacgtgagtgcgctccagtttggactgttgagacttggtcaaaaagccacaaatagtattcagattcgcaacgtttcccagctccccgctacttggagaatgaaagagagccctgtgagtctgcaagagcgcccagaagacgtgtcaccattcgacatagagccatcaagcggtcagttacactccctcggcgagtgccgcgtggacattacactggaggcactacactgtcagcatctggagaccgtcctggagctcgaagtggagaacggagcgtggtcctacttgcccgtgtacgccgaagtccaaaaacctcacgtgtacctccaatcaagtcaagtcgaagtacgcaacctctatctgggcgttcccaccaaaacaacaatcacattgattaacggtacactcttacctacacagttccattggggaaaactgttgggccaccaggctgaattctgcatggtgaccgtgtcccctaagcatggccttctgggaccaagtgaggaatgccagctaaagctcgagctcacagcacatacccaagaagagctcacccacctggctctgccatgccatgtgagtggaatgaagaagccattggtcctgggcatctcaggaaagcctcaggggctgcaggtggcgattacaatctccaaggaatctagtgattgcagcaccgaacagtggcctggccatccaaaagagctcagattagattttggttcggccgtgccactcaggactcgggtcactcgacagctgatcctgaccaacagatctcctatcaggacacggttctctctgaagttcgaatatttcggatctccccagaacagcctgtctaaaaagaccagcctgcccaatatgccacccgctttattgaagactgtgcgaatgcaagaacatctggctaaacgggaacaactggatttcatggaaagcatgttgagtcacgggaaaggcgctgcttttttcccccattttagccagggtatgctcgggccttatcagcagctgtgtatcgacattaccgggtgtgccaatatgtggggagaatactgggacaatcttatatgcactgtgggcgatctactacccgaggtcatcccagtgcacatggcggctgtgggatgccctatttcgagcttaaggacaacgagctacaccatcgatcaagcacagaaagaacccgcaatgcgctttggaacccaggttagtggcggtgataccgtgacacgcaccttgcggctcaataattccagcccatgcgacattcgactcgattgggagacctacgtgcctgaggacaaggaagatagactcgtcgagctgctggttttttacggcccaccttttcctctgcgagaccaagctggtaacgagcttgtatgcccagacacacccgaaggagggtgtctcttgtggagcccgggaccgagcagctcttccgagttttctcatgaaaccgacagctctgttgaggggtcctcttcagcctcaaaccgcgttgctcaaaagttgatctccgtgattcttcaggcacatgagggagtgccaagtggccatttatactgcatttctcctaagcaagtcgtcgtgcctgccggagggtcctctaccatatatataagctttacccccatggtccttagcccggaaatcctgcacaaagttgaatgcaccggttatgccctcggtttcatgagcctggactccaaagtcgaaagagagattcccggaaaacggcaccggctacaggactttgcagtcgggcctctgaagctggatttacacagctacgtcagacctgctcagttaagcgttgagctggattatgggggttcaatggaatttcagtgccaagccagcgacctcatcccggagcaaccttgctccggggttttatccgagctggtgaccacccatcacttaaagctcacgaacacaaccgagatacctcactattttagactcatggtctctagaccgtttagcgttagccaggatggcgcatcccaggatcatagggccccaggcccaggtcaaaagcaggagtgtgaggaagaaactgcaagtgccgacaagcagctcgtactgcaggctcaagaaaatatgctggtgaatgtgtctttttcactgagccttgagttgcttagctaccagaaactgccggctgaccagacactgcccggagtggacatccagcagtcggctagtggggagcgggagatggtcttcacacagaatctgctgctggagtataccaatcagacaacacaagtggtgcctctgcgggcagtggttgcagtgccagagctgcaactgtcaaccagttgggtggatttcggtacatgctttgtttcccagcaacgggtcagagaggtgtatctgatgaacctatcgggctgcaggtcttactggacaatgctcatgggccaacaggagccagccaaggcggctgtggcgttcagggtaagccccaactccggcttactagaggccaggtcagccaacgcgcctccgactagtattgctctgcaggtcttctttaccgcacgcagttcggagctgtatgagtctaccatggtggtggagggcgttctcggtgagaaaagctgtacactccggcttcgcggacaaggcagctatgatgagaggtacatgctcccccatcaaccata

SEQ ID NO: 28330 - DNA, 5336 bp, synthetic construct
  misc_feature 1..5336: note = Description of Artificial Sequence: Synthetic coding sequence
  source 1..5336: mol_type = other DNA
atggagacacgatccagtaagacacgcaggtcactcgccagtaggactaacgagtgtcagggcaccatgtgggcgccaacaagtcctcccgcaggcagttccagtcctagccagcccacttggaaaagctctctctactccagcctggcttactccgaagcttttcactactctttcgcggctcggcctagacgcctaacccagctggccctggcccagagacccgaaccacagctgttacgactgcgcccttccagcctcaggacgcaggacatcagccatttactgaccggcgtgtttcggaacctctattccgccgaagtcatcggagatgaggtctccgcgtcattaatcaaagcgagaggatcggagaacgaaagacatgaagaatttgtggatcagctgcagcaaatacgcgaattatataaacagcgtctggatgagtttgaaatgttggagcgccatatcactcaggctcaggcgagggcaattgctgaaaatgaaagggtcatgtcccaggctggcgtgcaggatttagaatcactagttagactccccccagtgaaatccgtgtcacgctggtgtatcgactcagaacttttgcgaaaacatcacctcattagcccggaagattactacactgatacagttccttttcactctgcccctaaagggatctctctgcccggatgcagcaagctgaccttcagctgtgagaagaggtccgtccagaaaaaggagttgaataagaagctggaggatagctgcaggaaaaagctggcggaattcgaagacgaactggaccataccgtggacagccttacttggaacctgacaccgaaagccaaagaacggacacgcgaacccttgaaaaaggcgtcccagccaagaaataagaactggatgaaccacctccgggtgcctcagcgtgaattggaccgcttattactcgccagaatggagtcaagaaatcactttttgaaaaaccctcggttctttccacccaacacgagatacggaggaaagtcattagtgtttccgcctaagaaacctgcccctattggtgagtttcagtccaccgaacctgagcagagctgcgccgacacaccagtttttctggctaagcctccaataggcttttttacagactacgagattggccctgtttacgaaatggtcatagccttacaaaatacaactacaacgtcccgatacttacgggtgctacccccaagcacgccctactttgccctggggctcgggatgttcccagggaaagggggaatggtggcgcctggcatgacttgccagtacattgtgcagttcttccccgactgtctgggtgactttgacgactttattttagtggagacccagagcgcacacacacttctgattccattacaggctcgtcggcctcctccagtcctcaccctgtcccctgttctcgactgcgggtattgcctcatcggtggcgtgaagatgactagatttatctgcaaaaacgttggctttagtgtaggcagattctgtatcatgcccaaaacctcatggccccctctttcttttaaggcaatagccaccgtgggctttgtggagcagccacccttcggtattttgccgagcgttttcgagttagctcctgggcacgccattctggtcgaggtcctctttagccccaaatcacttggcaaagccgaacagactttcatcattatgtgtgataactgtcaaataaaggagctggtgacaatcgggatcggacaattaattgccctggatctgatatatatctcaggcgaaaaatctcagccagatcctggggagctcactgatctaactgcccagcattttatcaggtttgagcctgaaaacctcaggtcaacagctcggaagcaactcatcataagaaatgctacccacgtggagttggcgttctactggcagatcatgaagcctaacctgcaaccactgatgcctggtgaaaccttctccatggattctattaaatgttacccagataaagaaacagccttttcaataatgccgagaaagggtgtgctgtccccccacaccgatcacgagtttatactgtccttttcacctcatgagctaagggactttcatagcgtgctccagatggttctcgaggaggtcccagagccggtatcctccgaagccgaaagtctcgggcactcctcttactctgtggacgacgtgattgtactcgagatagaggtcaaaggtagtgtggagccttttcaggtcctgctggagccttacgccctcatcatccccggtgaaaattacattggcattaacgtgaaaaaagctttcaagatgtggaataattccaagtcccccattagatatctgtggggcaagatcagtgactgccatattattgaggtggagcctggcaccggggtcattgagccttcggaggtgggggattttgagctcaattttactgggggagttccgggaccaacgagtcaagacttgctctgcgagattgaagattctccttcccccgtggtcctccatattgaggcagtctttaaaggccctgccttgatcatcaacgtgagcgcactgcaattcggattgttgagacttggccagaaagcgactaattctattcagattagaaacgtttcccagttgccagccacgtggaggatgaaagagtcccccgtgtcgctccaagaacggcctgaagatgtcagccctttcgatattgagccatcctcggggcagctccactcccttggggaatgccgggtggacataaccctcgaggccttgcactgtcaacatctcgaaacagtgcttgaacttgaggttgagaatggtgcatggtcctaccttcctgtgtatgccgaggtacagaaaccccatgtctacttacagtcttcccaagtggaggtcagaaacttgtatctgggcgtgccaactaagacgactatcaccttgataaacggcactttgctccccacccagtttcactggggaaagctgttgggccatcaagccgagttctgcatggtcaccgtgtctccaaagcatggcctcttgggcccaagcgaagagtgccaactgaagctggaactaacagcacacacccaggaagaactgacccacctggccctgccatgtcatgtgagcggtatgaaaaagcctctggtcctgggtatctcaggcaagcctcagggactgcaggttgcaattaccatatcaaaagaatcctcagattgcagcacagagcaatggccaggccacccgaaggaactgagactggacttcggatccgctgtacccctgaggacacgcgtcaccaggcagcttattttgacaaacagaagtcctattcggacgagattttcacttaagttcgagtattttgggagcccacagaacagcctcagtaagaaaacgagtctgcccaacatgccaccggctctcctgaagaccgtgcggatgcaggagcacctcgccaaacgcgaacagctggattttatggagtcgatgctgtcccacggtaaaggcgctgccttcttcccgcatttcagccagggtatgttagggccttatcagcagctgtgcattgatatcacggggtgtgccaacatgtggggtgaatactgggataaccttatttgtaccgtgggcgatttactgcctgaagtaatccccgtgcatatggccgcagtgggctgtccaatcagtagcctgcgaacaacctcctatactatcgatcaggcccagaaggaacccgcaatgagattcggtacccaagtatctggaggcgatacagtaacgagaacactgaggttgaataactcatccccgtgtgatatacgcctcgactgggagacatatgtcccggaagacaaggaggaccggctagttgagctactggttttttatggtcctccgtttcccctgcgcgatcaggcgggaaatgagctggtgtgccctgacacgcccgaaggcggatgtctattgtggtcacctggcccttcctcttcatccgagttttcccacgaaacggactccagtgtggagggctcctcctctgcttctaatagggttgctcagaagctgattagtgtgatcttgcaggcacatgagggggtcccgtccgggcatctgtactgtatttctcctaagcaggttgtcgtgccggcaggcggaagctccaccatttacatcagtttcacgcccatggtcctgagccccgagattcttcacaaagtcgaatgtactggctacgcgcttgggtttatgtccttagattctaaagtggaacgcgaaattccaggtaaacgccatcggttacaggactttgccgttggacccctcaagttggatcttcattcatatgtgcgcccagcacagctgtccgtggagctggattacggtggcagcatggagttccagtgtcaggcgtccgacctcattcccgagcagccctgttctggcgttttgtcagaattggtaaccacgcatcatctcaagctcacgaacaccactgaaattcctcactactttcggctcatggtctcgcggccttttagcgtgtctcaagatggcgcttcgcaggaccatcgggcacccggacccggtcagaaacaggaatgtgaggaagagacagcttccgcagacaagcagctcgttttgcaggcccaagagaatatgctggtgaatgtctctttcagtctctccttggagcttctatcctatcagaagctcccagcagatcagactctgccaggcgtggacatacagcagtctgccagcggagaaagggagatggtgtttacacagaacctgttgctcgagtatactaatcaaaccacgcaagttgtgccactgagggctgtcgttgctgtacccgagctgcagctgagtacgagctgggtcgatttcggcacttgctttgtgtctcagcagagagtacgtgaggtatatctgatgaacctgagcgggtgtcgcagttactggactatgctgatgggagtcgtctcgtgcaccagcccacggtggtggtggaaggtgtgttcggtacggtcacctgcaccatgtggttccggggcaaaagccccaatgatgagggacacttgctgcctcacaagccccgaggctcccccacagccgtctgcccctggtccgtcctggcgcaaaaatattgcccagggtctcggcgcagcccttcagcataaagacaccgatcttggaacttggggtcccctcggatcctcctggaatggtaggactcctttccacaatggattgtcactggggcctcacgacatgtccagtgaactgacgta

SEQ ID NO: 28331 - DNA, 5276 bp, synthetic construct
  misc_feature 1..5276: note = Description of Artificial Sequence: Synthetic coding sequence
  source 1..5276: mol_type = other DNA
atggagacacgatcctctaagactcgccgatcactcgcgtcccgaactaacgagtgtcaggggacaatgtgggcacctacttctccgcctgccggatcatctagcccttcgcagccgacctggaaatcctccctgtactcttcactggcttactctgaggcgtttcattatagtttcgcagccagaccccgaagacttactcagctggcgttggcgcagaggcccgaaccacagctccttcgtctgcgcccttcttctttgcgaactcaggacatcagccacctgctaactggggtgtttcgcaacctgtattccgcagaagttataggtgatgaagtttcagcttccctgatcaaagctagaggctcagaaaacgaacgtcacgaggaatttgttgaccagctccagcagattagagagctgtacaagcagcggttagatgaattcgagatgctggaaagacacattacccaagcacaggccagggctatcgcggaaaacgaaagggtcatgtcacaagcaggcgtgcaggatctcgaaagcctggtgaggctcccaccagtaaaatcggtatcccggtggtgtatagacagtgaactgctgcgcaaacaccacctaatctcccccgaggattactacacagatactgtgcccttccacagcgctcccaaaggcatttccctacccggatgttctaagttgacatttagttgcgagaagagaagtgtacagaagaaggaactcaataaaaagctggaggattcatgcagaaagaaactggccgaattcgaggatgaactagaccacacggtggattcgctgacgtggaacctgacacccaaggccaaggagcggacaagggaaccgctcaaaaaggcctcacaaccacgaaacaaaaattggatgaaccacctgcgcgtcccacaaagagagcttgatagactgctcctcgctcggatggagtccagaaatcactttctgaagaatcctcgctttttccctccaaacaccagatatggcggaaaaagcctagttttccctcccaagaaaccggctcctatcggtgaattccagagcacggagcctgaacagagttgcgctgatacccccgtattcttagctaaaccaccaattggattcttcacagactatgagataggcccagtgtacgagatggtcatcgccctgcagaacactaccacgaccagccgctacctgagggtactaccgccatccacaccatactttgctctgggcttaggaatgtttcctgggaaaggagggatggtggcccctggtatgacctgtcagtacatagtccagtttttccccgactgcttaggagattttgatgattttattctggtcgagactcagagtgcgcacacactgctcatacctttgcaggctcggcgtcccccacccgtgctcactctgtccccagtgctggattgtgggtattgcctgataggcggagtgaaaatgactaggtttatctgcaaaaatgttggcttttctgtcggccgtttctgcatcatgccaaagactagctggccgcctttatcatttaaagcaatcgccacggttggattcgtggagcagccaccatttggcattctaccatctgtttttgagctcgcgccaggacacgcaatactagtggaggtgttgttcagcccaaagtctttggggaaggcagaacagacgttcatcatcatgtgcgacaactgccaaattaaggagctggttacaattggtattggacagctgatcgccttggatctcatctacattagcggcgaaaagagccaacctgacccaggtgaattgaccgacttgacagcccagcattttataagattcgaacccgaaaacttgaggtctaccgcacgcaagcaactgataataagaaacgccacacacgtggaattagccttttattggcagattatgaagcccaatctgcagccactgatgcccggtgagactttttctatggactcaatcaagtgttatccggacaaagaaacagcattctcaattatgccaagaaaaggagtacttagtccgcatacggaccacgaatttatcctttccttcagtccccacgagctgcgcgatttccactccgttttacagatggtcctagaggaggttcccgaacctgtgtcctcagaagctgaatccctggggcacagctcctacagcgtagatgatgtgatcgtactggaaatcgaggtgaagggtagtgtcgagcctttccaggtgctcttggagccctacgccttgatcatccccggtgaaaactatattgggatcaatgtgaaaaaggcttttaaaatgtggaataactccaaaagcccgataaggtacctctggggaaaaatctcagattgtcatattatcgaggtcgagccgggaactggggtgatcgaaccatccgaagtcggcgatttcgaactgaactttactggcggagtcccaggacctacatcccaagacctgctgtgcgaaatcgaagatagcccctcgcccgttgttctccatatagaggccgtcttcaagggccctgccctgatcattaatgtcagtgctctgcagttcgggctgctccgcttgggccagaaagccaccaactccattcagattcgaaatgtcagtcagctgccagcaacatggcgaatgaaggaatcacccgtgtccctgcaagaaaggcctgaggatgtatcccctttcgacatcgaaccttcatctgggcaactccactctctgggcgaatgtcgtgtagacattactttggaggcactgcactgccagcaccttgaaacagtgctggagttggaggttgagaatggggcatggtcctacttgcccgtgtatgcagaggtacagaaaccccatgtgtatctgcagagtagtcaggtggaagtgagaaatctatacctcggggtccccaccaagacgacaattacgcttatcaacggaaccctgcttccaacccagttccactggggcaaattacttggacaccaggcggagttctgtatggtgacagtctctccaaaacatggcttattgggtccttcagaggaatgtcagctcaaactggagcttacagcacatacgcaggaagaattaacccacctcgcactgccttgccacgtttcgggtatgaagaaaccacttgtgttggggatcagtggcaaaccccaaggcctgcaagtcgccatcacaatatcgaaagagtcgtctgattgttcagtattttctacagagcagtggccagggcacccaaaagagctgagactcgatttcggctccgccgtcccacttcgaacccgggtcacccgccagttgatattaactaacagatcgccgatcagaactcgattctcactaaaatttgaatattttggcagcccacagaactctctttccaaaaagactagcctccctaacatgccccctgctctcctgaagactgtgaggatgcaggagcacctggccaagagagagcagttagatttcatggagtccatgctgagtcacggcaaaggagcagcattcttcccccacttctcacaagggatgctcggcccttaccagcagctttgcatcgatattactgggtgtgctaacatgtggggtgaatattgggataacctgatctgtacggttggagacctcctgcctgaggtgatccccgttcacatggcggcagtgggttgccctatctcctcactacgcacaacctcttacaccatcgatcaggctcagaaagagccagctatgcgtttcggaactcaggtgagcggaggcgatacagttacgcgcaccctgaggttaaataatagcagcccatgtgacatccggctggactgggagacctacgtcccagaggacaaggaagacagactggtcgaactacttgttttctacggacccccattcccccttagggatcaggctggcaatgagctagtgtgtccggacactcccgaaggtggttgtctgctgtggtctcctggtccatcctcttccagtgagtttagccacgagactgatagctccgtagaaggcagtagcagtgcatctaatcgggtagcacagaagcttatctctgtgattctgcaggctcacgaaggagtgccctcaggacatctctattgcatttcaccgaagcaggttgtcgttcccgcaggaggctctagcacgatttacatctccttcacgccaatggtgttgagccccgaaatcttgcacaaggtagaatgtacaggatacgctttaggctttatgtcactcgattccaaagtcgaacgggagatccctgggaagcgccatcgcttacaggattttgccgttggtcctctcaaattggacctgcacagctacgtcagaccagctcagctgtcagtggagctcgattatggtggatccatggagttccagtgtcaggcttctgacctgatccctgagcagccttgtagcggcgtcctctccgaacttgtcaccacgcaccatttaaagttgacaaacacaacggagatccctcattactttcgcctgatggtgagcagaccctttagtgtgagccaggacggcgcaagtcaggatcacagggcgccaggtccgggacagaagcaggagtgcgaggaagaaacagcaagtgctgataagcagttggtgctccaggcacaagagaacatgctggtgaatgtctccttctcactttcactggaacttctgagctaccagaagcttcccgctgatcagacgctgcccggagtggatattcagcagtctgcctccggcgagcgcgaaatggtgtttactcaaaatctgctcctggagtacaccaaccaaaccacacaagtagtgcctttgcgggctgttgtggcggttccagagctgcagctttccacctcatgggttgactttggaacttgtttcgtctcccagcagagggtacgcgaagtttatctgatgaatctgtcaggctgccgcagctactggaccatgctcatggggcaacaagaacctgcgaaagcggctgtggcatttagagtgtcgcccaattcagggctcttggaggcacggtccgctaatgctcctcccacaagtatcgctctccaagtgttcttcaccgcccgatcatccgagctgtatgagagcacaatggtggttgagggcgtgctgggagaaaagagctgcaccttaaggctgagaggtcaaggcagctacgacgagcgttatatgttgcctcatcagcccta

SEQ ID NO: 28332 - DNA, 237 bp, synthetic construct
  misc_feature 1..237: note = Description of Artificial Sequence: Synthetic coding sequence
  source 1..237: mol_type = other DNA
atgcgcccttgcatatggattcatgttcatttgaagccaccatgtcgactggtcgagcttctcccattcagtagtgcgctgcaggggctgtcccacttgtcactggggacaactctgcccgttatactacccgagagaaacgaagaacagaacttacaggagctgagtcacaatgcagataaataccaaatgggcgattgttgcaaagaggagatcgacgactcaatcttttactag

SEQ ID NO: 28333 - DNA, 2940 bp, synthetic construct
  misc_feature 1..2940: note = Description of Artificial Sequence: Synthetic coding sequence
  source 1..2940: mol_type = other DNA
atgagaggttaccacggggaccgtggctctcatccacggccagcaaggtttgccgatcaacaacacatggacgttggacctgccgctagggcaccatatctcttgggatctagagaagccttcagcaccgagcctagattttgtgcgccacgggcaggtctaggccatatttcccccgagggtcctctgagcctgtcagaaggcccaagcgtaggtccagaggggggaccagcaggagccggagtggggggagggtcatccacgtttcctcggatgtaccccggacaagggccttttgatacttgtgaggactgtgtggggcacccacagggtaagggagctccaaggttacccccaaccctgttggatcagttcgagaagcaactacctgttcaacaggatggctttcatacacttccatatcaaaggggtcctgccggagcaggacccggacccgcacctggtacagggacagcaccggagccccgttccgaaagcccatcccggatccgtcacttggtacacagcgtgcagaagctgttcgccaagtcccatagcctcgaggctcccggtaaaagggactataatggccctaaagccgagggtcggggtggcagcggcggtgattcctacccaggcccaggctcaggcggtcctcacacatctcaccaccaccatcatcaccaccaccaccaccatcaccagtctcgccacggaaagcgatccaagtcaaaggaccggaagggcgacggacgacatcaggctaagagcaccgggtggtggagctctgacgacaacctcgattccgacagtggatttttggctggcggaaggcctcccggtgagcccggtggacctttctgtttggaagggccagatggttcctatagggacttaagttttaaaggtcgctctggcggttccgagggtaggtgcctcgcgtgcactgggatgtcaatgtcactagacgggcaatctgtaaaaaggagcgcttggcacaccatgatggtgagtcaggggcgagatggttatcctggggctggaccgggaaaaggtctccttgggcctgagacgaaggccaaagccaggacctaccattacctccaggtgccacaggacgactggggaggttaccccacaggtggcaaggacggtgaaatcccctgccgtcgcatgcggagcgggagctatataaaggccatgggggacgaagagagcggagatagcgacgggagccctaagacttctcccaaagcagtcgctcgtcgtttcaccacccggcgatcctcgtccgttgaccaggctaggattaactgctgcgtgcctccaaggatccatcccagaagctcaatcccagggtattctcgaagtctgacaaccggacagctgtctgatgagctgaatcaacagttggaggcggtctgcggcagtgtgtttggagagctcgagtctcaagctgtagatgcattagatttgcccggttgcttccgaatgaggtcccattcatatctgagagctatacaggcaggatgttcgcaggacgatgattgtctgccgctgttggccactcccgcagcggtcagtgggcgtcccggaagttccttcaacttccggaaagccccacctccaattccaccgggttcgcaggcacctcctaggatttccatcaccgctcagtcatccacagattccgcgcatgagtctttcactgccgctgaaggacccgctagaaggtgttcctccgccgatggactcgatggacctgccatgggtgctagaaccctcgagctggcgccagtgcccccaagggctagccctaaacctcctacgttaattattaaaacaatccccggaagggaagaactaaggagcctcgcccgacagaggaagtggagaccaagtattggagtgcaggtcgagacaatttccgactcagatacggaaaacagatccagacgggagttccacagtatcggcgtgcaggtagaagaagataagagacgcgcaagatttaagcgctccaatagcgttaccgctggggtgcaggccgatctcgagttggaaggcctcgccggactcgctaccgtcgccactgaggacaaagcactccaattcggcaggtcatttcagagacacgcttctgaaccccagcccggtcctcgcgcacctacatactccgtgtttcggactgtgcatacccagggtcagtgggcataccgcgagggatatccgctgccctatgaaccaccagccaccgacgggagccccggacctgcacccgctccaaccccaggtcccggagctggacggcgagattcttggattgaaagaggatctcggagccttccagatagtgggagagcatctccctgtcccagggacggggagtggtttataaagatgcttcgtgccgaagtggagaagctcgagcactggtgccagcagatggagcgggaggcggaagattatgagctgcccgaagagatattggagaaaattcggtcagccgtagggtctacacaactgctccttagtcagaaagtccagcagttctttagattatgccagcaatccatggacccaacagcttttcccgtgccgacattccaggacttggccggattctgggaccttctgcagttgtccatcgaagacgttaccctgaagtttctggagctgcaacagctgaaggccaactcatggaagctgttagagcccaaggaggagaagaaagttcccccacctattccaaagaagcccctcagaggacgtggagtgcctgtgaaggagcgatccctggattccgtcgacaggcagcgccaggaggcccgaaaacggctgctggctgcgaaaagagctgcttcatttcgacatagttcagcaactgagtccgccgattccatagagatttacattcccgaggcccagactaggttgtag

SEQ ID NO: 28334 - DNA, 5357 bp, synthetic construct
  misc_feature 1..5357: note = Description of Artificial Sequence: Synthetic coding sequence
  source 1..5357: mol_type = other DNA
atgggtattagtacggtgatccttgaaatgtgcctcctgtggggtcaggtgctgtcaaccgggggatggattccacgcactaccgattacgcctcactgatcccctccgaggtgcctctagatcccaccgtggcagagggatctcccttcccctccgaaagtactctggagtcgacagttgcagagggcagccccatttccttggagagtaccttggagagtacagtggcggagggcagtctcatcccctccgagtcaaccctagagagcactgtcgccgagggttccgacagcggactcgccctgcgcctcgtcaacggtgatggcaggtgtcaaggacgagtagagatactctatcgcggatcatggggtactgtctgtgacgattcctgggataccaatgacgccaatgtggtgtgtagacagttgggctgtggatgggcaatgtcagcgccaggtaatgcttggtttggccagggatcaggccctattgccctggacgacgtgcggtgttccggccacgagtcctacctgtggtcttgcccgcacaatggatggctttcccacaactgcggccatggcgaggatgctggagtgatctgttcagccgcacaaccccagtccactctgagaccagagtcctggcccgttaggatttctccacccgtgcccaccgagggatccgaatcttctctcgcacttagactagtgaacgggggtgatcgatgccgcggtagagtggaggtgctgtacagagggagctggggtacggtttgcgacgattattgggataccaatgatgcaaatgtcgtgtgtaggcagttaggctgtggttgggcaatgtccgcgccaggaaatgcacagttcggacaaggcagcggtccaatcgtcctggatgacgtgcgatgctccggacatgaatcatacctttggtcatgccctcacaatggatggctcacccataattgcggtcattcagaggacgccggagtcatatgttctgcgcctcagtcccgcccaacaccttcgcccgacacctggccgacatcccatgcttcaacggcgggacccgagtcgtctctggccctgcgccttgtgaacggtggagatcgatgccaggggcgagtagaagttctttacagagggtcctggggcaccgtgtgtgatgatagttgggacacatccgacgcgaatgtagtctgtcggcaactgggttgtggctgggccaccagcgccccagggaacgctcggtttggacagggctccgggcctatcgttctggatgacgttcgctgttcaggatatgagagttacctgtggagctgtcctcataacgggtggcttagtcataactgtcagcactcggaggacgcaggggtcatctgttccgccgcacattcatggtcaaccccaagcccagatactcttcccaccatcacactgcctgcttcaacagtcggaagcgaatcaagcctggctctgaggcttgttaatggaggcgataggtgtcaggggagagtagaagttctataccaggggtcctgggggactgtgtgcgacgactcctgggacacaaatgatgcgaatgtggtgtgccgccagctggggtgtggatgggccatgtccgcacccggaaacgcccgtttcgggcagggatccggccctatcgttctggatgatgtacgttgttccgggcacgagtcctatctatggtcatgtcctcacaatggctggctgtctcataattgcgggcacagcgaagacgccggagtaatctgttccgccagccagtccaggcctacgccctctcccgatacttggcccacaagccatgcttctaccgccggaagtgagagctccctcgcactccggctggtgaacgggggtgaccgatgtcagggcagggtggaggttctgtataggggctcttggggtacggtctgtgacgattattgggataccaacgacgccaacgtcgtgtgtcgccaactgggctgcggatgggcgatgtccgctccgggaaatgcgcgatttggccaaggcagcggacccatcgtactggacgatgtccggtgttccggccatgaatcatatctatggtcttgccctcacaacggatggctgtcgcacaattgtggtcaccacgaagatgctggagtgatctgttcggcttcccagtcacagcccacccccagtcccgatacttggcccacctctcatgcctctacagcaggctctgagtcttccttggccctccgcctggttaatggcggtgatagatgccagggtagagtcgaggtactgtacagaggcagctgggggacagtttgtgacgattattgggataccaatgatgctaacgtggtgtgtaggcagctcggatgcggctgggccaccagcgcccctggcaacgctaggtttggccagggatctgggcctattgtactcgacgatgtgcgatgttccggccatgaatcctacctgtggtcatgcccccacaatggctggctgtcccacaactgtgggcatcatgaagacgctggtgtgatatgttctgcatctcaatcccagccaactccttcacccgatacttggcctacctcaagggcatctacagcgggatccgaatccactctggccctccgcctggtgaacgggggtgacaggtgccgcggtcgtgttgaggtgctttatcagggaagttggggcactgtgtgcgacgactattgggataccaacgatgctaacgttgtctgccgccaattgggttgcgggtgggccatgtccgcccctggcaacgctcaatttgggcagggttcaggtcccattgtcttggacgatgtgcgatgctctggacacgaatcctacctctggtcttgtcctcacaacggctggctatcacacaactgtggtcaccatgaagacgcgggtgttatctgttcagctgcacagtcgcagtctactcctaggccagatacctggctgacaactaacctgcccgctttgaccgtgggtagtgagtctagtctggccctgcgattagttaatgggggagatcgttgtagaggacgagtggaagtgctttaccgagggagttgggggacggtatgcgacgattcctgggataccaatgacgccaatgtggtttgccgtcagctgggatgtggatgggctatgagtgcccctggtaacgctagatttggacagggctctggtcccattgtgctggatgacgttcgctgttctggcaatgagagttacttatggtcctgtccacacaagggctggctgacccacaactgtggccaccacgaagacgccggagtgatttgttctgccacccagattaatagcaccacaactgattggtggcaccctacaacaaccaccacagctcgccctagcagcaactgtgggggatttctattttacgcttccggaacattctctagccctagctatcccgcatattatcccaacaatgctaagtgtgtctgggaaattgaagtgaacagcgggtaccgcataaacttaggatttagcaatctcaaattggaagcacatcataactgtagctttgattacgtcgaaatctttgatggcagtctgaactcatcgcttctcctcgggaagatctgcaacgatactaggcagatctttacaagctcgtacaacagaatgaccatccacttcaggagcgacatctcatttcagaatacaggatttctggcctggtacaattccttccccagtgatgctaccctccgcctggtcaacctcaattcctcgtatggcctgtgcgctggtagggtagaaatataccacggaggcacgtggggaacagtttgtgacgatagttggactatccaagaagctgaagtcgtgtgccgccagttagggtgtggacgtgccgttagcgctctggggaacgcttacttcggttctggcagcggacccatcaccctagacgatgtggagtgcagcgggactgagtcaactctgtggcagtgtcgtaacagggggtggttttcacataactgcaatcaccgggaggatgcaggagtcatttgtagtggcaatcacttgtcaactcctgcgccattcctgaatatcacccggccaaacaccgactatagctgcgggggttttctctcacaaccctctggtgactttagcagccccttctatccgggaaactatcccaataatgcaaagtgcgtttgggacattgaggtccaaaacaattacagggtcacagtgatcttcagggatgtccagctggaaggcggatgtaactatgattacattgaggtctttgacggcccttaccgaagcagcccacttatagccagggtctgtgatggtgctcgcggaagtttcacaagctcttccaactttatgtccattagatttatcagcgaccatagcattaccagacggggatttcgtgccgagtattactcctccccatccaatgactccactaatctcctgtgtcttccaaaccacatgcaggcttctgtatcacgcagttatctgcagagtctgggctttagcgcttccgacctggtgattagtacatggaatggctactacgagtgccggccacagatcacccctaatcttgtgatttttacaatcccatactccgggtgtggtacattcaaacaagcggataacgacacaattgactactctaacttccttacagccgctgtctcgggcggtatcataaaacgaagaactgacctgcgcatccacgtaagttgtcggatgctgcagaacacttgggtagacactatgtacatagctaatgacaccatccatgtggccaacaacacaatacaagtcgaggaagttcaatatggcaatttcgacgtcaatatctccttctatacatcttcgagctttctgtatcctgttacctcccggccatactatgttgacctgaatcaggatctgtatgttcaagcagaaatcttacactctgacgcagttctgacattgttcgtagacacgtgcgttgcaagcccttacagtaatgacttcacctcgttaacctacgacttaatccggagcggatgcgtcagggacgacacatacgggccatatagctcaccaagcttgcggatcgcgcgatttagattcagagccttccacttcctgaaccgattcccgtctgtctacctgcgttgcaagatggtagtgtgtcgcgcatatgatcctagcagccgttgttatcgaggttgtgtattgcggagtaaacgggacgttggatcatatcaggaaaaggtcgacgtggtattggggccaattcagctgcagactcctccccgtagagaagaggagcctaggta

SEQ ID NO: 28335 - DNA, 5357 bp, synthetic construct
  misc_feature 1..5357: note = Description of Artificial Sequence: Synthetic coding sequence
  source 1..5357: mol_type = other DNA
atgggcatctccaccgtaatccttgagatgtgcctgctgtgggggcaggtcctaagcaccggcggatggatcccaagaacgaccgactatgcatcactgataccttcggaagtacccctggatcctactgtcgcagaaggatctccctttccatccgagagcacgctggagagcacagttgcagagggtagccccatttcactcgaatctacgctagagagcactgtggcggagggctcactgatacccagcgaatccacactggaaagcaccgtcgccgaagggtctgattcaggactggcgctgagactggttaacggagacggacggtgtcagggccgagtggagattctgtataggggcagttggggcacagtctgcgatgacagctgggacactaacgacgcgaatgtcgtgtgccggcaattaggttgcggatgggccatgagcgccccaggaaacgcctggtttggccaggggtctggacctattgcattagacgatgtgaggtgctcagggcacgagagctacctgtggtcatgtccccataatgggtggctgagccacaactgtggccatggtgaggatgccggagttatttgttccgctgcacagccccagagtactctgcgaccagaatcttggcctgtgcggatcagcccgccagtgcccactgagggctctgaatctagcctcgctttgcggctcgtcaatggcggagaccgctgtcggggtcgcgtggaggtactctacagaggctcctggggaacagtgtgtgacgattactgggataccaatgacgccaacgtggtgtgccgtcaattaggatgcggctgggccatgtccgcccctggaaacgcccagttcggccaaggttcaggcccaatcgtgttagatgacgtgcgctgttctggtcacgagtcctacctgtggtcttgtccacacaatgggtggctgactcacaattgcggtcattctgaggatgccggtgtgatttgttctgctccacagagccgcccaacaccaagccctgatacatggcctacctcacatgccagcacagcgggtccggaaagttccctggccctcaggctggtgaacggaggggacagatgccagggtcgagtcgaggtgctatacagaggatcttggggaactgtttgcgacgactcttgggatacgagtgacgctaacgtggtgtgccggcaactcggatgtggctgggccacgtctgctcccggtaatgcgcgtttcggacaaggctcaggaccaattgtgctggatgatgtgaggtgttccggatacgaatcttacctgtggtcgtgccctcacaatgggtggctgtcacataactgtcagcattcagaggatgcaggggtcatctgcagcgccgcacattcttggagtacaccctccccggacaccctaccaactattactttacccgctagcacggtcggaagtgaatcatcactcgccctcaggctggtaaacggcggtgatagatgccaaggtcgggtcgaggttctttaccaggggagttggggcacagtatgtgatgacagttgggacacaaacgatgcgaatgtagtgtgtaggcagctcggctgcggctgggcaatgagcgcacctggcaacgcccgattcggccaaggtagcgggccaatcgtgctcgacgatgtaagatgttcaggccatgaatcttacttgtggtcctgtccacacaacggctggctgtcccacaactgtggtcattctgaggacgctggcgtaatctgttcagcttcacagtcgcgccctactccttctccggacacctggcctacatcccacgcatcgaccgccggttccgaaagctctctggccctccggttggtaaatgggggtgatcgctgtcagggacgggtggaagtgctttatcggggtagttggggcacagtgtgtgatgactattgggatacaaacgacgcgaacgtcgtgtgcagacaactgggatgtgggtgggcgatgagcgcgccaggaaatgccaggttcggccagggcagtggcccaatcgtgctggatgacgtgaggtgcagtggccatgagtcatatctgtggtcatgcccacacaatggctggttgtcacacaattgtggacaccatgaggacgcaggggttatctgttcggcaagtcagtcgcaacccaccccgtcccccgatacatggcctacttcccatgcatcaaccgcaggaagcgagtcctcccttgcactgaggctcgtcaacggaggtgatagatgtcaaggcagggtcgaagtattataccggggttcctggggtacagtctgcgacgactattgggacacgaacgatgcaaatgtcgtgtgtcgccagttggggtgcggctgggccactagtgcaccagggaatgcccgttttgggcaaggatccggtcctatcgtgttggatgacgttcggtgcagcggacatgagtcctatctttggtcctgcccccacaatgggtggctgagtcacaactgcgggcatcacgaagatgctggagtgatttgttctgccagccagtctcaacccacaccgtcccctgacacttggcccactagtagggcgtcgaccgccggaagcgagtctactttggcactgagactggtgaacggcggtgatcgctgcagggggcgagttgaagttctgtatcaggggagttggggaaccgtgtgtgatgattactgggacactaacgatgcaaatgtggtgtgcagacagctgggctgcgggtgggccatgagtgcccctgggaacgcacaatttggacagggctccggaccgatcgtgcttgacgacgttcgctgttcaggccacgagagttatttgtggagctgtcctcataatggatggctgagccataattgtggtcaccatgaagatgcgggtgtaatttgcagcgcggcacagtcccagtccacccctagacccgatacctggcttaccacaaatctgcccgcactgacagtcggaagcgagtcttctctggctctccggttagtgaacggcggagatcgttgccgtgggagagtcgaggtgctttatcggggatcctggggaaccgtttgcgatgacagttgggacaccaacgacgcgaatgtggtgtgccgccaactgggttgcgggtgggcaatgagcgccccaggcaatgcacggtttggtcaagggagcgggcctatcgtattggatgatgtaaggtgttccggaaacgagtcttacctctggagctgtccgcacaagggctggctcacccacaactgtggacaccacgaagacgccggagtcatttgctcagccactcagattaacagtactacaactgattggtggcatcccacaactacaactactgctcgtccatcgtcgaattgtggagggtttctgttctatgcatctgggactttcagctccccctcatatcccgcatactaccctaataacgccaaatgcgtgtgggagatcgaggttaactcgggttacaggattaacctgggattttcgaacctcaaactggaagcccaccacaactgctccttcgattacgtggagatttttgacggtagcctgaacagctcgctgctcctcggaaaaatttgcaacgacactcgccagattttcacctcctcctataaccgcatgacgatccacttccgaagtgacatcagttttcagaatacagggttccttgcctggtacaactccttcccctctgatgcaaccttgcggctagttaacctgaattcgagctatgggctgtgtgccggaagggtggaaatataccacggtggaacctgggggaccgtttgtgatgatagctggacaatacaggaagccgaggtggtctgtcggcagctggggtgcggtagagccgtcagcgcactggggaatgcctacttcgggagcggctctggcccaatcacactggacgacgtggagtgttccggcaccgagtccacgctgtggcagtgcagaaacagaggctggttcagccacaattgcaatcaccgtgaggatgcgggagtaatctgcagcggcaatcatttgagcacgccagcgccatttctcaatattacccggcctaacaccgattacagttgtgggggatttctgagccagcccagcggagacttttcgtctcctttctatcccggtaactaccccaataacgcaaagtgtgtgtgggatatcgaggttcagaataactatagagtgacggtcatctttcgtgatgtgcaactggaggggggttgtaactatgactatattgaagtgttcgacggaccatatagatcatcgccactgattgcacgcgtgtgcgacggcgctagaggcagcttcacttcaagttcaaatttcatgtctattcgttttataagtgaccattcaatcacacggcgaggtttccgcgctgaatattacagcagtccatctaatgactcaactaatctgctctgtctgcctaaccacatgcaggcctccgtgtcccggtcgtacctgcagtctctgggatttagcgcatcagacctggtgatcagtacctggaacggatattacgagtgtagaccccaaatcactccaaatctcgttatatttacaataccttatagcgggtgtggcacattcaagcaggccgacaacgataccatcgactattcaaacttcctgaccgcggctgtgtctgggggaattattaaacgaagaacagacctgaggattcacgtgagttgcagaatgctacagaacacctgggtggacacaatgtacatagcaaacgatacaattcatgtggcaaataatacgatccaggttgaggaggttcagtatgggaattttgatgttaacatctccttttacacgtcaagctccttcctgtatccagtgactagcagaccgtactatgtcgatttgaaccaggacctttacgtccaggcggaaattctgcacagcgacgccgtgctgacattgtttgtggatacatgtgtggcatccccctacagcaacgacttcacatccttgacgtatgatctgatccgttcaggttgcgtgcgggacgacacatatggtccttacagctctccctctctccgaatagctaggtttagatttcgtgcttttcacttcctgaaccgtttcccttccgtgtatttacgttgtaagatggttgtatgtcgagcatacgatccgagctctcggtgctatcgtgggtgcgtattacgtagcaagcgggatgtggggtcttaccaagagaaggtggacgtggtgttgggcccaattcagctacagactccccctagaagggaggaagagccacggta

SEQ ID NO: 28336 - DNA, 7241 bp, synthetic construct
  misc_feature 1..7241: note = Description of Artificial Sequence: Synthetic coding sequence
  source 1..7241: mol_type = other DNA
atgggtatatccacggtcatactggagatgtgtctcctgtggggtcaggtgctcagtactgggggatggataccaagaacaaccgactacgcgtccctgatcccaagtgaagtacctctggacccaactgttgccgaaggttcaccatttcccagtgagagtacactcgaatcaactgtggcggagggcagcccaattagcctggagtccactctggaatctaccgtggcggaaggaagcctcattccttcagagtccacactcgagtctacggtggccgagggttccgactctggtcttgccttgcggctcgtcaacggggacggccgttgtcagggcagagtcgagattctctacagaggctcatggggaactgtttgcgatgattcctgggatacgaatgatgcaaacgtggtctgccgccagcttggctgtggttgggcgatgagcgcccctggcaacgcttggttcggccagggaagcggtccaatagcattggatgacgtgcgttgctccggacatgagagttacctgtggtcctgccctcacaatggctggctgtcacacaattgcggtcatggcgaggacgccggtgtgatctgctctgcggctcagccccagtctaccctgaggcccgagagctggcccgtccgaatttctccgcctgtgccaacagagggtagcgaaagctctttggcccttcgtctggttaacggcggagataggtgccgaggcagggtagaagtcttatatagaggatcatggggaaccgtctgtgatgactattgggataccaatgacgcaaacgtcgtgtgtcgccagctgggctgtgggtgggcaatgtccgccccagggaacgcgcagttcggacagggaagtggtcccatagttctcgacgatgtaaggtgcagcggacatgaaagttacctgtggtcttgccctcacaatggttggctgacacacaactgcggccatagcgaagacgccggagttatatgtagcgctcctcaatcacgtccaacccccagccctgatacatggccaacaagccatgcctcaacagccggaccagagagtagtctggccctgaggctggtcaatggaggcgatcgttgtcagggccgagtcgaggtgctatatagaggatcctggggaactgtgtgcgacgactcttgggacaccagcgatgccaacgttgtctgtagacagctgggatgcggctgggccaccagtgcccctggcaatgccagatttggccaggggtccggccctatcgtgctggatgacgtgcgctgcagcggctacgagtcttacctttggagttgtccacacaatgggtggctttctcataattgccagcatagcgaagacgcaggggtaatctgttctgctgcccatagttggtccacacctagccccgacactctgcccaccatcacattacccgctagtactgtagggagcgaatcctccctcgcattgcgactagtcaacggaggagatcgatgccagggtcgggtggaagttctgtatagaggcagctgggggacagtctgcgatgactcctgggacaccaatgatgccaacgtcgtctgtcgccagctggggtgtggatgggccatgctggctccaggcaatgcacgctttggacaagggtctgggcctatcgttctcgatgacgtacgttgcagtggaaacgagagctacctgtggagctgcccacacaatggatggctgagtcataattgcggccacagtgaggacgccggagttatctgttctggccctgagagttctctggctctgcggctggttaacggaggggatcgctgtcaggggagagtggaggttctgtaccgagggtcatggggaaccgtctgcgatgattcatgggatactaatgatgccaacgtggtgtgcagacagctgggctgcgggtgggcaacatccgcgccagggaacgcccgattcgggcaagggtccgggccaatcgtgttggacgatgtgcgatgctccgggcatgagagctacctatggagttgccctaataatgggtggctttcacataactgcggtcatcacgaggatgctggagtaatttgctcggctgcgcagagtaggagcacgcctaggcctgacactttgtcaacaatcactctgcccccaagtactgtgggatctgaatcaagtctgactctgcggctggtcaatggcagcgaccgctgtcagggaagggtagaggtgttgtacaggggatcctgggggacagtttgcgatgactcctgggataccaacgacgcaaacgtcgtctgtagacagctcggctgtggttgggctacttccgcccctggcaacgccagattcggacaaggctctggacctatagttctcgatgatgtccggtgcagcgggcatgaaagctacctctggtcgtgtcctcacaacggctggctctcccacaactgcggtcatcacgaagatgcgggagtgatatgctctgtgtctcaatcccggcctacccccagcccagacacctggcccacctctcacgcgagtacggcgggacccgaatccagcctggccttgaggctggtgaatggcggagatcggtgtcagggaagagtggaggtgctctaccggggttcatggggtaccgtttgtgacgattcttgggatacgagcgatgcgaatgtagtttgccggcagctgggctgtggttgggccacctccgctcccggaaacgccagattcggacaaggatccgggcctatagtgctggacgatgtccgttgcagcgggtatgaaagctacctctggtcttgtcctcacaacggatggcttagccataactgtcagcatagtgaagacgccggagtgatctgttcagctgctcactcgtggagcactccatcgccagataccctgccaaccattacactccctgccagtaccgtgggaagtgagtccagcctggccctccgactcgtgaatgggggagatcgttgccagggaagagttgaagtgctttatcagggcagttgggggacagtgtgcgacgactcttgggacacaaatgacgccaacgtcgtttgtcgtcagctggggtgcggctgggctatgagtgcacccggtaacgccagatttggacaggggtccgggcctatcgtccttgatgatgtccgctgttccggccacgaaagttacctctggagctgcccacataacgggtggctgtcccataattgcggtcacagcgaagacgccggagtcatctgtagcgccagtcagtcccgccctacaccttcaccagacacctggcctacgagccacgctagcaccgctggctcggaatcctccttggcactccgattggtgaacggtggagacagatgccaaggccgtgttgaggtgttgtatcggggatcctggggcaccgtgtgtgatgactattgggatactaatgatgcaaacgtcgtgtgtcggcagctggggtgtggatgggccatgtctgctccagggaatgcaaggtttggtcaggggtccggaccaattgtgcttgatgatgttcgatgttcaggacacgagtcctacctctggtcatgtccccataatggctggttgagccacaattgtgggcaccacgaggacgctggcgttatctgttcagctagccagtctcagcctaccccatcccctgatacatggccgacaagtcatgctagtaccgcaggtagcgagtcctctctggccttacggttggtgaacggcggagatagatgtcagggcagagtagaagtcctttatcggggtagctgggggacggtttgtgatgattactgggacaccaatgacgctaacgttgtgtgcaggcagttgggctgtggctgggcgacatctgccccaggaaatgcacgtttcgggcaggggtccgggcctatcgtcctggatgacgtacggtgcagtggtcatgaatcatacctatggtcatgcccacataatggatggctgtcacataactgcgggcatcacgaggatgctggggtgatttgttctgcaagtcagagtcagcccaccccctccccagatacatggcccacatctcacgcctcaactgcaggatcagagagcagtctcgccctcagactggtgaacggcggtgataggtgccaggggagagtggaggtgctgtaccggggttcatgggggacagtgtgtgatgactattgggataccaatgacgcaaacgtagtctgtaggcagctcggatgcgggtgggctacttccgctcccggaaacgcgcgttttggccagggttcgggaccaattgtcctggatgacgtgcggtgctccgggcacgagagctatctgtggtcttgcccccataatggatggctcagccataactgtggtcaccatgaggatgccggtgttatctgtagcgcttcccaatctcagcctaccccaagccccgatacgtggcccacgagtagggcctccacggcgggatccgaatccaccctggctctgagactcgtaaatggcggagatcgatgtcgtggcagggtcgaagtgctctatcagggctcctggggcaccgtatgcgacgactattgggacaccaatgacgccaacgtggtgtgccggcaactggggtgtggctgggccatgagtgcccctggtaacgcccaatttggccaaggctcgggtcccattgtattagatgatgtgagatgcagtggccacgagtcatacctgtggagttgccctcataacgggtggcttagtcataattgcggccatcatgaggatgctggagtgatctgtagcgcagctcagtcccagagcacgccccgtcctgacacatggctgaccactaacttgcccgcactgaccgttggcagcgaaagctccttggcccttaggcttgtcaacggaggcgatcggtgtcgcggacgggtcgaggtgttgtatcggggatcctgggggaccgtttgtgatgattcgtgggacacaaacgatgcaaacgtggtgtgtcggcagttgggctgtgggtgggcaatgagtgctcctggcaatgccaggtttggtcaaggcagcgggcctattgtcctggatgatgtgaggtgcagtgggaacgagagctatttatggtcttgcccccacaagggctggctcacccacaattgtggtcatcatgaggatgctggggtgatctgttctgccacacagattaactcgaccactactgattggtggcaccccactactaccaccaccgcaaggccatccagcaattgcggcggttttctcttttacgcttcagggaccttttcctccccaagctaccccgcatactatcctaacaacgcgaaatgcgtttgggagatagaggttaattctggataccggatcaacttgggattttccaaccttaaactggaggcacatcacaactgctcgtttgactatgtggagattttcgacggttccctgaatagctctttgctgctgggaaaaatctgcaacgacaccaggcagatttttacatcctcatataatcggatgaccattcatttccgcagcgatatctcctttcagaacacagggtttctggcatggtacaacagcttcccctccgacgctacacttcgtctcgtgaatctcaatagctcctatggcctgtgtgccggtagggttgagatttaccacggtggaacctggggtacggtgtgcgatgattcctggacaattcaggaagctgaagttgtgtgtcgccagctagggtgcgggagggctgtgagcgccctgggaaacgcctacttcggaagcgggtcaggacctataactctcgatgacgtagagtgttccggcaccgaaagcacattgtggcaatgtaggaaccgcggatggttctcacataactgtaaccatagagaggacgcaggggtgatttgcagtggaaatcatctgagtacaccagctccatttctgaacatcaccaggcccaacaccgactactcatgtggaggtttcctgagtcagccatcaggcgattttagtagtcctttttatcccggaaactatcctaacaatgcaaaatgcgtctgggacattgaggtgcagaacaattatagggtgaccgtgatctttagggatgtgcagctcgaggggggatgtaactatgactacatcgaggtgttcgacgggccatataggtcttctcccttaatcgctcgggtttgtgacggagcaagaggatcttttacgtcctcaagtaatttcatgagcattcgttttatcagtgatcacagcatcaccagacgcggtttccgggcagaatactactcatccccatctaatgattcaactaacctgttatgtctgcccaaccatatgcaggccagcgtgagcagaagttatttgcagtctctgggtttcagtgcgagcgatctggtaattagcacttggaatggctattatgagtgtcgcccacagattaccccaaatctggtcatttttaccataccctattcaggctgtggaacttttaaacaggctgataacgacacgatagattactcgaatttcttgaccgccgctgtgagtggcggtatcatcaaaaggaggaccgatcttaggattcacgtgagctgccgaatgctccagaacacatgggtggacacaatgtacatcgcaaacgacacgattcatgtggcaaataacactatacaggtggaggaagtgcagtatgggaacttcgacgtgaacatctcattctacaccagcagtagctttctctacccagtaacatctcggccatactacgtggatctcaaccaggatctgtatgttcaggccgaaattcttcactctgacgctgtcctgacactgtttgtggatacctgtgttgcatcaccctattccaatgacttcaccagccttacttacgatttgatccgtagcggctgcgtccgggacgacacctacggaccctactcctctccctccttgaggattgcccgatttcgcttccgagcgttccatttcctgaatcgttttccatcagtctatttgagatgcaaaatggtagtctgccgtgcttacgatccctcttcccgctgctatcggggttgcgtgctgaggtcgaagcgggatgtgggcagctatcaggagaaggtggatgtggtgcttggccctattcagctccagacaccgccaaggcgggaggaagagccacgcta

SEQ ID NO: 28337 - DNA, 5357 bp, synthetic construct
  misc_feature 1..5357: note = Description of Artificial Sequence: Synthetic coding sequence
  source 1..5357: mol_type = other DNA
atgggaatttccactgtgattctcgagatgtgtctattgtggggccaggttttatccacagggggatggatccctcgaaccacagactacgcttcgctgatccctagtgaggtgcccctggacccaactgtcgccgaaggctcacctttcccttccgagagcacactggaatcgacagtggcagaaggtagcccaataagcttggagagcaccctggagtccaccgtggctgagggatctctcatccccagtgagtctaccctggagtcaaccgtcgctgagggcagcgattccgggctcgccctgaggctcgtaaacggcgacggaaggtgccagggtcgggtggagattttatacaggggctcatggggtaccgtttgtgatgactcttgggacaccaatgatgcgaatgtcgtctgtcgccagctcggttgcggctgggcaatgtctgccccaggcaatgcctggttcggccagggttcaggtcccattgccctagatgatgtgcggtgttccggccacgagtcttacctttggtcatgtccacataacgggtggctgtctcataattgcggccatggtgaagacgctggcgtcatatgcagcgcagcccaaccgcagtccacgttgaggcctgagtcttggccagttagaatctccccccctgtgccaactgagggtagtgaatcttctcttgctctcaggttagtgaacgggggagataggtgtcggggaagagtggaggtgctatatagaggctcttgggggacagtgtgcgatgactattgggacaccaatgacgctaacgtggtgtgtaggcaactgggatgcggttgggccatgtcagcacctgggaatgcccagtttggacagggaagtggtccaatcgtcctagatgacgtgagatgctccgggcacgaatcttacctctggtcctgtccacacaatgggtggctcactcataattgtgggcattcagaagacgcaggagtgatttgttctgcccctcagagtcgcccaaccccatcacccgatacttggcccacaagccacgcgtctactgccggacctgaaagctcccttgcgcttcgtctggtgaacggaggcgacagatgccagggcagggtggaggtgctgtaccgcggatcgtggggcacagtttgtgacgattcctgggatacctctgacgctaatgtagtgtgcaggcagttgggttgcggctgggctacaagcgctcctggaaacgcacgattcggacagggctccggcccaattgtgctggacgatgtgagatgtagtggatatgagtcttacctgtggtcttgtccacacaacgggtggctgtcccacaactgccaacattcagaggatgcaggcgtgatatgctctgccgcacacagctggagtacaccctcccctgataccctgccaactataactctgcctgcatccaccgtgggctctgagagttcactcgcgctgaggctggtgaatggaggagaccgctgtcagggcagggtggaggtgctttatcaggggtcatggggaacagtctgtgatgacagctgggataccaatgatgcaaatgtcgtctgcaggcagttagggtgcggttgggccatgtctgctcccggaaatgcgagatttgggcaaggttcagggccaattgtgctggacgacgttcgttgttctggccacgagtcttatttgtggtcctgtccacataacggatggctgagccacaattgcggccacagcgaggacgccggtgtaatttgttctgcatcccaaagccgcccaacaccgtcacccgacacttggcccacgtctcacgcgtctactgccggatcagaaagttcactagccctgagattggtgaacgggggagatcggtgtcaaggcagggtcgaggtcctgtatcgagggtcatgggggactgtatgtgatgactattgggataccaatgatgcgaatgtggtgtgcagacagctcgggtgtgggtgggctatgtctgctcctggaaacgcgaggtttggacaaggctccggcccaatcgtcctcgacgacgtgaggtgttccggacacgagtcttacttgtggagctgtccccataatggatggctgagtcacaattgcgggcaccacgaagacgccggagttatttgcagtgctagccaatcccaaccgactccaagcccggatacatggccaacctcgcatgcctcaacggcgggttctgagtccagcctggctctgaggctggtgaacggcggagatcgctgccagggtcgcgtggaggttctgtaccgcggttcttggggcaccgtctgtgatgactactgggacaccaacgatgccaatgtcgtttgcagacagctgggctgtgggtgggcaacctccgcccctggaaacgcgaggtttggtcagggctccggcccaattgtgctggatgatgtccgctgcagtgggcatgaatcatacctgtggtcttgtcctcacaatggctggttgtcccataattgtgggcaccacgaggacgctggagttatttgctctgcatcacagtcacagcctaccccaagcccagacacctggccaaccagtagagcatctacggcaggatctgaatctactcttgccctgcgcctggtcaatgggggtgatcggtgtcgaggaagagtagaggtgctgtatcagggttcttggggaactgtgtgcgatgattactgggatactaacgatgctaatgtggtctgcagacagctggggtgtggatgggctatgtcagccccaggtaacgcccagttcggtcaggggtcaggaccgatcgtgctggacgatgtcaggtgcagcggccatgaaagctacctgtggtcttgtccgcacaacggatggctttcacataattgcggccatcatgaagacgccggtgtcatttgcagcgctgcgcagtcacaatccacaccacggcctgacacatggctcacgactaacttgccagctctaaccgtcgggagtgagtcttctttggctttgagactggtgaatgggggtgatcgctgccggggtagggtcgaggtgctgtaccgtggctcatggggtaccgtttgcgacgactcctgggacaccaacgacgcaaatgtggtgtgtcgccagctaggttgcggttgggccatgagcgctccaggaaatgctcgattcggccagggttcaggtccaatagtgctcgatgatgttcggtgtagcgggaatgagtcctacctctggtcatgccctcacaagggatggctgactcacaattgtggccaccacgaagacgccggagtcatatgcagcgccacccagatcaattccaccaccacagactggtggcaccccaccaccactacgacagccaggcctagctcgaattgtgggggattcttattttacgcaagtgggactttttcgtcgccttcgtaccctgcatactatcccaacaacgctaaatgtgtgtgggaaatagaggtgaattcggggtacaggattaacctgggattttctaatcttaaactagaggcgcatcacaattgctcgttcgattatgttgagatctttgatggctccctgaacagctcacttttgttggggaagatttgcaatgatacgagacagattttcacatctagttacaacagaatgaccatccatttcagaagcgacatttcattccagaatacgggctttttagcttggtacaactcctttcccagcgacgcgacactaaggctggtaaacctcaactcatcttacggcctctgcgcaggacgcgttgagatctaccatggcggaacttggggcaccgtctgcgacgactcttggacaatccaggaggctgaagtcgtttgtaggcaactgggctgtgggagagccgtgtcagcacttggtaacgcctattttgggagtgggtcgggacctatcactctggacgacgttgaatgtagcggcaccgaatccacattgtggcagtgtcgtaaccggggttggttttcccataattgcaaccatcgcgaggacgccggagtgatctgctctgggaaccatttgagcactcccgctccctttctgaacattacaaggcctaatacggattactcttgcggcggtttcctatcccaaccttccggagactttagctctcccttctatcctggaaactacccgaacaatgcgaaatgtgtgtgggacatcgaagttcagaacaactatcgagtgactgttatctttcgcgacgtccagctcgagggcggttgtaactatgattacatagaagtgttcgacggcccataccggtcgtctcccctgattgcaagagtatgtgatggcgcaaggggcagctttacgagctcatcaaactttatgagcatccgcttcatatcagaccatagcattaccagacggggatttagggccgaatattactcctcaccgtccaatgatagcacaaacctgctctgcctgccgaatcatatgcaggcctccgtgtcccggtcctacttgcaaagtctcggcttcagcgcatccgacctggtgattagcacctggaacggctactatgaatgcaggccacagatcactcctaacctcgtgatcttcacaatcccctattccggttgcggcaccttcaaacaggctgataacgacactatcgactactcaaatttcctgacagctgcggtcagtggaggcatcatcaagagaaggactgacctgcgcatacacgtcagttgtcgaatgctgcagaacacatgggtagatacgatgtacattgcaaatgatacaatacacgtcgctaacaacacaatccaggtcgaagaggtgcagtatggcaatttcgacgtgaacatttccttctatacttcgtcctcgttcctctatcccgtgacctctagaccgtactacgtggacctgaatcaggatctgtacgtgcaagctgagatccttcactccgatgcggtgttgacccttttcgttgatacctgtgtggccagcccctatagtaatgactttacctcactgacatatgatctcataaggagcggctgtgtgagggatgacacctatggcccttattcatccccctcgttgagaattgccaggttcagattccgagcattccactttctgaatagattcccatccgtctacctgcgctgtaagatggtggtgtgccgcgcttacgacccctcaagtcgttgctatcggggttgcgttttgcgaagtaagcgggacgtgggcagctaccaggaaaaagttgacgttgtgttgggtcccattcagctgcaaacaccgcctagacgcgaggaggaaccccgtta

SEQ ID NO: 28338 - DNA, 7241 bp, synthetic construct
  misc_feature 1..7241: note = Description of Artificial Sequence: Synthetic coding sequence
  source 1..7241: mol_type = other DNA
atgggtattagtacggtcatcctggaaatgtgtctgctgtggggccaggtactaagtacgggagggtggatccctcgcacaactgactatgcatctctaattccaagtgaggtccccttggaccccaccgttgccgaaggcagtcccttcccatccgagtcgaccctggagagtacggtagctgagggttcacctataagtctagaatctacgctggagagtacagtcgcagaggggtcccttatcccgagcgagtcaacgttggagtccaccgtcgccgaaggttctgacagtgggctggctctgaggctggtgaacggcgatggacgttgccagggtagggtggagatcctttatagaggctcttgggggacagtgtgcgacgattcctgggatactaacgacgcaaatgtggtttgccggcagctgggctgtggatgggccatgagcgccccaggaaacgcctggttcggacagggctctgggccaatcgctctggatgatgtgcgttgctccggccacgagtcttacttgtggtcctgtccccacaatggctggcttagtcataactgcggccacggtgaggacgctggcgtgatctgctctgctgctcagcctcagtccacactgaggcccgagtcctggcccgttaggatatcaccgccagtccctactgaggggtccgagtcttctcttgcactgaggcttgttaacgggggtgatcgatgccgtgggcgagtggaagtgctttatcgtggttcgtgggggaccgtctgtgacgactactgggacacaaacgacgccaacgtggtgtgccgtcagctggggtgcggatgggctatgtctgctcctgggaacgctcaattcggacaaggctctgggccaatcgtcctcgacgatgtgcggtgttccggacacgagtcttatttatggtcctgcccgcacaacgggtggctgacccacaactgtgggcattccgaggatgcaggagtgatttgctcagccccacagagtcggcctacccctagcccagacacatggcccaccagccatgccagcaccgcaggccctgagtcaagcctggctcttcgtctggtaaatgggggagaccggtgccagggcagagttgaggttttatacagaggttcatggggcacggtctgtgatgactcgtgggatactagtgacgcaaatgttgtgtgtcgccagctgggttgtggatgggctacgagtgcacctggaaacgcccgattcggacagggaagcggcccaattgttctcgatgacgttcggtgctccggatacgaatcatacctctggtcttgcccacataacgggtggctatcgcataattgtcagcactcagaagacgcaggcgtaatatgcagcgcagcacactcttggagcaccccatctccagacactctgccaactatcaccctgcccgcaagcaccgtcggttctgaaagcagtcttgcattgcggctagttaacgggggtgataggtgccagggacgtgttgaagtgctctatagaggctcatggggaacagtgtgcgacgatagttgggacactaacgacgctaatgtggtatgccgtcaactgggctgcggctgggccatgctggctcccggtaacgctagattcgggcagggctccggaccaatcgtgctagacgacgtccgttgcagtggtaatgaaagctacctctggtcctgcccacacaacggctggctgtcccacaactgcgggcatagcgaggacgccggagtaatttgcagcggccctgaaagcagccttgccctgcggctggtcaacggcggagaccggtgtcagggccgagtagaagtcctttatcgcggatcgtggggcaccgtttgtgatgactcttgggacaccaacgacgcaaatgtggtgtgccgccaattggggtgcggctgggctacttcagcgcctgggaacgctcgcttcggtcagggctctggaccaatcgtcttagacgatgttcgctgcagtggacatgaaagttatctgtggtcatgccctaataacgggtggctctcgcataactgtgggcatcatgaagatgccggagtaatttgctctgccgctcagtctcggagcactccacggcctgatacactgagcactatcacactgccgcctagcactgtcggctccgaaagttctctgacgttgcgcctggtaaatggtagcgaccggtgtcagggccgtgttgaagtgctctaccggggatcttggggcaccgtgtgcgacgactcgtgggacaccaacgatgcgaatgtggtgtgcagacagctggggtgtggttgggctacgtcagccccaggcaacgcacggttcggccagggttctggccctatcgtccttgatgacgtgcgatgctcaggacacgaatcatacctctggtcttgcccccataatgggtggctctcacataattgcggccatcacgaggacgccggagtcatctgcagcgtgagccagtctcggccaacccccagccccgacacatggcctacatcccacgcatccacggccggtcccgaaagctcactggcactccggttggtgaatggaggagacaggtgtcagggaagagtcgaggtgctgtatagagggtcatggggtaccgtgtgcgacgattcttgggacacaagcgacgctaatgtggtatgccgtcagctcggctgtggatgggctactagcgccccaggaaacgcaaggttcggtcagggcagcggtcctattgtgcttgatgacgtccggtgtagcgggtacgaatcctatctctggtcatgtccccataacggctggctgtcccataattgccagcatagcgaggatgcaggcgtgatctgcagcgccgctcactcgtggtctactccctcaccagacactctaccaaccataacattgcctgcatctacagtgggaagtgagagttcattggccctccgccttgttaacggcggagaccggtgccaagggcgagtggaggtgctctaccagggaagctgggggactgtatgcgacgacagctgggatacaaatgacgctaatgtcgtctgtcgccagctcggctgtggttgggcgatgtcagcccctggcaatgccagattcggtcaggggtccggacctatcgttcttgacgatgtcagatgcagtggtcacgaaagctatttatggtcatgcccacacaacggatggctaagtcataattgtgggcactctgaagacgccggagtgatttgctcagcctctcagagccgtccgacaccatctccagacacgtggccaacctcccacgcatccaccgccggaagtgaatcatcccttgcgctgcgattagtcaacgggggtgatagatgtcagggacgggtggaagtcctgtacagggggtcatgggggaccgtgtgcgacgattattgggacacaaatgatgccaatgtagtgtgtcgccagctgggttgcggctgggcaatgagtgcaccaggcaacgctcgcttcggacagggaagcgggccaattgtcttggacgatgtgcgttgcagcggccacgagagttatctgtggtcgtgtccacacaacggctggcttagccacaattgcgggcaccacgaagacgccggtgtcatctgctcagctagccagtcccagcctaccccatcccctgacacatggccaacatcacacgctagcaccgctggatccgaaagcagtctggccctgcgcctggtaaatggtggcgaccggtgtcaagggagagttgaagtgctttaccggggtagctgggggactgtgtgcgacgattattgggatacgaacgacgccaacgtggtgtgccggcagctcggttgcggatgggctacttccgcccctggcaatgcacggttcggacaggggagtggacccattgtgctggatgacgtccgctgttcaggacacgagagctatctgtggagctgtccccacaatggatggctatcccacaactgtggacatcacgaggatgccggagtcatttgttccgcatcacagagtcagccaaccccgtcacccgacacatggcccacaagccacgcctccaccgctggtagcgaatcgtcactcgcactacggttggtgaatgggggtgatcggtgccaagggagagtggaagtgctgtatcgtggaagctggggcacagtgtgcgacgactactgggatactaatgatgccaacgtggtgtgtaggcagctgggctgtggctgggcaacttccgcgccaggcaacgctcggtttggacagggtagtggccctatcgtactggatgatgtgcggtgctctgggcacgaatcttacctctggtcatgtccacacaacggctggttgtcccataattgtggccaccacgaggacgcaggtgtcatttgttctgcatctcagtcgcagcccactccctcccctgatacatggccaacaagccgggcatcgaccgccggtagcgaatctactctggcgttgcgacttgtgaacggtggagatcggtgccgtggtcgggtcgaagtcctgtaccaaggcagttggggcactgtttgtgatgattattgggacactaatgatgccaacgtcgtctgtcgccagctgggctgcggctgggccatgtccgcgccaggcaacgcccaattcggacagggttcaggccctatagtgttagacgacgtcaggtgtagcggccacgagagctatctctggtcttgtccacataacggctggctttcacataattgcggacaccacgaggacgcaggtgtgatctgttcagcagctcagtcccagagtacacctagacctgatacttggctgactactaatttacccgctttgaccgtgggttctgaaagtagcttggctcttcggctcgtgaacgggggtgacagatgcagagggcgtgttgaggtgctctaccggggaagctggggcaccgtgtgcgatgattcctgggatacaaacgacgccaatgtggtgtgtagacagttaggttgcggttgggcaatgagtgccccaggaaacgccagatttgggcaagggtcaggcccaatcgtgctggacgacgtccggtgcagcggaaatgagtcatacctgtggtcgtgcccccataagggatggttaactcataattgcggccaccacgaagatgcaggcgtgatctgctccgcaacgcagatcaatagtacaacaactgattggtggcaccctaccacgaccacgacagcccgtccatcatccaactgtgggggattcctgttttacgcctctggcaccttctctagtccttcgtacccagcgtattatccaaacaacgcgaagtgtgtttgggagattgaagttaattctggttatcgaatcaatctcggcttctctaaccttaaactggaagcacatcacaactgtagctttgattacgtggagatctttgacgggagtctgaacagctctctgctcctcgggaagatttgcaacgatacacgacagatcttcacgagttcctacaacaggatgaccatccacttcaggtcagacatatccttccagaacactggattcctggcttggtataatagctttccttccgatgctacactacgactggtgaacctcaactcctcttacgggctgtgtgcaggacgggttgagatctaccacggaggcacctggggcacggtctgtgatgactcttggactattcaagaggccgaggtcgtctgcaggcaattaggatgcgggagagccgtgtcagcactaggcaacgcctattttggaagcgggtccggacccattacgctggatgacgtggagtgtagtggcacagagtcaaccttgtggcaatgtcgtaacaggggctggttctctcacaattgcaaccatcgtgaagacgccggagtgatctgttctggcaaccacctaagcactcccgctcctttcctgaatatcactagacctaacactgattattcttgcggaggatttctctcccagccaagtggtgatttctcctccccattttacccaggaaactatcccaacaacgctaagtgcgtctgggacattgaggtgcaaaacaactacagagtgaccgtcatctttagagacgtgcagttagaaggtggctgtaactatgactacattgaagtgttcgacggaccatacaggtcatcccctttaatcgcgcgagtttgtgatggagcgagaggcagctttacgagctcaagcaattttatgtcaatccggtttatctcggatcactccattactaggagaggcttccgcgctgagtactactcctcaccatcaaacgattcaactaatctgctttgtcttccaaatcatatgcaggcatcagtctcccgctcctaccttcagtccctcggattttccgcttccgacctcgtcatttcaacctggaacggatattacgagtgtcgccctcagataacgcctaacctcgtgatcttcacaatcccatactccggctgtggcaccttcaagcaagcagacaacgacacaatcgactacagtaactttctcaccgcagctgtctccggcggaattataaaaaggcgaaccgacttaagaatacacgtcagctgtaggatgctccagaatacatgggtagataccatgtacattgcaaacgacacaatccacgtggctaacaacacaatccaggtggaagaggttcagtacgggaactttgatgtaaacattagtttctacacttccagctcttttctgtatcccgtcacatctcgcccttactacgtggacctcaaccaagacctgtatgttcaagccgaaatcctgcactctgatgctgtgttgacgctcttcgtggacacttgtgtcgctagcccgtacagcaatgattttactagtctgacgtatgacttaattcggtctggatgcgtgagggacgatacctatgggccatattcctccccttcattaagaatcgccagattccgcttcagggccttccactttctgaataggtttcccagtgtttatttgcggtgtaaaatggtggtgtgccgggcatatgacccatctagccgctgttatagggggtgtgtgctgaggtctaaaagagatgtgggctcgtaccaagagaaagtcgacgttgtactcggtcctatccagttgcagacccctccgaggcgcgaggaggaacctcggta

SEQ ID NO: 28339 - DNA, 7241 bp, synthetic construct
  misc_feature 1..7241: note = Description of Artificial Sequence: Synthetic coding sequence
  source 1..7241: mol_type = other DNA
atgggaatctccactgtgattttggaaatgtgccttctgtggggacaggtgttgagcactggaggttggatcccacgtactacagactacgccagtttaatacccagcgaggttccattagaccccacagttgccgagggtagcccattccctagtgagtcgacgttggaaagtaccgtcgccgagggtagccccatatctctggagagtaccttggagagcaccgtggccgaaggctctctgatccctagcgagtcaacactagagtcgactgtcgcagaaggaagcgattcaggcctggcactgaggcttgtcaatggtgatggacgttgtcagggcagggttgaaattctttatagagggtcctggggcacagtgtgcgatgactcttgggacactaatgatgccaatgtcgtctgcaggcaactcggctgcgggtgggctatgtcggctccaggaaatgcatggtttggccaggggagcggaccgattgccctcgatgacgttcgctgtagtgggcatgaatcgtacttgtggtcctgccctcacaacggctggctgtcgcacaattgtggtcatggcgaggacgctggagtaatatgttccgccgctcagccccagtccacactgaggccagaaagctggcctgttagaatctccccaccagtcccaactgaggggtctgaatccagtcttgcccttcgcctcgtcaacgggggtgatcgatgtcgaggacgggtcgaggttctgtatcggggatcctggggaaccgtttgcgacgattactgggataccaacgacgcaaatgtggtgtgtaggcaactcggctgcgggtgggcgatgtccgcccctggaaacgcccagtttggtcaggggtccggtccgatagtgctggacgacgtgcgatgtagtgggcatgaatcctacttgtggagttgcccacataacggttggcttactcacaattgtggacattctgaagacgctggggtgatatgctcagcacctcaatcaagacctactcctagccctgatacatggccaactagtcacgcctccacggcaggccctgagagctctctagccctgagactggtcaatgggggagatcggtgtcagggcagggtggaagtgctttatcgcggtagctggggcacagtttgcgacgattcttgggatacctctgatgccaatgtagtttgtaggcagctcggatgcgggtgggctacatccgctcctggcaatgctcgatttggccaaggatcggggccaatcgtccttgacgatgtcagatgcagcggttacgaatcttacctgtggtcttgcccacataatggctggctctcccataattgccagcactctgaagatgctggcgttatttgctctgcagcacactcttggagtacaccctcccctgacaccctgccgactatcacactgcccgctagcaccgtcggatctgagtctagcctagctttaaggttagtcaacggtggggaccgttgtcaagggagggtggaggtgctgtacagagggtcctgggggaccgtttgtgatgactcatgggatacaaacgacgccaatgtagtctgccgccagctgggatgtggatgggccatgctcgctccaggaaacgcccgttttggccagggatctgggcctatcgtgctcgacgatgtccggtgttctggaaatgagagctacctatggtcttgccctcataacggatggctctcacataattgcggacatagtgaagacgctggggttatttgctcaggtccagaatcatccctggcccttcgtctggtaaacgggggagataggtgtcaaggtcgtgtcgaagtgctgtatagggggagctggggaacagtctgtgatgactcttgggatactaatgatgccaatgttgtctgtaggcaactgggctgtggctgggctacctctgcacccggtaatgcccgattcggtcaggggtccgggcctatcgttttggacgacgtgcgatgctcagggcacgaaagctatctttggagttgccccaacaacggatggctttctcacaattgtggccaccatgaagacgcaggagtcatctgcagtgcagcccagtcgaggagtacgcctcggcctgatacactcagcacaattacactgccccctagtactgtggggtccgaatcatctctgacgctgaggcttgttaatggatccgatcgctgtcagggtcgtgttgaggtcctttataggggctcctggggaaccgtgtgtgacgatagttgggataccaacgacgcaaacgtggtctgtagacaactggggtgcggatgggcaacttccgctccgggaaatgccaggtttggccagggatccggcccaatcgtgttggatgacgtaaggtgctccggacacgagagttatctctggtcctgcccacacaatggatggctgtcacacaactgcggtcatcatgaggacgcaggagttatctgtagcgttagccagtctaggcccactccatcccctgatacatggcccacgtcacacgccagtacagcaggcccagagtcaagcttagccctcaggcttgtaaatggaggagatagatgtcagggacgagttgaagtgctatatagagggtcttggggcactgtttgcgacgattcatgggatacttctgacgccaacgttgtatgtcgccagcttggttgtggctgggctactagcgccccaggaaatgccagattcggacaggggtccggccctatcgttctggacgacgtgcggtgtagcggctatgaatcatacctgtggtcatgtcctcacaacggctggctctctcacaattgccaacactcagaagatgcaggtgtaatatgtagtgccgctcatagttggtctactccctcacccgatacgctgcctaccatcaccctccctgcatcaaccgtcggaagtgagtcctctctcgcactgagactggttaacgggggtgataggtgccagggcagagtggaggttctctaccagggatcatggggcactgtctgcgatgattcttgggatactaacgacgctaatgtggtgtgccgccaattggggtgcgggtgggcaatgtcagctcccggtaacgccaggttcggccagggcagcggccctatcgtgctggatgatgtgcggtgtagtgggcatgaatcctatctctggtcatgtccccacaacggctggctgtcccacaactgcgggcactctgaagacgccggtgtcatttgttctgcttcccagtctaggccaacccctagtcctgatacatggccaacctctcacgcatcaacagccggttcagaaagtagccttgcacttaggctggtgaacgggggagatcgatgtcagggtagggtggaggtgctctataggggatcatggggcaccgtctgcgacgactactgggacactaatgatgcgaatgtcgtttgtagacagcttggctgcggatgggcgatgtccgcgcctggcaacgccagattcggccaggggtcgggacctattgtgctggacgatgttcgttgtagcggacacgaatcctacctctggtcctgtccccataacggttggctgtctcacaactgcggacaccatgaagacgcgggagtcatctgcagcgctagccagtcacagccgaccccgagccccgatacctggccaacctctcacgcttccaccgctggcagcgagagctccctcgcattacggctggtcaacggaggcgacaggtgtcagggacgcgtggaagtgttgtaccgtgggtcttgggggacggtttgtgacgactactgggataccaacgatgccaacgttgtgtgccgccagcttggatgtgggtgggccaccagcgccccaggaaacgccagatttggccaaggatccgggccaatcgtactggatgacgtgcgatgctccgggcatgagtcttacttgtggtcatgtccccacaatggatggctgtcccacaactgcggccaccacgaagatgcaggtgtaatttgctctgcatctcagagtcagcctacgccaagcccggatacatggcccacatctcatgccagcacggcaggcagcgaatcgtccttagcactgcggcttgtcaatgggggtgacagatgccagggcagagtggaggtgctctacagggggagctgggggacagtctgcgatgattattgggacaccaatgacgccaacgtggtctgcagacagctgggctgcggttgggctacttccgccccagggaatgctaggtttgggcaagggtccgggccaatagttctggacgacgtgcggtgctctggccacgaatcttatctttggtcctgcccccataatggatggctttcccataactgcggacaccacgaggacgccggagtaatttgttccgccagccagtctcaacctacccccagtccggatacctggccgacgtcaagagcctcaactgcagggtccgaatccactctggccctccgactggttaacgggggagatcggtgtagagggcgagtggaagtgctttaccaaggcagttgggggacggtgtgcgacgactactgggacactaacgacgctaatgtggtgtgccgacagctgggttgtggctgggcgatgagtgcccctggtaatgcgcaatttggccaggggagcgggccaatcgttctggacgacgtaagatgctccggtcatgagagttatctgtggtcttgcccccacaatggctggttaagccacaactgtggccatcatgaggacgcgggagttatctgctcagctgcgcagtcccaaagtacaccaaggcccgatacgtggcttacaaccaaccttccagcattaacagtgggctctgaatccagcttggccctaaggttagtgaatggaggggatagatgtcgagggagagtggaggtcttgtacagaggcagctgggggactgtatgcgacgactcgtgggatacgaacgatgctaatgttgtttgccgccagttaggatgcggctgggccatgagtgctcctggtaacgcacgatttggacagggaagtgggccaatcgtcttagacgatgtgaggtgttccggaaatgagagttacctctggtcatgtcctcacaaaggatggctgacccacaactgcggacaccacgaagacgccggagtcatctgttccgccacccagatcaatagtaccacgactgattggtggcatcccaccaccactactactgccaggcccagcagcaactgtggcggattcctcttctacgcttcgggaactttttcttctccctcatatcctgcctattatcctaataacgccaagtgtgtgtgggagatcgaagtgaacagcggctatcgcatcaatctgggcttttccaacctgaaattggaggcccatcataattgctccttcgactatgtggagattttcgatggctcactgaacagcagcttactcttggggaagatctgcaatgatacccgccaaatcttcacctccagctacaacagaatgactattcacttcaggtctgacatcagtttccagaacacaggattcttagcctggtataacagctttcctagcgatgcgacacttaggcttgtgaatttgaactcttcctacggcctgtgcgccggaagagtcgagatctaccatggtggaacttggggcactgtctgcgatgactcatggacaatccaggaggcagaggtggtttgtagacagctcggatgtggccgagctgtatccgctctgggcaatgcgtacttcggcagtggtagtgggcctatcacactagacgatgtggaatgctccgggacagagagtactctgtggcagtgccgcaacagggggtggtttagccataattgtaaccatagggaggatgccggagtgatttgctcgggaaatcacctgtccaccccagctccattcctcaacatcactcgtcccaacacagactattcgtgcggcggattcttgtcacagccttcaggagacttctcttctccgttctatccaggcaactatcctaataacgccaaatgcgtatgggacatcgaagtgcagaataactatcgtgttacagtgatctttagggatgtacaactggaaggtggttgtaactatgactacatcgaagtgttcgacggcccttacaggtccagtcccctgatagccagagtatgtgatggtgctagagggagcttcacgtcttcttctaacttcatgtctatccgtttcataagcgaccatagtataacgcgtagaggatttagagcagaatactattcatctccctctaacgacagtactaacctgctatgtctgccaaatcacatgcaagccagcgtgagtcgttcttacctacagtcgctgggctttagtgcttccgacctagtgatcagcacttggaacggctactatgaatgtaggccgcaaattacacccaatctggtgatttttacaattccttactcagggtgtggcaccttcaaacaggccgacaacgataccatagattactccaatttccttaccgccgcagtgagcggtggaattattaaacggagaacagacctcagaatccacgtttcctgtagaatgctccagaacacctgggttgataccatgtacatagccaacgataccatacatgtggccaataatacaattcaagtcgaagaggtccagtatggtaactttgatgttaacattagtttctacaccagctcgtcttttctgtaccccgtcacctccaggccctactatgtcgatctgaaccaggatctctacgtgcaggccgaaattctacacagcgatgcagtcttgacgctgttcgtcgacacgtgcgtggcaagcccgtactctaacgacttcacctctctgacgtacgacctgatccgctccggatgtgtgcgggacgacacctatggaccctatagctccccttcactcagaatcgctcgatttaggtttagggcatttcatttcctgaatcggtttccttccgtgtacctccgctgtaagatggtcgtctgtcgcgcatacgatccctctagtcggtgttataggggttgtgtgctaaggtcaaagcgagatgtaggctcttatcaggaaaaagtcgatgtcgtgcttggaccgatccagctgcagacacccccacgccgagaagaggagcctagata

SEQ ID NO: 28340 - DNA, 7211 bp, synthetic construct
  misc_feature 1..7211: note = Description of Artificial Sequence: Synthetic coding sequence
  source 1..7211: mol_type = other DNA
atggggatcagcacagttatccttgaaatgtgccttctttggggccaggtcctgtctaccggagggtggattccacggaccaccgattacgccagcctcataccctcagaggtgccactggaccctacagtggccgagggatcccctttcccatctgagtcaactcttgaatctacggtcgccgaaggcagccctatctcactggagtcaaccttggagtccaccgtagctgaaggttctctgataccaagcgaatccacactggagtctacagtggccgaaggaagcgactccggattggctttgcgactcgtcaatggcgacggtcgctgccagggacgcgtggagattttgtaccggggttcctggggaaccgtttgcgacgacagctgggatacaaacgatgcaaatgtggtctgccgccaattaggctgtggatgggccatgtctgccccaggtaatgcctggttcggccaaggctcaggacccattgccctcgatgacgtgagatgttcaggccacgaaagttacctgtggtcatgcccccacaacggttggctgtcccataactgtgggcatggtgaagatgctggcgtgatctgttccgctgctcaaccacaatccaccctgcgccctgaatcctggcctgtccgaattagcccccctgtgcccaccgaggggagtgagtcctctctagccctgcggcttgtaaacgggggagaccgctgtcggggacgtgttgaggtactctatcgtggatcgtgggggactgtgtgtgatgactactgggacacgaacgatgcgaacgtggtgtgcaggcagctggggtgcggctgggccatgagcgcccctgggaacgctcagttcggccagggaagcgggcctattgtactcgacgatgtgcggtgctctggccacgaatcttatctgtggagctgcccacacaatggctggctgactcacaattgtggccattccgaggatgctggagtgatttgcagcgcccctcagagcagacctactccctctcccgatacatggcccactagtcacgcctctacggccggacccgagtcatccctagcgttgcgactcgtgaacgggggtgaccgatgccaggggcgtgtggaggtcctgtataggggatcttgggggacagtgtgcgatgattcctgggataccagcgatgctaatgtggtgtgtagacagcttggctgtggatgggctacttcagcaccaggcaatgcaaggtttggacaaggttctggccctatcgtgctcgacgacgtgcgatgttcgggctatgagtcgtatctgtggtcctgcccacataacggatggctgagtcataactgccagcactcagaggatgccggagtgatttgctctgacacattgcccactattacactgcccgcttcgacagttgggagtgagagttccctggcacttcggttggtgaacggaggtgataggtgccaaggaagggtggaggtgctatatcggggatcatggggtactgtgtgcgatgatagttgggatacaaacgatgcgaacgtggtttgcagacaactgggctgtggatgggctatgctcgccccagggaatgcaagattcgggcagggaagtggtccaatagtcctggacgacgtcagatgttctggcaacgagtcctatctctggagctgtccccacaatggctggctgagtcacaattgcggccacagtgaagacgcaggcgttatctgctctggaccagaatctagcctcgcattgcgactggtgaacggcggagaccggtgtcagggtcgggtcgaagtgttatatagagggtcttggggcacagtatgcgatgatagttgggacaccaacgacgccaacgtagtatgtcgccagttaggatgtggctgggccacaagcgccccaggcaatgccagattcggacaagggtccggccctatcgtgctcgacgacgtgcggtgtagcggtcatgagtcctatctgtggtcttgcccaaacaacggctggctcagccataattgcggacatcacgaagacgcaggagttatctgctcggccgcacagtctcgaagcactcccagacccgatacgctgagcacaatcactctgcctccctctaccgttggaagtgagagctccctaaccctgaggctagtgaacggatcagaccgctgccaggggcgagtggaagttctctaccgcggatcttggggaaccgtatgtgacgacagctgggacacgaacgatgccaacgttgtttgccgacaactcgggtgcgggtgggccacctcagcacctggaaatgccaggttcggacagggttctgggccaatagttctagatgatgtgcgttgcagcgggcatgaaagctatttatggagttgtccacacaacgggtggctgtcacataactgcggccatcatgaggacgctggtgtcatctgtagtgtctctcagagtagacctacaccctctcctgacacctggcccacaagccacgcctccacagctggaccagagagctccttggcactgcggttggttaatggcggtgatagatgccagggcagggtggaagttctctaccgagggtcttggggaactgtgtgcgacgatagctgggacactagtgacgcaaacgtggtttgccgtcagcttggttgcggctgggccacctcagcccctggaaacgccagatttgggcaaggctcgggtcctattgtgctcgacgacgtgcgatgctctgggtacgaatcctacctgtggtcttgtcctcacaatgggtggctgagccacaactgtcagcactctgaagacgcaggagtgatctgcagcgcagcacactcttggagcacaccctcaccagatacactgcctacgattacactacccgctagcaccgttggctccgagtcctctctcgcactaaggctggttaatggaggggaccggtgtcaaggccgagtggaggtactctaccaaggttcatggggcaccgtgtgtgatgattcatgggatacaaacgatgccaatgtcgtgtgccggcagctgggatgcggttgggctatgagcgctcccggaaacgcacgttttggccaagggtccggtccaatcgtcttagatgacgttaggtgcagtggccatgagagctacctttggagttgcccccacaatggctggctgagtcataattgtgggcatagtgaggatgccggagtaatttgttctgccagtcagagcagacccactcccagtcccgatacatggcctacctcacacgcttcaacagctggaagcgagagtagtctggcactacgcctggtgaacggcggagataggtgtcagggcagggttgaggttctctaccgcggatcttggggtaccgtttgtgacgactattgggacaccaacgacgcgaacgtggtgtgccgccagctgggatgtggatgggcgatgtcagcccctggcaatgcacgctttggacaagggtccggaccgatcgtgttagacgacgtccgctgctccggccatgagagctatctgtggagctgcccacataatggatggttgagtcacaattgtgggcaccacgaggacgccggagtgatttgttctgccagccagtcccagcccactccgtccccagacacgtggcctaccagtcacgcttccacagccggaagcgagtccagtctcgccctccgcctcgtgaacggcggagataggtgccagggtcgagtagaagttctctatcggggtagctggggaacagtttgcgatgactactgggatacgaatgatgcgaatgtagtgtgtcggcagctgggctgtggctgggctacgtccgcgccaggcaatgcgcgatttggacagggcagcgggcctatcgtcctcgatgacgtgaggtgcagcgggcatgagtcctacctttggagctgcccccacaatggctggttgagtcacaactgtggacaccatgaagacgccggtgtgatctgctcagctagtcaatctcagccgaccccttctccagacacttggcccacaagccatgcatccacagccggaagtgaatctagtctggccctgcggctggtgaacggtggcgacaggtgtcagggtagggtggaggtgttgtatcggggatcctggggcacagtatgtgacgattactgggacacaaacgatgccaacgtggtttgtcggcagctgggttgcgggtgggcaacaagcgccccaggtaatgcaaggttcgggcagggttctggaccgatcgtgctggatgacgttagatgttccggccacgaaagctacctttggagttgccctcataatggttggctcagccataattgcggccatcacgaggacgccggagtgatttgtagcgcaagtcagtcccagccgactcccagccccgacacttggcctacgagccgcgcaagcacagccggaagcgaatccaccctcgcgttacggttagtgaacggcggagatcgctgtcgaggcagggttgaggtgctctatcagggatcttggggcacggtttgcgatgactactgggatacaaacgatgctaatgtggtttgccgtcagcttggctgcggatgggcaatgagcgcccctggcaatgcccagttcggccaggggagtggaccgattgtgttagacgatgtccgctgttccggacacgaatcctatttatggtcctgtccgcacaacgggtggctgtcacacaactgcggccaccacgaagatgcgggtgttatctgttcagctgcacagagtcagagcactcccaggcccgatacttggctcactacaaatctccccgcattgactgtgggctcagagtccagtttagcactgcgcctggtcaacggcggtgaccggtgtcggggtcgtgtcgaagttctctatcggggttcatggggcaccgtgtgcgacgatagctgggatacgaacgatgcgaatgtagtgtgtcggcagctcggatgcggatgggcaatgtctgcaccaggcaacgcacgcttcggacaggggtctggtcccatcgtgctggatgacgttcgctgttccggcaacgaaagctacctgtggagttgccctcataagggatggttgacccacaactgcggacaccacgaggatgcaggggtgatctgctcggccacccagataaacagtactactactgattggtggcacccaacaacaactaccactgcgcgtccatcttccaactgcggaggctttctcttctatgctagtggcacattctccagtccctcttaccctgcttattatccgaataatgcgaaatgtgtctgggagatcgaagttaactccggttaccgcatcaatttgggtttttctaacctcaaattggaagcccaccacaattgcagctttgactatgtggaaattttcgatggcagtctcaactctagtctgctgctcggaaaaatttgcaatgatactcggcagatcttcactagttcgtataaccggatgactatccacttcaggtctgacatctcttttcagaataccgggttcctggcgtggtataactcctttccgtcagatgccacccttcgcctggtcaacctgaacagctcttatggcctgtgcgccggacgggtggaaatttatcacggcggaacgtgggggactgtgtgcgatgattcttggacgattcaggaagcagaagttgtgtgcagacaactcggttgcgggcgagccgtatccgccttgggaaacgcctactttggctccggcagtggacctataacccttgacgatgttgaatgctcgggcaccgaaagtacactatggcaatgccggaacagaggctggttctctcacaattgcaaccatcgggaagacgcaggcgtgatttgctccggcaaccacctgagcacacctgcaccctttctgaacatcacgcgccctaacacagattatagttgtgggggatttctgtcccaacccagtggggacttttcttccccattttacccgggaaattaccccaacaacgcaaaatgcgtgtgggacatcgaggttcagaacaactatagggtcaccgtcattttcagggacgtccaattagaggggggttgcaattatgattacattgaagttttcgacggtccttaccggagttctcctctcattgctcgggtgtgtgatggagcaagaggcagctttacttcgagctcaaattttatgtctatccggtttatatccgaccacagtatcacacggaggggcttccgcgcagagtattacagctctccatctaatgattccaccaatctattatgcctgccaaaccatatgcaagcgtccgtgtcaaggagttacctgcaatcgctgggattctccgcctccgacttggtcatctcaacttggaatggatactacgaatgccggccacagatcacacctaacctggtgatttttacaattccgtattccggctgtggaacatttaagcaagctgacaacgacactatcgactactccaatttcctgaccgctgctgtcagtgggggaattatcaaaaggaggactgacctcaggattcacgtcagttgtcggatgcttcagaatacctgggtggacacaatgtacattgcgaacgacaccatccacgttgccaacaataccatccaggtcgaggaggtccaatacggcaattttgacgtcaacatatctttctacacctcttccagctttctgtatcccgtcaccagcaggccatactatgtggatttgaatcaagatttgtatgttcaggctgagattctgcactccgacgcagtgctgacgctatttgttgacacttgcgtcgcctccccatactccaacgatttcacctctcttacgtacgacctgattcggagtgggtgcgtcagagacgatacctatggcccttactctagcccatccctgagaattgctcgatttcggtttcgggctttccatttcctcaacagattcccaagcgtgtatctaaggtgcaagatggtcgtctgcagggcctatgacccttcatctcgctgctatcggggttgcgtcctgagatctaagcgggacgtagggagctatcaggaaaaagtggacgtggtgctcggtcctatccaactgcagacacctcctaggcgggaagaggaacctcgata

SEQ ID NO: 28341 - DNA, 1680 bp, synthetic construct
  misc_feature 1..1680: note = Description of Artificial Sequence: Synthetic coding sequence
  source 1..1680: mol_type = other DNA
atgacgatacacttcagatctgatatatcttttcaaaacacaggcttccttgcatggtacaactctttcccctcagatgcaactctcagacttgtgaatctgaactcgagctacggactgtgtgcgggaagggtggagatctatcatggtggtacttggggaaccgtttgtgacgactcatggacaattcaagaggccgaggtcgtgtgtcgacaacttggttgtggcagggccgtatctgctttgggtaatgcttactttggatccggttctggaccaatcaccctcgatgacgtggagtgtagcgggacagagtccaccctatggcagtgccggaatcgcggttggttcagtcataattgcaatcaccgtgaagacgcaggtgtcatatgctcagggaaccacttgagcacaccggcaccatttctgaatatcacccgccctaacactgattatagctgcggcggattcctaagccagccgagtggcgacttttcctctcccttctacccagggaattacccgaacaacgccaaatgcgtgtgggacattgaggtgcagaacaattaccgggtcactgtgatttttagggacgtgcagctcgagggaggatgcaactatgactatatagaagtgtttgacgggccttaccggagtagcccattgatcgctcgcgtttgtgatggtgctagaggaagcttcacatctagctcaaacttcatgagcatccgctttatctcagatcatagcattactagacggggattcagagcagaatattatagttccccctctaacgactcgaccaatctcctttgtcttcctaaccatatgcaagcatcagttagtagatcctatctgcagtccctcggattttcagcctcagatctggtaattagcacatggaatggctattacgagtgccgaccccagattacacccaaccttgtaatctttactataccctattcaggttgtggtacctttaagcaggctgacaacgacactatcgattatagcaacttcttgacggctgcagtttcaggcggaataattaagaggcgtacagatctgcgcatccatgtatcatgtaggatgttacagaacacttgggtggacaccatgtacatcgccaatgatacaattcacgtggcaaataataccatccaagtggaggaagtccagtatgggaattttgatgtgaacatttccttctatacctcaagctctttcctgtatcctgtcactagccggccttattacgtcgacttaaatcaagatctgtacgtgcaagccgaaatcttacattctgatgccgtgctgacgctctttgtcgatacatgcgttgcaagcccttactccaatgattttacctccctgacatacgatcttatacggtctggatgcgtcagggacgatacctacgggccttatagtagcccttcactgcgtatcgccagatttcgctttcgggcttttcacttccttaatcgatttccctcagtatacctgaggtgcaagatggtcgtttgcagggcatatgatcctagttccaggtgttatagaggttgtgtcttgagaagtaagcgggatgtaggctcctaccaggagaaagtggacgtcgttctcggaccaatccagcttcagaccccacctcgtagggaagaagagcccagatag

SEQ ID NO: 28342 - DNA, 3402 bp, synthetic construct
  misc_feature 1..3402: note = Description of Artificial Sequence: Synthetic coding sequence
  source 1..3402: mol_type = other DNA
atgggtatctcgacagtgattcttgaaatgtgtctgctgtggggacaggttttgtccaccggtggctggattccacggactacagattatgcatcactgattccctctgaagtacctcttgatccaactgtggctgagggctcccccttcccaagcgaatcaaccctagaaagcacagtggccgaagggtcccctattagcttggagtcaaccttggagagcactgtggccgaaggttctctgatacccagcgagtcgaccctggaaagcacagtagccgaaggttcggatagcggactggccctccggcttgtgaacggagacgggcgttgtcagggaagagtagagatactctaccggggtagctggggcacagtttgtgatgattcttgggacacaaacgatgccaatgttgtctgtaggcagctcgggtgtggctgggctatgagcgctccaggcaatgcctggtttggacagggcagtggaccgattgcactggacgatgtgagatgcagtggacacgagagctacctgtggtcctgtccacataacggttggctatcacacaactgtggccatggcgaggacgctggtgtgatttgttccgctcctcagtcgaggcccaccccttccccagacacctggccaactagtcatgcatctactgctggctctgagagtagcctcgcactaaggctcgttaacggtggggatagatgccaaggtcgggtggaggtactgtaccgaggttcttgggggaccgtgtgcgatgactattgggacaccaacgatgccaatgtggtctgcaggcaactaggttgcggttgggccacatctgcacctggaaatgcgaggtttggtcagggctctggcccaattgtgcttgacgacgtgagatgttccggccatgaatcctacctatggtcgtgtcctcataacggctggctgagccataactgcgggcaccacgaagatgcaggtgtgatctgttccgcttctcagtcccagcccactcctagccctgatacatggcccacttctagggcatctacagccggatcggagtctactctggctttaaggctcgtaaatggcggtgatcgttgtagagggcgagttgaagtcctctaccaaggcagctggggtactgtgtgcgatgattactgggacacaaatgacgccaatgtcgtgtgtcggcagttgggctgcgggtgggcaatgtcagcccctgggaatgcacagtttggccagggatccggtcctatcgttcttgatgatgtgcgatgctcggggcatgagagttacctgtggagctgtccacacaatggatggctgtcccacaactgtggccaccatgaagacgccggagtgatctgctctgccacccagattaattctacgacgaccgattggtggcatcctactacaacaactaccgccaggccatcatccaactgcggtggctttctgttctacgcctcaggaaccttttcgagtcccagctaccctgcctactacccaaataacgccaagtgcgtttgggaaatcgaggtcaactctggatacagaattaacctcggctttagtaatttgaagctcgaagcccaccacaattgcagttttgattatgttgagatcttcgatggctccctgaattccagcctcttgttaggcaagatttgcaatgatacccggcagatatttacgtcctcttacaaccgaatgactattcattttaggagtgacatctctttccaaaacacaggctttctcgcatggtacaattctttcccgagtgacgccaccttaagactggttaacctgaactccagctacggattgtgtgcgggacgcgtggaaatctaccacggcggaacctggggtaccgtttgcgatgatagttggaccattcaggaagcggaggttgtgtgcaggcagctggggtgtggcagggcagtctcggccctgggtaatgcctacttcgggagtggaagcggacctatcactcttgacgacgttgaatgcagcggcacggagtcgaccctatggcaatgtcgcaatagaggttggttcagccacaattgcaaccatcgagaggatgctggcgttatatgctccggcaatcatctgtcaacaccagcccctttcctaaacatcacccggccaaatacagactatagctgtggtggctttctgtctcagccctccggagactttagctcccccttctacccgggaaactatcccaataatgcaaagtgcgtttgggacatcgaagtgcagaacaactacagagttaccgtgatcttccgagacgtgcagctcgaggggggttgcaattacgactacatagaggtcttcgatggcccttaccgtagctcacctcttatcgcaagagtgtgcgacggcgctaggggatcattcacatcatcgagcaatttcatgagtattaggttcatctcagatcattctatcactcggagaggctttcgcgcagagtactactcctctcctagcaacgattcgaccaacctgctctgtctacccaatcatatgcaggcatctgtatctcgaagctacctgcagagtctggggttctctgcgagcgacctggtcatcagcacctggaatggctactatgagtgccggccacagattacccctaacctcgtcatcttcacgatcccatacagcggatgcggaaccttcaaacaggctgataatgataccattgactattctaattttttgacagccgctgtgtccggaggcatcattaagagacgtacagatcttaggattcatgtaagttgtcgaatgctgcaaaacacatgggtggacacgatgtacatcgctaacgacactatccatgtggccaataacactatccaggtggaggaggtgcagtacggcaacttcgacgtgaacatctcattctacactagctcatcttttctgtaccctgtgacctcgcgcccttattatgttgacctcaatcaagacctgtacgtgcaggcagagattttgcacagcgatgctgtactgaccctgtttgtcgatacctgtgttgcctctccctactccaacgattttacgtctctgacatatgaccttatccggtcagggtgtgtcagagacgacacttatggaccttactctagtcctagtctgagaatcgctagattcagatttagggcctttcacttcctgaatagattcccctcagtttacttgagatgtaaaatggtcgtctgtagagcctacgaccccagctcaagatgctatcgtggatgtgtgttgcggagcaagagggatgttgggtcgtatcaggaaaaagtggatgtggtccttggtcccatccagttacagacccctcccagaagagaggaagagcccagatag

SEQ ID NO: 28343 - DNA, 7241 bp, synthetic construct
  misc_feature 1..7241: note = Description of Artificial Sequence: Synthetic coding sequence
  source 1..7241: mol_type = other DNA
atggggatctccaccgttattctggaaatgtgtctgctctggggccaggtgctttcgactggcggatggatcccccgtacaaccgactacgcgagcctgataccttcagaggttccccttgacccaactgtcgccgaaggttcaccatttccatctgaaagcacattagagagtaccgtcgccgagggatctcccatatctcttgaatctacactggagtctaccgtcgcagagggctccctcattcccagcgagtcaactctcgaaagtactgtcgccgaagggtccgactcaggcctggccttaagactagtgaacggggatggacgctgtcagggccgtgtcgagatcctgtatagagggagttggggtactgtgtgcgacgacagctgggacactaatgacgccaacgtggtctgcaggcagctgggctgtgggtgggctatgagtgctcctggaaacgcctggtttggccagggctctgggcctatcgccctcgatgatgtccggtgcagcggacacgaaagctacctgtggtcatgcccccacaatgggtggctgtcccataactgtggccatggtgaggacgcaggcgtcatttgctccgccgctcagccccaaagcaccctcaggcccgaaagctggcccgtccgtatctcgccaccagtgccgaccgaagggagcgagagttctcttgctcttcgcctagtgaatggtggggaccgatgccggggaagggtggaggtgttgtacagagggtcctgggggacagtgtgcgatgattactgggacactaacgatgcaaatgtggtttgtagacagctcggctgtgggtgggctatgagcgcaccaggaaatgcccaatttggacagggttctggtcctatcgttctggacgacgtcagatgttctggccatgaatcttacctctggagttgtccacataacggatggctcacacacaactgtggccacagcgaagatgccggagtaatctgtagtgcccctcagagtcgcccaactccttcccctgatacctggcctacttcccacgcgtccactgctgggccagaatctagcctggccctgcggctcgttaacggtggggatcgctgtcagggacgcgtagaggtactgtaccggggtagctggggcacagtttgtgacgactcttgggatacaagcgatgccaatgtggtgtgtcgacaacttggatgcggatgggccacatcagctccgggtaacgcacgctttggccagggaagcggaccaattgttctggatgatgttcggtgttccggatacgagagctacctgtggagttgccctcacaacggctggttatcccataactgtcaacacagcgaggacgccggtgtgatatgctccgcagcccacagctggagcaccccctcacccgatactcttccaacgatcaccctgcctgcctccactgtgggctctgaaagtagcctggccctgaggctggtgaacggcggtgatcgatgccaaggtcgagtggaggtcctctatagaggttcatggggcaccgtatgtgacgactcatgggacactaatgacgccaacgttgtctgccgccagcttgggtgtggatgggctatgctcgccccagggaatgcccgattcgggcagggctccggtcctatcgttcttgatgatgtcagatgctcaggaaacgagtcctacctgtggtcatgtccacataacggttggctaagtcataactgcgggcactccgaggatgccggtgtcatttgttctggtcccgaaagctccctggccttgagactcgttaacgggggagataggtgtcaagggagggtggaggttctttacaggggctcgtggggcacagtctgtgacgactcctgggacaccaatgacgccaatgttgtatgtcgacagctgggatgcggttgggccactagtgcgccagggaacgctaggttcggccaggggtctggtcctatcgtgttagacgatgtcaggtgctccggccatgaatcgtacctatggtcctgccccaataatgggtggttatctcataactgcgggcatcacgaggacgccggagtcatttgttctgcggcacagtctcgaagcacaccacgacctgatactctgtctactataaccttacctccatcaaccgtgggatcggaaagttccctgacccttaggctggtgaatggtagcgataggtgtcaaggtagggtggaagtcctgtaccggggtagctggggtactgtgtgcgacgactcttgggatacgaatgatgccaacgtagtctgccgccagctcggatgtggatgggccacctcggctccaggcaatgcgcgattcggacaaggatccggacccattgtgttggacgacgttaggtgctccggccacgagtcctatttatggtcgtgcccccacaatgggtggctcagccacaattgtggacaccatgaggatgcgggagtaatttgctcggtgtcccagtcccgcccaaccccatctcctgatacctggccaacctctcacgcctctaccgcagggcctgaatcatcactggccctgcgtctcgttaacggaggcgataggtgccagggtagggttgaagttttgtacagagggagctgggggacggtgtgcgatgacagttgggatacttctgacgcaaatgttgtctgccgacagctcggctgcgggtgggctaccagtgctccagggaatgcccgattcggacaaggctcgggccctatagttttggatgatgtgcggtgcagcggctacgaatcttacctctggtcatgcccccacaatgggtggttgtctcataattgccagcattcagaggatgccggagtgatttgttcagcggcacattcctggtctacccccagccccgacacgctgcccactatcacactgccggcatctacagtggggtcagaatcttcactggcgctaagactagtcaacgggggagatcggtgccaggggagagtggaggtcctgtaccagggatcctgggggaccgtatgtgatgactcctgggatactaatgatgcgaacgtcgtctgccgccagctggggtgtgggtgggccatgtccgccccaggaaacgcgagattcggacaaggaagcggccctattgtgttggacgacgtgcgttgcagcgggcacgagagttacttatggagttgcccacacaatggatggctatctcacaattgcggacattccgaagacgcgggagtaatttgctctgcgagccagtctaggcctactcccagcccagatacctggccaacatcacatgcctccacagctggaagcgagagctccctggccctccgccttgttaatggcggagaccgatgccaagggagggtggaggtgctctatcgaggatcctgggggaccgtgtgcgatgactattgggacactaacgacgctaacgtcgtctgtaggcagctggggtgtggatgggctatgtccgcaccaggtaatgcgaggtttgggcaagggtccggaccgatcgtccttgacgatgtgcgatgtagtgggcacgaatcttatttgtggtcctgcccccataatggctggcttagccataattgtgggcaccatgaggacgcgggagtaatctgtagcgcttcccagtctcagcctactcctagcccagacacctggccaacgtcccacgcttccacagctggtagcgaatcctctctggctctgaggctagtaaatggaggggacagatgccaaggcagagtggaagtactgtacagggggtcatggggtacagtctgtgatgactattgggatacaaacgacgccaatgttgtgtgcaggcaactagggtgcgggtgggctacttccgctcctggtaacgcacgcttcggacaggggagcgggcctatcgtgctcgatgacgttaggtgctccgggcacgaatcctatctgtggtcttgcccccacaatggctggctgagccataattgcggccatcatgaggatgcaggggtaatttgctccgcctcccagtcccagcccaccccctctcccgatacctggcctacttctcatgctagcaccgctgggagtgagtcttcattggctctgcgcttggtgaatgggggagatagatgccaggggcgtgtcgaggtactttatagaggttcatggggtacagtctgcgacgattattgggatactaacgacgctaatgtcgtttgcagacagctcggatgcggttgggctacaagcgcccctggaaacgccaggttcggtcaggggtctggtcccatcgtccttgatgacgttagatgttcagggcatgagagctatctctggtcttgtccacataacgggtggttgagccacaattgcgggcatcacgaagacgccggtgtgatatgttctgcatcacaatcacagcccactcccagccctgacacctggcctacctcacgggcttccacagctggctctgagtccactcttgcattgcgactggtaaatggcggtgacaggtgtagggggagggtcgaagtcttgtaccagggctcctggggcactgtctgtgatgattattgggatacaaacgacgcaaacgttgtctgccgacagctcggctgcggatgggccatgagcgcccctggcaatgcccaatttggacagggctctggccctattgtcttggacgatgtaaggtgtagtggacacgagagctatttgtggtcctgtccacacaacgggtggctgtcacacaactgtgggcatcatgaagacgctggtgtgatctgtagcgccgcacagagccaatcaacgccaaggcccgatacctggttaaccacgaatctgcccgctttgaccgttgggtccgagagctctctggctcttcggttggtaaacgggggagataggtgtagagggcgtgtggaagttttgtatcgaggctcctggggtactgtgtgtgatgattcctgggacaccaacgacgctaatgtggtctgccgtcagctgggctgcgggtgggcgatgtccgccccaggaaacgcccgattcggtcagggcagcggaccaatcgtactcgacgatgtgcgctgtagcggtaatgagtcgtacctctggtcctgtccacacaaaggctggcttactcataattgcggacatcacgaagacgccggagtcatttgctccgctactcagattaacagcaccaccaccgactggtggcaccccactaccactactacagcaaggccttcttctaactgcgggggttttcttttctatgcctctggcacgttcagttcccccagctatcccgcatactaccctaacaacgccaagtgtgtatgggagatcgaggtgaacagtggatatcggattaacctgggcttcagtaacctaaagttggaggctcatcataactgtagttttgattacgtggagatctttgatggttccctaaattcatctctactgctggggaagatttgcaatgataccagacagatcttcacatcttcctataatcgcatgaccatacacttccgcagcgacatcagctttcagaacacggggttcctcgcatggtataatagcttcccttcagatgcaaccctgcgcttggtcaaccttaactcttcatatggattgtgcgccggtagagttgagatctaccatgggggaacctggggcacagtctgtgacgatagttggaccatacaggaagccgaagttgtatgtagacagctaggctgtggcagggctgtgtccgcccttggcaacgcgtatttcggttcaggatcaggtcccatcaccctggatgacgtggaatgctccggcactgagtcaacgctgtggcagtgtaggaatagaggatggtttagccataactgcaaccatagggaggatgctggcgtgatttgttctggcaaccatttgtcaactccagctccatttttgaacatcactaggcccaacacggattacagctgtggcggtttcctttctcagccatccggagatttcagttcccccttctaccccggaaactatcccaataatgcaaagtgcgtgtgggacatcgaggtgcagaataactaccgggtgaccgtgatattcagggatgtgcaactggaggggggatgtaattacgactacatcgaggtgttcgacggaccctaccgttcatctcctctcattgctcgggtatgcgacggagctagggggtcctttactagctcttccaattttatgtctattcgctttattagcgaccacagcataaccaggcggggtttcagggctgagtattacagcagcccgagtaatgactccacgaatctgctgtgtctgcccaatcatatgcaggctagcgtcagccggagttaccttcagtctttggggtttagtgcttcagatctcgtcatctcaacatggaacgggtactacgagtgcagaccccaaatcacaccaaatctcgtgattttcacaattccctattctggctgtggcactttcaagcaggccgataatgatactatcgactattcaaatttcctgaccgctgccgtgtctggaggcatcatcaagagaagaacggatctgagaatacacgtgagttgccgcatgcttcaaaatacctgggtggacaccatgtacatagcgaatgatacaattcacgtggcaaacaacactatccaggtcgaagaggttcaatacggtaatttcgatgtgaacatttctttctatacctctagttccttcctgtatccagtgacatcccggccatactacgtcgacctcaaccaggatctttatgtacaagctgaaatcttgcacagtgacgcagtcctgacgttattcgttgacacttgcgtcgccagcccctactcaaacgactttacctcattgacatacgatcttatccggagcggatgcgtgcgggatgatacatacgggccttatagctccccttcactcagaatcgccagattccggtttcgggcatttcatttcctgaatcggtttccttcagtctatctgcggtgtaaaatggtggtgtgcagagcttacgatccaagtagcaggtgctatagaggatgtgtactgcgcagcaaaagagatgtcggctcttaccaggagaaagtggacgtcgttcttggcccaattcagcttcaaacgcctccaagaagggaggaagaaccacgata

SEQ ID NO: 28344 - DNA, 7628 bp, synthetic construct
  misc_feature 1..7628: note = Description of Artificial Sequence: Synthetic coding sequence
  source 1..7628: mol_type = other DNA
atgggtatttcaaccgtcattttggaaatgtgcctcttgtggggccaagttctctccaccgggggatggatccctaggacaacagattacgccagtctgattccctccgaagtgccgctcgaccctactgtggcggaaggctctcctttcccaagtgaaagtactctcgagtctacggtggctgagggcagccccatcagcctggagagtaccctggagtctacagtagcagagggtagcctgattccttccgaatccacattagagtccactgttgcagagggctccgactcaggcctggctctccgcctggtgaacggcgatggtagatgtcagggacgcgttgagatcctctacagaggttcatggggcactgtctgcgacgactcttgggacaccaacgacgcaaacgtggtctgtcggcagcttggatgcggatgggcaatgagcgcccctggaaatgcctggttcggtcaggggagcgggcctatcgcgctagatgatgtgcggtgtagcggacacgagagctatttgtggtcttgtcctcataatggatggctttcccataactgtggccacggtgaagatgcaggagtgatctgttccgcggctcaaccccagagcactttacggcctgagtcctggcccgtgagaattagcccaccagtgccaactgaaggatcggaatcgtccctcgcattgcgccttgtgaatggaggtgatcgctgtcgcggaagagttgaagtgctctatagggggtcctggggtaccgtctgcgatgattactgggataccaacgacgcaaatgtggtttgccgccaattaggatgtggatgggcaatgtccgctccgggaaacgctcagtttggccagggatctggcccaatagttttggacgacgtgagatgctctggccacgaaagttatctctggtcctgcccccacaacgggtggctgacacacaattgtggccacagcgaggacgccggagtgatttgctccgccccacagagcagacccaccccaagccccgatacctggcccacaagccacgcaagcaccgccggacccgagtcctccttagccctgagattagttaatggaggtgaccgctgtcagggtagggtcgaagttttgtaccgaggctcttgggggacggtttgtgacgactcgtgggatacgtctgatgcgaacgtggtatgcaggcagctgggatgcggatgggcaacaagcgctccaggtaatgcaaggtttggtcaaggttctggtcctatagtcctggatgacgtccgctgctcgggatacgagtcctacttatggagctgccctcacaatggctggctgagtcacaattgccagcactctgaggatgcgggagtaatttgctcggcagctcattcatggtcaacaccctcccccgacacactccctactatcacgctcccagccagcactgtcggctcagagtccagcctggctctccgtttggtgaacggaggcgataggtgtcagggacgcgtggaggtgctgtatcggggatcatggggaactgtgtgtgatgacagctgggatacgaacgacgcaaacgttgtttgtcgacagctaggctgtgggtgggctatgctcgcccctggtaatgcacgtttcggccagggatctggaccaatagtcctggatgacgtgcggtgctcaggaaatgagtcatacttgtggtcatgccctcataatgggtggctctcacacaattgtggacatagtgaggacgccggagtcatctgctctgggccagagagttccctcgccctgaggctggtcaacgggggagatagatgccagggcagggttgaagtgctctaccgcggttcttgggggacagtctgcgacgacagctgggatacaaacgatgctaacgtggtgtgccgccagctaggttgtgggtgggccaccagtgcccctggcaatgccagattcgggcagggcagcggcccaattgtgctcgatgacgtgcggtgttctggacacgagtcgtatctctggagctgtcctaataacggatggctaagccataactgtggacatcacgaggacgccggtgtgatctgtagcgctgcgcaaagcaggtcaactccaaggcctgacacactatccaccataaccctgccacctagtacagtcggctcagagagctccttaacacttcgtctcgtaaatggttctgatcgatgtcaagggagagtagaagtactgtaccggggttcatggggcaccgtttgtgatgactcctgggacaccaatgatgccaacgtggtttgcagacaattaggctgcggctgggcgaccagcgcgcctgggaacgctcggtttggccaggggagtggtcctattgttctcgacgacgtgcgttgttctgggcacgagtcttacctttggtcttgcccacacaacggatggctaagccataactgtggtcaccacgaagatgccggagtcatctgctcagtgtcacaatcgagaccgacgccaagccccgacacttggcccacctcccatgcctccactgctggtccggaatcttctctggcactgaggctcgtgaatggtggcgatagatgccaggggagggtggaggtcctctacagaggctcttggggaactgtatgcgacgattcgtgggatacttccgatgccaatgttgtttgccggcaactcggatgcgggtgggcaaccagcgcccctggcaacgcaagatttggccaggggtcgggccctatagtcctggacgacgttaggtgctctggctatgagtcatacttgtggagctgcccacataacggatggctgagccataattgccaacattcggaggatgcgggtgttatctgtagcgccgctcatagctggagcacaccctctccggataccttgcctacaattactctccctgcaagcacggttggaagcgagtccagtctggcattgcgcttggttaatggcggagaccggtgccagggccgagtggaggtgttgtatcaggggtcctggggaacagtgtgcgatgatagctgggacaccaatgatgctaatgtggtctgtcgacagctgggttgcggctgggctatgtctgctcccggaaacgctcgcttcggccaaggctcaggtcccattgtacttgatgacgtgagatgttccgggcatgagtcgtacctatggtcgtgccctcataacggctggctgtctcacaattgcgggcattccgaggacgccggtgtgatctgcagtgcctctcagagccgtcctaccccatcaccagatacctggccaacaagccatgccagcactgccggttcagagtccagccttgccctccggcttgtgaatggaggggacaggtgccagggtcgagtggaagtcctgtatcggggatcttggggaactgtgtgtgatgactattgggacactaacgacgctaatgtggtatgccgtcagttaggctgcggctgggcaatgtcagctcctgggaatgcgcgatttggccagggctccggcccaattgtgctggacgacgtgcgatgtagtggacatgagtcctacctctggtcgtgtcctcacaacggctggctgtcccacaattgtggacaccacgaagacgcaggcgtgatctgctccgcatcgcagtcccagccaacaccgagcccagatacttggcccacctcccatgccagcactgccggaagcgaaagctcgctcgccctgcgcctcgtgaatggaggggaccggtgccagggtcgggtggaagtgctgtatcgaggatcgtggggcactgtgtgtgatgattactgggacactaacgatgctaatgtggtgtgcaggcagttggggtgtggctgggccacatccgctcccggtaatgccagatttgggcagggttcaggcccaatcgttttggatgatgtgagatgctccggccatgaaagctacctatggagttgcccgcacaatgggtggctgtcacacaactgcggacaccacgaagatgcaggcgtgatctgctcagcatcccaaagccagcctacgcccagtcctgatacgtggccgacatctcacgccagtactgcgggaagcgagtctagcctggctctccgtctggtcaatggtggagacaggtgtcaaggccgtgtggaggtgctgtacagggggtcctggggaactgtctgcgacgactattgggacaccaatgacgcaaacgtggtgtgccgtcagttaggatgcggatgggccaccagcgcacctggcaatgccagatttggccaaggctctggcccaatcgtgctggatgacgtgcgttgctctggacacgaatcatacctgtggagttgtccccataatgggtggctgtcccacaactgtggccatcatgaagacgcaggtgttatttgttcagcctcccagagccagccaaccccctcacctgacacatggcccacatcacacgcaagcaccgccggttccgaatcttcccttgctttgcggctggtcaatgggggtgaccgctgccagggacgggtcgaggtcctatatagagggtcctgggggaccgtgtgcgatgattactgggataccaatgatgccaatgtggtgtgtaggcagctgggctgcgggtgggcaacttcggcaccagggaacgccaggttcggccaaggctccggccctattgtactggatgatgtcagatgctccggacatgagagctacctgtggtcttgtccacataacggttggttgtctcataactgtggacaccatgaggatgcgggagttatctgctcggctagccagtcacagcctacgccatccccggacacctggccaacttccagggcgtcaactgccggatcggagtccacattggctctacgcctcgtgaacggaggagacaggtgtcgaggcagggttgaggtactatatcagggctcctgggggaccgtgtgcgatgactattgggacaccaatgacgccaacgtggtgtgccggcagctgggatgcggatgggcaatgtcagccccaggcaatgcacagttcggacaggggtcaggacccatcgtgctggatgatgtgaggtgcagcgggcacgagtcatatttgtggtcgtgtccccacaacgggtggctgagtcataattgtggccatcacgaagacgccggagtgatttgtagcgcggctcagtcccagtctacccccaggcctgacacctggttgaccactaatctaccagccttgacagttggcagcgaatctagcctggctttgaggctcgtaaatggtggggaccgatgccggggaagggtagaggtcctctatagaggcagttggggtacagtatgcgacgacagttgggatacgaatgatgccaatgtggtgtgcaggcaactgggctgcggctgggcaatgtctgctcccggtaatgctcgctttggtcaaggctccggacctatcgtacttgacgacgttcgatgctctgggaatgagagttacctttggtcctgtccacacaaaggttggttaacacacaattgtggccaccacgaggacgccggagtgatctgttccgccacccagataaatagtacaaccactgattggtggcaccccacaactacaacaaccgccagaccatcctccaattgtggcggatttctgttctatgcaagtggaactttcagctccccatcatatccggcatattaccccaataacgctaaatgcgtgtgggaaatcgaagtgaacagcggctatcggatcaatctcggatttagcaacctgaagctggaagcacatcacaattgttcattcgactacgtcgagatatttgatgggagtctcaattcaagtctgctgttgggaaagatttgcaatgatacccgacagattttcacatcgtcatacaaccgtatgaccatccactttaggtcagacataagcttccagaacacaggtttcctggcctggtataactctttcccctccgacgctacactacggctcgtgaaccttaattcctcctatgggttatgtgccggtcgggtggagatttatcacgggggaacatggggcacggtctgcgatgactcatggactatccaggaggcagaggttgtgtgccgtcagcttggatgtggacgtgcagtttccgccttagggaatgcctatttcggctccggttccggcccaatcactcttgatgatgtcgagtgctctggtacagagtccacgctttggcagtgccggaaccgcggttggttctctcataattgtaatcaccgcgaggacgccggagtcatttgtagcggtaaccatctgtcaacacccgcaccctttttaaacatcacacgccctaatactgattactcttgcggaggctttctgtcccaaccatccggcgattttagcagtcctttttatccaggaaactacccaaacaatgctaaatgcgtctgggatatcgaggtgcagaataattaccgcgtgactgtcatcttcagggatgtccaacttgaaggagggtgcaattacgattatatagaggtgttcgatggaccataccggtcatccccactgatcgcccgagtgtgcgacggcgctagaggaagctttaccagcagctcaaattttatgtcaatccgattcatcagcgaccactctattactcgcagaggttttcgagctgagtactactctagcccctccaacgattcaacgaacctgttgtgccttccaaaccacatgcaggccagtgtatcccggagttatcttcagagtctaggcttctctgctagtgacttagttattagcacgtggaacgggtattatgaatgtcgtccccagatcactccgaatctggtcatctttactataccatattctgggtgcggtaccttcaagcaggcagataatgacacaatcgactactccaattttctgacagccgctgtttcaggcggaattattaaacggaggacagatctgaggatccatgtgtcttgtcgtatgctccagaacacatgggtagacactatgtatattgctaacgatactattcacgtagcgaataacacgatccaggtggaggaagtgcagtatggaaatttcgatgtgaatatcagtttctacacttccagctcctttttgtacccggtgacaagcaggccttattacgtcgacctgaatcaggacctttatgtgcaagctgagatcttgcactcagacgctgtcctgacacttttcgtggacacgtgcgtcgcgtccccttacagtaacgactttacgtcactgacttatgacctgattcggtctggctgcgtcagagacgacacgtatggtccatactcctcaccgtccctgaggattgcccgattcaggtttcgagccttccacttcctgaacagattccccagcgtctacttgcgctgtaagatggtggtgtgtcgggcttacgatccttctagcaggtgctacagagggtgcgtgcttaggagcaagcgcgatgttggatcttatcaagagaaagtggatgtcgtcttggggcctatccagttgcaaacacctccaagaagggaggaggagccacgtta

SEQ ID NO: 28345 - DNA, 7238 bp, synthetic construct
  misc_feature 1..7238: note = Description of Artificial Sequence: Synthetic coding sequence
  source 1..7238: mol_type = other DNA
atgggtatctctacagttattctcgagatgtgccttctttggggccaagtcctttctacggggggttggatccccaggactacagactacgcctcgctaatccccagcgaagtgcccctcgacccgacagtcgctgaaggcagcccgttcccatcggaatcaacattggagagcaccgtggccgagggcagccccatctcgctcgagtccactttagaatctacagtggccgagggctcccttattcctagcgaatctaccctggagtccactgtcgccgaaggctctgacagcggactggccttaagacttgttaacggtgacgggaggtgccagggccgagtcgagatcctgtacagggggagttgggggacagtgtgcgacgatagctgggacaccaacgatgcaaatgtggtctgtagacaactgggctgcggatgggccatgtctgctccaggaaatgcctggttcggccaggggagcggccctatcgcactagacgacgtgcgctgttctggacatgagtcttacttgtggtcgtgccctcataatgggtggctcagtcacaactgtggccacggcgaggacgccggtgtcatatgctccgcggctcagccacagagcactctccggcctgaaagttggccagtgagaatttccccccctgtccctactgaaggaagcgagagtagcctggcgctgcgcctcgttaacggaggagacagatgccggggaagagtggaagtcttataccggggaagttggggaaccgtgtgcgatgattactgggatacaaacgacgccaacgtggtctgcaggcaattggggtgcggatgggccatgtctgctcctggtaacgcccagtttggtcagggatccggccctatagtgcttgacgacgtgagatgttcaggccatgaatcttatctctggtcttgtccccataatgggtggctaacacataactgcggccattcagaagatgccggagtgatctgcagcgcacctcagagtcggccaactcctagtcccgacacgtggccaacctcccacgcttccactgctggacccgagtcgtctctggctctgaggctagtcaatggcggtgatcgctgtcagggcagggtggaggtcctatacagaggcagctggggcacagtgtgcgacgattcctgggacacctcagatgcaaatgttgtgtgccgccagctggggtgtggttgggccacgagtgcccctggcaatgccagatttggacagggatctggccctattgtacttgacgatgtcagatgttctggctatgagtcttatctgtggtcttgcccgcataatgggtggttatctcacaactgtcagcattcggaggatgccggtgttatctgctctgccgctcacagttggtccacccctagcccagatactctgcccaccattactctgccggcttctacggtcgggtctgagagctccctggcactccgtctcgtcaacggcggtgatcggtgccaggggagggtggaggttctgtacagagggtcttggggtaccgtgtgcgacgactcctgggataccaatgacgccaatgtggtttgtcgacagctcgggtgcggttgggctatgctggctcctggaaacgctcgtttcggccaaggtagtggcccaatcgttctggatgatgtgaggtgcagtggcaatgagtcgtatttgtggagctgtccccataatggctggttgagtcacaactgcggccattccgaggacgctggggtgatctgcagtggtcccgagtcctccttggccctgaggctggtgaatggaggagaccgatgtcagggccgagtggaggtgctatataggggatcctggggcacagtgtgtgacgacagctgggataccaatgacgccaacgtggtttgtcgacagctgggctgtggatgggcgacttccgccccaggaaacgcacgtttcggtcaggggagtggacccattgtgctcgacgacgttcgttgctccggacacgagagttacctctggtcgtgcccgaataacggttggctcagccacaattgcggccatcatgaggacgccggtgtgatctgttccgccgctcagagtcggagcaccccccgaccggacacactcagcaccatcactctgccccctagcaccgtgggatctgaatcctcgctgacactgaggctggtgaacggatcagacaggtgtcagggtcgggtcgaagtcctgtaccgcggtagctggggaactgtatgcgacgatagctgggacacgaacgacgccaatgtggtgtgcaggcaactcggctgcgggtgggcaacgagcgcgccaggtaatgctcggttcggacaggggtctggacctatcgtgttggacgacgtacggtgctctgggcatgaatcttatctgtggtcttgtccccacaacggatggctgtcccacaactgtgggcaccatgaagatgccggtgtgatatgtagcgtgagccagagccgtcccacaccttccccggatacctggcctacgtctcatgcatctacagctggtcctgaatcatctttggccctgcgcctggttaacggaggggacaggtgccagggaagagttgaggtgctgtacagaggatcctggggaaccgtatgcgacgactcctgggacacatctgacgcaaatgtcgtatgtcgacagctcgggtgcgggtgggcaactagtgctcccggtaacgcccgatttggccagggatctggcccaatagtgctggacgatgtgcggtgcagtggatatgaaagttacttgtggtcttgtccccataacggctggcttagccacaattgtcaacactcagaggacgccggagtaatttgttcagccgctcactcttggagtacccccagcccagacaccctgcccacaattaccctgcctgcatccacggtcgggtcagagtcctctttggccctacgcctcgtcaatggtggagaccgctgtcagggcagagtcgaggtattgtaccagggctcatggggcacagtgtgtgacgactcatgggacaccaacgacgctaatgtggtttgccggcagcttggttgtggctgggccatgagcgcgcctgggaacgcaaggttcggccaaggaagcggccctatcgttttggatgatgtcagatgctcgggtcacgaatcatacctgtggtcttgtccacataacggctggctgagccataattgcggccactctgaggatgctggcgtgatctgctctgcctcacagagcaggcctacgcctagcccagatacttggcccacttcgcacgcatccaccgctggatccgagagctcgctggcccttagacttgttaatggcggagatagatgccagggacgagtcgaggttctgtataggggaagctggggaacggtgtgtgatgactactgggacacgaatgatgctaatgttgtatgtaggcagttagggtgcggatgggcaatgagcgctcccggaaatgcaaggtttggccaggggagcggtcccattgtgctagacgacgtgcggtgtagtggccatgaaagctacctttggtcatgcccccataacggatggttgtcccataactgcggacatcacgaagacgccggagtgatctgctctgcttcacagagtcagccaactccttccccagatacttggcccacatcgcatgctagcaccgctgggtctgaatcctcgctcgccctaagactggtcaatggtggggatcgctgccaggggcgtgtagaagttttatacagggggagctgggggaccgtatgcgacgattattgggacactaacgacgctaatgtcgtctgcagacagcttggatgtggctgggcaacttcggcccctggaaatgccaggttcggacaaggatctggcccaatagtgctggacgacgtgaggtgttccggacatgaaagctacttgtggtcctgcccacataatggctggctctctcacaattgcggccaccacgaagatgccggtgtaatttgtagcgctagtcagtcccagccgactccatcccctgatacatggccaacgtcccacgcaagcacagctggtagcgaatcaagtctggctttgcgcctagtgaatggaggtgaccgttgccaaggaagggtagaggtactgtaccggggaagctggggaaccgtctgtgacgactattgggacactaacgatgctaatgtggtgtgtcggcagctcggctgtgggtgggccacatcggcaccgggaaacgccaggttcgggcaaggctccggcccaattgtgcttgatgacgtgagatgctccggtcatgagtcctacctatggtcttgtcctcataatgggtggctgtcgcataattgtggacaccatgaggacgctggtgtcatctgtagcgcttcacagtctcagcccacaccctctcctgacacctggccaacaagtcgggcatctaccgctggttccgagagcacactggctctgaggctcgtcaatggcggagaccggtgccgtgggagagtggaagtgctgtatcaagggtcttggggaacagtctgtgacgactattgggacaccaacgatgctaatgtggtctgtcgtcagttgggatgcgggtgggctatgtccgcacctgggaacgcccagtttgggcagggatctgggccaatcgtgctggatgacgtgcgatgttcaggtcatgagtcctatctgtggtcatgccctcataacggttggttgagtcacaactgtggccatcacgaggatgctggggtgatatgctccgcggctcagagccaatctacgcctcgtcctgacacttggctgacgaccaacctgcccgcattaacagtaggcagcgaatcgagcctcgcccttcggctggtgaacggaggagaccgttgcagaggcagagtagaggtgttataccggggaagttggggcacagtatgcgacgacagctgggacactaatgacgctaatgttgtgtgtagacagctcggttgcgggtgggctatgagcgctcccggaaatgcccgttttggtcaaggctccggccctattgtgctggatgacgtcaggtgctccgggaatgaatcttacttatggagctgcccacataagggttggttgactcacaactgcggacaccacgaggacgctggggttatctgttcggccacccagatcaatagcaccactactgactggtggcaccccacaacaacgacaacagctaggccgtcaagtaactgtgggggtttcttgttctacgccagcgggaccttctccagcccatcatatccggcatattaccctaacaatgctaaatgcgtgtgggagatcgaggtgaacagcggctaccggattaacttaggattcagcaacctaaaactggaggcccaccacaattgctcctttgattatgtggaaatcttcgatggtagtctcaattcctccctcttgctggggaaaatatgcaacgacaccaggcaaatttttacgtcatcctataacaggatgacgatacatttcaggtccgacatctcctttcagaacacaggattcttggcttggtacaatagcttcccaagtgatgctaccctccgactggtgaatctgaactcatcatacggcctctgtgccggtcgggtcgaaatctaccatggaggcacttggggcactgtgtgcgacgacagttggacaattcaggaggctgaagtcgtctgtagacagctgggctgtggaagagcagtaagcgcccttggcaacgcttattttggcagcggatcaggcccaatcaccctagatgacgttgaatgctctgggacggagtctacactctggcagtgtcgcaatcgcggatggttcagtcataattgcaatcatagggaagatgctggagtcatatgtagtgggaaccacctgtccactcctgctccctttttaaacatcacccgaccaaataactactcatgtggcggttttctctcgcagcctagcggcgatttctcttctcccttttatcccggtaactaccccaacaacgccaagtgtgtgtgggatatcgaagtgcagaataattaccgcgtgacggtcatcttcagggacgtgcagctagagggagggtgcaactatgattacattgaagtgttcgacggaccgtatagaagctcccccctaattgcgagggtctgcgacggcgctcgcggatctttcacttcatcctcgaactttatgtctattcggttcattagcgatcattccattacacggaggggctttagggccgaatactattctagcccttcgaacgatagtactaacctgctgtgtttacccaatcatatgcaggcctctgtcagccggtcctatttacagtcccttggcttttccgccagtgacctcgtgataagcacttggaacggttattacgagtgcagacctcagattacgcctaatctggtgatctttacaatcccgtattctggatgtggtactttcaagcaggcggacaatgacaccatcgactatagcaatttcctgaccgcagcagttagtggcggaattattaaaaggagaacggacttacgtatccatgtgtcatgtaggatgctgcagaatacttgggttgacaccatgtacatagccaatgacaccattcacgtcgcaaataataccatccaggtggaggaagtgcagtacggcaacttcgatgtgaacatttccttctacacttcaagctcgttcttgtaccctgtaacgagcaggccctactacgtagacttgaaccaggacttgtacgttcaggcagaaattctgcactcagacgcggtattaaccttattcgttgatacgtgcgtggcaagcccctactctaatgatttcacttcactgacgtatgacttgattaggtcaggatgtgtacgggatgacacatacggcccatatagctctccatctttaaggattgcccgttttcgcttcagggcatttcatttcttgaaccgctttccctcagtgtatctcagatgcaaaatggtcgtgtgccgcgcttacgatcctagtagtaggtgttacaggggatgcgtactcagatccaaacgcgacgttggcagctatcaggagaaggttgatgtcgtccttggacctattcagctccagacaccccctagaagggaggaggagcctaggta

SEQ ID NO: 28346 - DNA, 7241 bp, synthetic construct
  misc_feature 1..7241: note = Description of Artificial Sequence: Synthetic coding sequence
  source 1..7241: mol_type = other DNA
atgggtatttccaccgtaattctggaaatgtgtctgttgtgggggcaggtgctgtccaccgggggatggatccccaggaccactgactacgcatcactgattccttcagaggtccctctggaccccaccgttgcggagggatcccccttcccaagcgaatctactctcgagagtacggtggcagagggcagccccataagtttagaaagcacactggagagtaccgtcgctgaaggatctctgattccttcagaatcgaccctggagtcaactgtagctgagggatccgattccggccttgccttgcgactggtgaacggtgatggcagatgccagggacgcgttgagattctttaccggggttcctggggcaccgtgtgtgatgactcatgggacaccaacgacgccaacgtggtttgtcgccagttaggttgcggctgggccatgtcagcccctggcaacgcttggtttggacagggctcaggaccaatcgctcttgatgacgtccggtgtagcgggcatgagagttatctgtggtcctgtcctcataacggctggttgtcccataattgcggtcatggagaagatgctggcgtgatctgctccgcggcacagccccaaagtacgctcagacctgagtcctggccagtaagaatcagccccccagttcccaccgaagggagcgaaagctccctggccctgcgactggtaaatggtggcgataggtgcagaggccgagttgaggttctataccggggaagctggggtaccgtgtgtgatgattactgggatactaatgacgcaaatgtagtttgtcgccaacttgggtgcggctgggcaatgtccgctccaggcaacgcccagtttggccagggctcaggaccaatagtgttggacgacgtgaggtgcagcggccacgaatcctatttatggtcttgccctcataacggatggctgacacacaactgtggtcactctgaggacgctggagttatttgctccgcaccccagagccggcctacgccctccccagatacatggccaacctcacatgccagtacggctggtcctgaatcctctttagctttgcggctggtcaatggaggcgacaggtgccaagggcgagttgaggtgttatacagaggctcttggggcacagtatgtgacgatagttgggacacaagcgatgctaacgttgtatgcagacaactgggctgcgggtgggcaacttctgcccctggaaacgctagatttggacagggatccgggccaattgtgctggatgatgttcgctgtagtgggtatgagtcttatctttggtcctgtcctcacaatggctggctctcccataattgtcagcattcggaggacgccggagtgatctgttccgctgcccatagttggtccactcctagtccagatactctgcctacaatcactctgcccgcttccacagtgggcagtgagtcctccctggctctgcggttggttaatggaggcgacagatgccagggacgcgttgaggtgctttatcggggatcatgggggaccgtgtgtgatgattcatgggacactaatgacgctaatgtggtgtgtagacagttagggtgtggatgggcaatgcttgcccctggcaacgccagatttggacaagggagtgggccaatcgtgttggatgatgtcaggtgcagcggaaacgagtcgtatctgtggagttgcccccacaatggctggctgagtcacaactgtggacactctgaagatgcaggggtcatctgttccggccctgaatccagccttgccctgcgcctcgtgaacgggggagacaggtgtcagggtagggttgaagtgctgtaccgcggaagttggggaacagtgtgcgatgactcttgggacactaacgacgctaacgtcgtgtgcagacagttaggttgcggatgggctactagtgcaccagggaatgccagattcgggcaggggtccggaccgatcgtgctcgatgacgtgcgctgtagcgggcacgagtcctacctgtggagctgtcctaataacggctggctatcccacaactgtggtcaccatgaagatgctggcgttatttgctcagcagcacaatcaagaagcaccccgcgacctgacaccctttccaccatcacgctccctccttctaccgtgggcagcgagtcgagtttaaccctgcggctggtaaacgggagtgatcggtgtcaaggccgagtcgaagtactctaccggggatcctggggtacagtgtgcgacgatagctgggacaccaacgatgccaacgttgtatgtcgccagctgggttgcgggtgggccacatccgcccctgggaatgccaggtttggtcaaggctcaggcccaattgtgctggacgacgttagatgctccggccacgagtcttacctctggtcgtgcccccacaatggttggctcagccacaactgcggccatcacgaagatgcaggcgtcatatgctcggtgtcacaatcccgccctaccccctcacctgacacatggcccaccagtcacgcaagcactgcaggcccagaatccagtctagcactgaggcttgtgaacggcggtgacaggtgtcagggcagagttgaggttctctaccgagggtcttggggtacagtgtgcgatgatagctgggacacaagtgatgcgaacgtggtctgcagacagctcggctgcggatgggccacctcagcccctggcaacgctcgcttcggacaaggcagcgggcctatcgtgctggatgacgtgcggtgttccggttacgagagttacctatggtcctgtccacacaatggctggctgagccataattgccaacatagcgaagacgcaggcgtgatctgcagcgccgcacactcgtggtccaccccatctccagacacattgccgactattaccctcccagctagtaccgtgggcagtgagagctctttagctctgcggttggttaacggtggcgataggtgtcaagggcgagtggaagtcctctatcaaggcagctggggtacagtgtgcgatgactcttgggataccaacgacgccaacgtggtgtgccgccaattgggctgcggttgggccatgtcagcacccggtaacgcgaggttcgggcagggtagcggccctatcgtgctggacgacgtgagatgctcaggccatgagtcttacttgtggtcttgcccgcacaacggctggctatcccacaactgtgggcatagcgaagatgccggtgtgatttgcagcgcaagccagagtcgcccaaccccctctccggacacctggccgacatctcatgcctctaccgcaggcagtgagtcgagcctcgctttgcgactggtcaatggaggcgatagatgccaggggagggttgaggtcctatacaggggctcttggggaaccgtatgcgacgactattgggataccaacgatgccaacgtcgtgtgccggcagctgggatgtggatgggctatgtctgcaccaggtaacgccaggttcgggcagggttccggccctattgttctagacgatgttagatgctccgggcacgagagctatctctggtcatgtcctcacaacgggtggctgagccataactgtggccaccatgaggacgccggagtgatttgctcagcatctcagtcccagcctacaccgtcaccagatacttggcccacatctcacgcctcaacagcaggtagtgagagcagcctggcgctcaggcttgtcaatgggggagacagatgccagggcagagttgaagttctgtacagggggtcttgggggaccgtgtgtgacgactattgggacactaatgatgcaaatgtcgtgtgtcggcagcttgggtgcggttgggccacgagtgcaccaggcaatgctcgattcggtcaagggagcggacccatagtgttggatgacgtccgttgtagcgggcacgaatcttacctatggtcatgtccacataacggttggctaagccataactgtggtcatcacgaggacgccggagtaatttgttcggcaagtcagtctcagccaaccccaagccccgacacgtggcccactagtcacgcatcaactgctggcagtgagtcctctctggccctgcgcctggtaaacgggggagaccgctgccagggtagggtagaagtgctatataggggatcatggggtacggtgtgcgacgattattgggacacaaacgacgccaacgtcgtatgtcgacagttgggctgcgggtgggctacatctgctcccggaaacgccagattcggccaggggtcaggccctatagtgctggacgacgtgcgctgtagcgggcacgagtcttacctgtggagctgcccacacaacggatggctgagccataattgcggccaccacgaggacgcaggcgtcatatgtagtgcttcacagtctcaacctacaccttcccccgatacctggcctacttcccgcgcttctaccgccggttcggaaagcacacttgctctgcgattggttaatggaggggatcggtgtcgcggacgcgtggaggtcctctatcagggcagctggggcacggtttgtgatgactactgggacactaacgacgcgaacgttgtgtgccgacagctggggtgcggatgggcaatgagtgcgccaggaaatgcccagttcggacagggttcagggcctatcgtgttggacgacgtgcggtgctccgggcacgaaagttatctttggtcgtgccctcacaacggatggctgtcccacaactgtgggcaccatgaggacgctggtgtgatttgcagcgccgctcagagtcagagtacccctcggccagacacctggctaacaacaaatctacccgcactgacagtgggaagtgagagcagtctggccttgcggctggtcaatggcggtgaccgttgcaggggccgagtcgaggtgctgtacaggggatcttggggcacggtctgcgatgacagttgggataccaacgatgcaaacgttgtgtgccgccagcttggctgtgggtgggctatgtcggcccctggcaacgctaggtttggacagggctcagggccaatcgtgcttgatgacgtgcgctgctcagggaacgagtcatatctgtggagctgtccccacaaaggatggttgacccataattgtggacatcacgaggatgctggcgtgatctgctccgcaacgcagattaatagcacaaccacagattggtggcaccccactacaactaccacagccaggccgtccagcaattgtgggggtttcctgttctatgccagcggcacatttagcagtccatcctaccctgcctattatcctaataacgccaagtgcgtctgggaaatagaagttaatagcggatatcgaatcaatctcggattcagtaaccttaaactggaggctcaccacaattgcagcttcgattatgtcgaaatttttgatgggtcccttaattcctccctacttcttggcaaaatctgtaatgacactaggcaaatttttacttctagctacaacaggatgacaattcattttcgctctgatatcagtttccagaatacaggattcttggcctggtacaactctttccctagcgatgctactctgcggttggtgaatctgaactccagctacggcttgtgtgccggtagggtcgagatttatcatggaggaacctggggaaccgtgtgcgacgatagctggaccatccaggaggcagaggttgtgtgtaggcagctggggtgtgggagggccgtgagcgcactaggtaatgcgtatttcggctcgggctctgggcctattactctcgacgacgttgaatgttcagggaccgagtctaccctctggcagtgtcggaaccgcggatggttttcacacaactgtaatcaccgagaagatgcaggagtgatatgctcaggaaatcacctaagtactccggctcctttcctgaatattacacgccctaacactgattacagctgtggaggatttctgagccagcccagtggcgatttcagctcaccattttaccccggaaactatcctaataatgccaagtgcgtttgggatatcgaggttcaaaacaactatagagtcaccgtaatctttagggacgtgcagctcgaaggcggatgcaattatgactatatcgaagtgtttgatggtccctacagatcttcgcctctgatcgctagagtatgtgacggtgcacgcggaagctttaccagcagttcaaacttcatgtctatccggtttatctccgatcacagcattacccggcgtggcttcagagctgagtattatagttcacccagcaatgactccaccaacctgttgtgcttaccaaaccacatgcaggcatcagtaagccgttcatacctgcagagccttggattctcagcaagcgatttggttattagtacgtggaacggatattatgagtgcaggcctcagattacacccaaccttgtcatctttactatcccctactcaggatgcggaaccttcaagcaggccgacaacgacactatcgactacagtaactttctcaccgcggctgtcagtggtggcatcatcaagagaaggaccgacttgcggatccacgtgtcttgccggatgctgcagaatacctgggtggatacaatgtatatagctaacgatacgatccatgttgccaacaacacgattcaggtggaagaggtacagtatggcaatttcgacgtgaatatatccttttatacctcaagctccttcctgtatcctgtcacatctaggccgtattatgtcgatttgaatcaggatctgtatgtgcaggcggaaatactgcattctgacgccgtccttactctgttcgtggatacatgtgtggccagtccttactcgaacgatttcacctcactgacctacgatttaatccggagtggctgtgtcagagacgatacctatgggccttacagtagtccctctctgagaattgccagatttcgttttcgggcatttcacttcttaaatagattcccaagcgtgtacctgagatgcaagatggtggtgtgccgcgcttacgatccgtcaagccggtgttaccggggatgtgtgctcaggtctaagcgggatgtcggctcttatcaagaaaaggtcgacgtggtcctcggccctattcagctccagaccccccctaggagggaagaagagccacggta

SEQ ID NO: 28347 - DNA, 7212 bp, synthetic construct
  misc_feature 1..7212: note = Description of Artificial Sequence: Synthetic coding sequence
  source 1..7212: mol_type = other DNA
atggggatttcaaccgttatactagagatgtgcctcctgtgggggcaggtgttaagtaccggagggtggattccgagaacaacagattacgccagcttgattcccagcgaggtgcctttggaccctacggtcgctgaaggaagcccgttccccagcgaatcgactctcgaaagtaccgtagccgaagggtcacctatctcactggagtcaactctcgagtccactgtcgcagagggatccctgatcccaagcgaatcaaccctcgagagcacagtagctgagggcagcgatagcgggctggcactgcggctggtgaacggagacgggaggtgccaggggcgagtggaaatactgtacaggggtagttggggcactgtatgtgacgacagctgggatactaacgacgctaacgtggtttgtaggcagctcgggtgtgggtgggcaatgagcgcaccaggaaacgcgtggtttgggcaggggtccggtccaatcgccctcgacgacgtccggtgtagcggacacgagtcttatctatggtcatgcccgcacaatggctggctttctcataactgtggtcacggcgaagatgcaggagtaatatgtagcgccgctcagccacagtccacactgcggcctgaatcctggcctgtgaggatctcccccccagtgccaacagaggggtctgaatccagcttggctctgcgtcttgttaacggaggcgaccgatgtcgagggcgtgttgaggtgttgtacagggggagctggggcacagtgtgcgatgactactgggatactaacgatgcaaatgtggtctgccgccagttggggtgcggttgggccatgagcgccccagggaatgcccaatttgggcagggttcagggccaatcgttttggatgacgtccgttgcagtggtcacgagagttacctttggagctgtccacataacgggtggctgacccacaattgtggacacagtgaagatgcgggagtgatctgcagtgcgccacagtctaggcccacgccttcccctgacacgtggcccacctctcacgcttctacagccggtcctgagagctccctcgcgcttcgcctggtgaatgggggagaccgatgccagggtagggttgaggtgttataccgaggatcttggggaacagtctgtgatgactcttgggacacatctgacgcaaatgttgtctgtcgacagttagggtgcgggtgggccacatctgctccgggaaatgcgaggtttggccaggggtctgggcctatcgtgcttgatgacgtccgttgcagcggctacgagagctatctgtggagttgcccccacaatggttggctgagccataactgtcaacatagtgaggatgctggcgtgatttgcagtgataccctccctacaataactcttccggcatcgacagtgggctcagagtcttctttggcattaagattagtgaacggcggtgatcgctgccagggcagggtcgaagttctttaccgcggatcttggggcacagtatgcgacgattcttgggacactaacgatgcaaatgtggtctgtcggcagctgggctgtgggtgggctatgctggcacctggaaacgctcggtttgggcaggggagcgggcctatagtacttgacgacgtccgttgctcaggaaatgagagctatctctggagttgccctcacaacggctggctttcccacaactgtggacactccgaggacgccggagtaatctgtagcggccctgagagctccctcgccctaagactggtgaatggcggagacagatgccaaggtagagttgaagtgctctatcggggtagctggggaaccgtttgcgatgactcttgggacaccaacgacgctaatgttgtgtgcaggcaactaggctgcgggtgggcaactagcgcgcctggcaatgctcgcttcggccagggtagcggaccgattgtcttagacgatgtcagatgctctggtcacgagagctatctatggtcatgtcctaataatggctggctgtctcacaattgtggacaccatgaggacgcaggagtgatctgttctgcagcgcagtctcgctccactccacgacccgacaccctctccacaataaccctgccaccctccacggttggttctgaatcctccctgaccctccggctggtcaatggctcagaccggtgccagggtcgggtggaagtgctctatcgtggcagctggggcactgtgtgtgacgattcttgggacactaatgacgcaaacgtcgtgtgcaggcagctgggatgtggatgggctacatccgcacccggtaacgcacgctttggccaaggctcaggtcccatcgtgctcgacgatgtgcgatgcagtggccacgagagttacctctggtcttgtcctcacaatgggtggctctcgcataactgcggccaccacgaagacgctggggtgatttgtagcgtgtcccaatcacggccaacaccttccccagatacatggcctactagtcatgccagtacggctggaccagagtcctcattagctctgcggctggtgaatgggggtgaccggtgtcagggaagagtagaagttctgtacagaggcagctggggtacggtatgcgacgattcttgggatactagtgacgcgaatgtcgtgtgtaggcaattgggatgcggctgggctaccagtgcccctggtaacgcccgttttggacagggaagtgggcctatcgtactggacgatgtgaggtgctcgggctacgagagctacctgtggagctgtcctcacaacggttggctatctcacaactgtcagcatagcgaagatgccggagtgatatgcagcgctgctcactcctggagcacgcccagccccgacaccttgcctaccatcaccctgcccgcttctaccgttggcagcgaatcttctctcgcactgaggctggtcaacggaggcgataggtgtcagggcagagtcgaggtactgtaccagggatcatggggaacggtttgcgacgacagctgggataccaacgatgccaatgtcgtctgtcggcaactgggctgtggctgggcaatgagcgcacccggaaacgcccgatttgggcaaggatccggaccaattgtgctagatgacgtgcgctgcagtggacatgagtcctatctctggtcctgtccacacaatgggtggctgtcacacaactgcggccactctgaggatgcgggagtgatttgttccgccagccagtccagacctacaccgagtccggacacttggccgacctcccacgcttctaccgccggttccgaaagttcactcgctttgcgattggttaatggcggtgatcggtgccaagggagagttgaggtcctctatcgcggaagctggggcacagtatgcgatgattactgggatacaaacgacgccaatgtggtttgcaggcagttagggtgcgggtgggctatgtctgcccctggcaacgcgagattcggacagggcagcggtcccattgtactggacgacgtgcgctgttccggccatgagtcgtacttgtggtcatgcccccacaacgggtggctctctcacaactgcggacatcatgaggatgccggtgtgatctgctcagcctcccagagccagcctacaccttcaccagacacatggccaacaagtcacgcttcaacagcaggttccgagtcctcactcgctttacggctggtgaacggaggggatcggtgccaaggaagagtagaagtgctctacaggggttcttggggcaccgtttgcgacgactactgggacaccaacgacgctaatgtcgtgtgtagacagctgggctgcggctgggccacatcagcgccaggcaacgcacgattcggccagggatccggtccgattgtgcttgacgatgttcgatgttccggccacgaatcctatctctggagctgcccacacaatggatggctgtctcataactgcggccaccatgaagacgccggagttatttgctcagcctcccagtctcagccgactcccagtcccgatacatggccaacttcccatgccagtactgctggctccgagtcatcactggctttacggctcgtcaacggaggagatcgttgccagggcagggtggaggtactctacaggggttcctgggggactgtgtgtgacgattactgggatactaacgacgccaacgtagtctgtcggcaactcggttgcggctgggctacgagcgcacctggcaatgccagattcgggcagggatctgggccaattgttctggacgatgtgagatgttcaggacatgaaagttacttatggtcttgcccccataacgggtggttaagccataactgcgggcatcacgaggacgctggggtcatatgcagtgcaagtcagtcccagccaactccaagcccggacacgtggcccactagcagggcttccactgctggaagtgaatctacccttgccctgcgacttgtgaatggcggtgatcggtgccggggacgcgtcgaagtgttgtatcagggaagctgggggacagtgtgcgatgattactgggacaccaatgacgctaatgtcgtgtgtcgacagctgggctgtggttgggccatgagtgccccaggcaatgcccagttcggtcagggctcaggtcctatcgtcctagatgacgttagatgctctggacatgagtcttacttatggtcatgcccgcacaatggatggttatcccacaactgcggccaccatgaagacgcaggcgttatctgtagtgccgctcaatcccagtccacaccccgaccggatacctggctcacaacgaatctacccgcattaacggttggaagcgaatcatctttggcattgcgcttggtcaacggcggagaccgctgccggggtcgcgtggaggtgttgtatagaggctcttggggaactgtgtgcgatgactcgtgggacaccaatgatgcaaatgtggtgtgcagacagttagggtgcggctgggccatgtccgccccagggaatgctcggttcgggcaggggagcgggccaattgttctcgacgacgtgcgatgctccggcaacgaatcctatctttggtcttgcccgcacaagggatggctcacccacaactgcggacaccacgaggatgctggagtgatttgctcggctactcagatcaattccacaactaccgattggtggcatccgacaacaactacaaccgccagaccttcttccaactgcgggggttttctattttacgcttctggtaccttttcttcacctagttatcctgcatactaccctaataatgccaaatgtgtgtgggaaatcgaggttaattccggctaccgaattaacctcgggttctcaaatctgaaattagaggcacatcacaattgctctttcgactacgtggagatcttcgatggttctctcaattcgagtctgctgttggggaaaatctgtaacgacactaggcagatcttcacgtcaagttataatagaatgacaatccacttccggtctgacatttcatttcaaaacaccggattcctcgcctggtataattcattcccttctgatgctacccttagactagtcaatcttaactctagttatggcctgtgtgctgggagagtggagatctatcatggagggacctgggggacagtgtgcgatgacagctggactatccaagaagcagaagttgtttgtaggcagcttgggtgcggcagggccgtgagtgccctcgggaatgcttacttcggatctggatcaggccctattaccctggacgacgttgagtgctcgggaaccgaatccacactttggcagtgcagaaacaggggatggttcagtcacaattgtaatcatcgtgaagatgctggggtgatatgtagtggcaatcacctgtcaacaccagcaccatttctgaatattacaaggcccaatacagactactcctgcggaggctttttgtcccaaccctcaggcgatttttccagtccattctatcccggaaactatcctaataacgccaaatgcgtttgggacatcgaggttcagaataattacagagtgaccgtgatctttcgggatgtccaactggaggggggttgcaattatgactatatcgaagtgttcgacgggccatatcggtcgagcccacttattgcccgtgtgtgtgatggcgcacggggaagcttcacatcaagctcaaacttcatgtctatacgcttcatatcagatcacagtattaccaggcgcggtttccgcgcagaatactattcaagcccgagcaacgactctactaacttactctgtctgccaaatcacatgcaggccagcgtctcaagatcttacctgcaaagcttgggtttttccgctagcgacctggttatctcaacatggaatgggtactacgagtgtcggcctcaaatcacccccaacctcgtgatttttacgataccctatagcggatgcggtacttttaagcaggccgataatgataccatcgactatagtaactttctgacggccgctgtgagcggcggaatcatcaagcgcaggactgaccttaggattcatgtcagttgtagaatgctccagaacacctgggtggacaccatgtacatcgcaaatgatacaattcatgtggcaaataataccatccaagtggaagaagtacagtacggtaatttcgatgtgaacatttccttttatacttcgagtagtttcctttatcctgtaacgtcacggccttattacgtagatcttaaccaagatctgtatgtgcaggccgaaatcttacatagtgacgccgtcctcacgctgtttgtggacacgtgtgttgccagtccttactccaacgactttaccagcctgacgtatgatctaatccgatccggatgtgtgagggacgacacctacgggccttattcctccccatccttgcgtatcgcgcgttttaggtttcgggcttttcacttccttaaccggtttccctcagtgtatttgagatgtaagatggttgtttgcagagcatatgacccttctagtagatgttatcgaggttgtgtgctccgttcaaagcgggatgtggggagttaccaggagaaagtggacgtcgttttggggcctatccagctacagactcccccaagacgggaagaagagccaaggtaa

SEQ ID NO: 28348 - DNA, 5357 bp, synthetic construct
  misc_feature 1..5357: note = Description of Artificial Sequence: Synthetic coding sequence
  source 1..5357: mol_type = other DNA
atgggtatctcaactgtcatcttggaaatgtgccttctttgggggcaggtactttcaacaggtgggtggatccccaggacaacagactatgctagcctgattcctagcgaagtgccactcgacccgactgtggcagaaggttctccgtttccaagcgagtctactctggaaagtaccgtagcggaaggttctccgatctctctggagtctactctcgaatcaaccgtggcagaagggagcctcataccctcagagagtaccctggagtccacagtggcagagggctcagactctggtctcgcgctgcgtcttgtgaacggggacgggaggtgtcaggggcgtgtggaaattctttataggggctcttgggggaccgtgtgtgatgacagttgggatactaatgacgccaacgtggtgtgtagacaactgggctgtggatgggctatgtctgcccctggcaatgcatggttcggccaaggctcaggaccgatcgcgctagacgacgtgagatgtagtggccacgagtcctatctgtggtcctgcccccacaatggttggctctctcacaactgcggacatggcgaagacgccggagttatctgcagcgccgcacagccgcaatctaccctgcgccctgagagctggccggtcaggatttcgccccctgtccccacagaggggagcgaaagcagcctcgctctcaggctggtcaacggcggtgaccgatgtcggggacgcgtggaagtattataccgtgggagttggggtactgtgtgtgatgactactgggacacaaacgatgctaatgtggtatgccggcagcttggatgcggatgggccatgagcgcaccaggcaacgctcagttcggtcaaggatctggccctatagtcctcgacgacgttagatgtagcgggcacgaatcctacttgtggtcatgcccgcacaacggatggttgactcataactgtggacactcggaggacgctggcgtgatttgctcagcaccccaatcacgcccaacccccagccctgatacgtggcctactagtcacgctagtactgcaggacccgagtcatcactggcactccgactggttaatggcggtgatcgttgtcagggcagggtggaggtactgtacaggggatcctggggcactgtctgtgatgattcgtgggacacatccgacgccaatgttgtgtgcaggcagttggggtgcggatgggccacctccgccccaggcaatgccaggttcgggcagggatctggaccaattgtactggacgacgttcgatgtagcggttatgaatcatacctgtggagctgcccccacaacggctggctgagccacaactgtcagcatagcgaggatgctggggtgatctgcagcgccgcacacagctggagcacaccatctcctgacactctgcccaccattacgctccctgcctccaccgtgggtagcgaatcctctctggcactgagactcgtcaatggcggtgaccggtgccagggtcgggtggaggtcctctaccaggggtcctggggcaccgtttgcgacgactcctgggacaccaatgacgcaaatgtcgtgtgtagacaattaggatgcggctgggccatgtcagctcccggtaacgctcgtttcggtcagggtagtggccctattgtgctcgatgatgtcagatgctccgggcatgagagctatttatggagctgtcctcacaacggttggctgtcacacaattgtggccattctgaggatgccggtgtcatttgtagcgccagccagagtagacctacaccaagtccagacacttggccaacctcccatgcttccaccgcagggagtgaatcttctctggccctgcggctcgtgaatgggggtgatcggtgtcaggggagagtcgaggtgctctatagaggaagttgggggacagtgtgcgacgattattgggatacaaatgacgccaatgtggtgtgccgccagctgggttgtgggtgggctatgtccgctccgggaaatgcacgattcggtcagggcagcggacctattgtgttggatgatgtcaggtgttccggccacgaaagctacctgtggagctgtccccataatggatggcttagccacaattgtggccatcacgaggacgcaggcgttatttgctccgccagccagtcccaacccacaccttcgcccgacacatggcctactagtcacgcatctaccgcaggcagcgagtctagcttggctcttcgccttgtgaacggcggagatcgctgccaaggccgtgtcgaagtcctctaccgcggttcctgggggaccgtgtgcgatgattattgggatacaaatgatgcaaatgttgtgtgccggcagctggggtgcggatgggctacgtccgctcccggaaacgccaggttcggccaggggagcggcccaattgtcctagatgatgttagatgttctggacacgaatcttacctttggagttgccctcacaacggatggctctctcataactgcggccaccacgaagacgcaggcgtaatatgctcggccagtcagagccagccaaccccaagtcctgacacctggcccacatcaagagcctctacagctggcagcgaaagcaccctggccctgcgtttggtgaacggcggagacagatgtaggggccgagttgaggttctgtatcagggttcttggggaacagtatgtgatgactactgggataccaacgatgctaatgtagtctgcagacagcttgggtgcggctgggccatgtccgctcccggaaatgctcagttcggacaggggtcgggccctatcgtgctcgacgacgttcgctgctctggccacgagtcctacctgtggtcctgcccccacaacggctggctgagccataattgtggacaccacgaggatgctggcgtcatttgtagcgcagctcaatctcagtcaactcctcgtcccgacacgtggttgaccaccaatctgcctgcgctgacggtgggtagcgagtcgagtcttgcgctgcgtttggttaatgggggtgatcgctgtagagggcgtgtggaggtactctacagggggagttggggtacagtctgcgatgactcttgggatacgaacgatgctaatgtcgtatgtcgccagctcgggtgtggatgggccatgtccgctcccggtaatgcaagatttgggcaaggaagcgggcctattgtcctcgacgatgttcgctgctccggcaacgaatcctatctctggtcatgccctcacaaaggctggctgacccataattgcggccatcacgaagatgcgggagtcatttgttcagctacccagatcaacagcaccactacggattggtggcatccaacaaccaccaccacagccaggccttctagtaactgcgggggattcttgttttacgcgtccggtaccttttcctcaccctcttaccccgcttactatccaaacaacgctaagtgcgtttgggagatagaagtcaactcgggatatcggatcaatctgggcttttctaaccttaagctggaagcccaccataattgttcttttgactacgtagaaatctttgatggatcactaaactcaagtctgctactcggtaagatttgtaatgataccaggcaaatctttacgtcgtcgtacaatcgcatgactatccacttccggagtgacatcagctttcagaatacaggctttctagcatggtataactccttcccttctgatgcgacccttagactggtgaacctgaattcctcttatgggctgtgcgcaggcagagtggaaatttatcacggcggaacatggggcacggtatgtgatgacagctggacaattcaggaggcggaggtggtatgcaggcagttggggtgcgggcgtgctgtgagcgccctgggcaacgcatactttggaagcggttcaggtcccatcaccctggacgacgtagagtgtagcggaacagagtctacactgtggcagtgtaggaatagggggtggttttctcataattgtaatcacagggaggacgctggagtcatctgtagtggcaaccacctcagtacacccgctccgttcttaaacataactcggccaaacacggattatagctgcggaggtttcttgagccaaccttctggtgatttcagttcccctttctaccctggaaactatccaaacaacgcaaaatgcgtctgggacattgaagtgcagaataattaccgggtcacggtgattttcagggacgttcaacttgagggaggatgcaactatgattacatcgaagtgtttgacggtccttataggagttcacccttaatcgcccgtgtgtgcgacggtgcccgtggtagtttcacttccagctcgaacttcatgtcaatcagatttatctcagatcacagcattacaaggagaggattccgggctgagtattattcgtctccgtcgaatgacagcaccaacctcctctgcctgccaaatcatatgcaggcatccgtctctcgatcatacctgcagtctttaggctttagtgcctctgacttggttatttccacctggaatggatactatgaatgcaggcctcagattacaccgaacttagttattttcacaattccctactcaggttgtggaacatttaagcaagcagacaatgatacaatcgactatagcaacttcctcactgccgcagtctcaggaggcattattaagcggagaactgatctgagaattcacgttagctgccggatgctgcagaacacttgggtcgacactatgtacatcgccaacgacacaatccatgtggccaataacaccattcaggtggaggaggttcagtatggcaattttgatgtgaatatatcattttatacttcctcatccttcctttacccagtgacttcccggccatattatgtggatttaaaccaggacctctatgtccaagctgagatcctccattcagatgccgtattgaccctgttcgtagatacatgcgtggcttccccatacagcaatgacttcacatccctgacttatgacttaatacgaagcggttgcgtacgggacgatacttacggaccctacagctcaccttcattgcgtattgccagatttcggtttcgggctttccatttcctgaatcggttcccttctgtgtacctgagatgtaaaatggtggtctgcagagcctacgacccgtcgtccagatgctacagaggctgcgtgctgaggagcaaaagagatgtgggatcatatcaagaaaaagtggacgtggtgctcggcccaatccagcttcagaccccacccaggagggaagaagaacccaggta

SEQ ID NO: 28349 - DNA, 597 bp, synthetic construct
  misc_feature 1..597: note = Description of Artificial Sequence: Synthetic coding sequence
  source 1..597: mol_type = other DNA
atggccgcagacatttcggaatcctccggagcggactgcaaaggcgacccacggaatagcgccaaactggacgcagactaccctctccgcgtgttatactgcggtgtatgttctctgccaactgaatattgtgagtacatgccagacgttgccaagtgtaggcagtggcttgaaaaaaatttccccaacgagttcgcaaagcttactgtggagaattcccctaagcaggaggccggaatatccgaggggcagggcactgccggagaggaagaagagaaaaagaagcagaagagaggcggacgcggtcagataaagcagaagaagaaaactgtgccgcaaaaagtcactattgcaaaaataccacgcgcaaagaagaagtacgtgaccagggtctgtggactggctacttttgagattgatcttaaagaagcccagcgcttcttcgcacagaaattttcatgcggcgcatccgtcaccggggaggatgagatcattattcagggcgacttcacggatgacatcattgatgtgattcaggaaaaatggcctgaggtggatgatgatagtattgaagacctgggcgaggtgaagaagtag

SEQ ID NO: 28350 - DNA, 1530 bp, synthetic construct
  misc_feature 1..1530: note = Description of Artificial Sequence: Synthetic coding sequence
  source 1..1530: mol_type = other DNA
atggatcctccgcgtgcctcacacctctcacctcgtaagaagcgtccacgacagacaggagccctaatggctagcagcccacaagacattaagttccaggacctcgtggtgtttattctagagaagaagatggggaccactcggagagcttttcttatggagctggctcgtcggaaagggtttagagtcgagaatgaactgagtgactccgttacccacatcgtggccgaaaataattctggctcagacgtactggagtggctccaggcccagaaagtacaagttagctcacagcccgaacttctggatgtcagctggttgattgagtgcatccgtgcaggcaaaccagtggagatgactggtaagcatcagctcgtggtacgcagggattactctgattcaactaacccgggtccacctaagaccccaccgatagcggtccagaagatctcacaatacgcctgccagcgcagaacaaccctgaacaattgtaaccagatttttactgacgcatttgatattcttgcggagaattgtgagttccgcgagaacgaagattcatgcgtaacttttatgcgcgctgcgtccgtcctcaagtccttgccgtttaccatcatttccatgaaggacactgaaggaatcccttgcttaggttcgaaggtgaaagggatcatagaggaaattatcgaggacggggaatccagtgaagtgaaagccgtgctaaacgatgaacggtaccaatcattcaaactctttacctccgtctttggtgtgggcctgaaaacctccgaaaaatggtttagaatgggctttcgaaccctatcaaaagtgcggtccgacaagagtttaaaatttaccagaatgcagaaagcgggatttctgtactatgaagatctggtcagctgcgtgacacgcgcagaggccgaggccgttagcgtccttgtgaaagaagccgtgtgggccttccttcctgacgcctttgtgactatgactggtggttttcggcgagggaagaaaatgggacatgacgtcgatttcctgatcacaagccctggatccaccgaggacgaagagcaactgctgcagaaggtcatgaacctttgggaaaagaaaggcttgctcctgtactatgacttagtggagagtaccttcgagaaactgcgcctgccatcccgcaaggtggatgccctggaccactttcagaaatgctttctgatttttaaattgccacgtcagcgcgtggattccgatcaatctagctggcaggaagggaaaacctggaaagccattagggtggatctggttctctgcccgtacgagcgcagagccttcgctctgctgggatggacagggagcagacaattcgagcgggacctgcggaggtacgccacgcatgagagaaagatgatcctcgataaccacgccttatacgataagaccaaaagaatctttctgaaggctgagagtgaggaggagattttcgcacatctcggtttggactacattgaaccctgggaacggaatgcctag

SEQ ID NO: 28351 - DNA, 1527 bp, synthetic construct
  misc_feature 1..1527: note = Description of Artificial Sequence: Synthetic coding sequence
  source 1..1527: mol_type = other DNA
atggatcctccccgagctagtcatctgtctcctagaaaaaaaagaccccgtcagaccggtgccctgatggcgtcttctccacaagacatcaaatttcaggatcttgttgtattcattttggagaaaaaaatgggcacaactagacgagcatttttgatggaactcgcccgacgtaagggattccgcgtggagaacgagctatcagattctgttacacacattgttgccgagaacaactcaggctcggacgttttagaatggctgcaggctcagaaggttcaggtgtcatcgcaaccggaactgttggacgtgagctggctgattgagtgcattcgtgccggaaaacctgttgagatgaccggtaaacaccaattagtagtaaggagggattatagcgatagcaccaacccaggaccaccaaagaccccacctatcgcggtccagaagataagccagtacgcgtgtcaaagaagaactactcttaataattgtaaccagatcttcacagatgctttcgatatccttgctgagaactgtgagttccgtgagaatgaagactcttgtgtgacatttatgcgggcagcctcagtgttaaaatcgctgcctttcaccattataagtatgaaagacaccgaaggcataccttgcttaggcagtaaagttaagggtatcattgaggagattatcgaagatggagagtctagcgaagttaaagcagtcttgaatgacgagaggtaccagtctttcaaattgtttacgagcgtgttcggcgtgggactcaagacctccgagaagtggtttagaatgggctttagaacgctgagtaaagtccggtctgacaaatcacttaaattcacgcgcatgcaaaaagcaggattcctctattacgaagacttggtcagctgtgtgacacgcgctgaggccgaggccgtgtccgtgctggttaaagaagctgtctgggccttcctccctgatgcgtttgtgacaatgacggggggattcaggaggggaaaaaaaatggggcacgacgtagactttctcatcacatctccaggctctaccgaggacgaggaacagctcctgcaaaaagtcatgaatctgtgggagaaaaagggtctgctgctttattatgatttggtggaaagcacattcgagaaactacgtctgccttctcgcaaagtcgacgccctggatcatttccagaaatgctttctgatctttaagctgcctcgccaacgggtcgattccgaccagtcatcctggcaggaagggaagacctggaaagccattagggtcgaccttgtgctctgtccctatgagaggagggcatttgcgctgttgggatggactggttccagattcgagcgagacctgcgaagatatgcaacccatgaaagaaagatgatcttagataatcacgcactctatgacaaaactaaacggatttttctgaaagcagaatccgaagaagaaatctttgcccatttaggcttggattacattgaaccttgggagcgcaacgcatag

SEQ ID NO: 28352 - DNA, 2544 bp, synthetic construct
  misc_feature 1..2544: note = Description of Artificial Sequence: Synthetic coding sequence
  source 1..2544: mol_type = other DNA
atggaagccgctcggccttctggatcatggaatggggctctgtgtagactgctcctcctcaccctcgctatcctcatcttcgcctccgatgcctgcaagaacgtgacccttcatgttccaagtaaattagatgctgagaaacttgtgggcagggtcaacctcaaagagtgttttactgcggctaacttgattcacagttccgatccagactttcagatactggaagatggatccgtgtacacaaccaacacaatacttctctccagtgagaaaagaagctttactatactgctgtctaatacagagaatcaggagaagaaaaagatctttgtgttcctcgagcaccaaactaaagtactcaagaaaagacacacaaaagaaaaagtgcttaggcgggctaaaagacgctgggccccaataccatgctccatgctcgagaacagccttggcccattccctctttttctccagcaggttcagtcagacaccgctcagaactacactatctactactccatccggggaccaggcgttgaccaggagccaaggaatctgttttacgtggaaagggacactgggaacctgtattgcaccagacccgtagatcgtgaacaatatgagagcttcgaaattatcgcctttgcaactacccctgacggctacacacccgagttgcctttacctctaatcataaaaatagaggacgagaacgataattaccctatatttaccgaagagacctataccttcaccatatttgagaactgtcgggtcggcactaccgtgggccaggtctgcgccacggataaggacgaaccagatacaatgcacacaagactcaaatatagtatcatcggccaggttcctcctagcccgacattgttttcaatgcatcctaccacaggcgtcatcacaacgactagcagccagctggacagggaactcatcgacaaataccagctgaaaattaaggtgcaggacatggatggccaatacttcgggctgcagacaacctctacatgcatcatcaatatcgacgacgttaatgaccatctgcctacttttactagaacctcctatgtgacctctgttgaggagaatactgtcgatgtagagattttacgggtgacagtggaggacaaggatttggtgaatactgccaactggcgcgctaattacacaatcctgaaggggaacgaaaacggtaactttaaaattgtgacagacgccaaaacgaacgagggcgtactctgcgtagtgaaacccctcaattacgaggagaagcagcagatgattctgcagataggagttgtaaacgaagccccattcagcagggaagcatccccacgttccgcgatgtctactgctacagtcaccgtcaacgtcgaagaccaggatgaaggccctgaatgcaaccctccaattcagaccgtacggatgaaagagaatgccgaggttggcaccacctccaatggctacaaggcctatgacccagagacccgcagttcgtcaggaatcaggtacaagaaattaacggatccgacaggatgggtcacaatcgacgaaaatactgggtctataaaagtctttcgcagcctggacagagaggcagaaacgataaagaacggtatttacaacatcactgttctggcgtcagaccagggcggtcggacatgtacagggacccttgggataattttgcaggacgtcaacgacaattctccatttataccaaaaaagaccgtgatcatatgcaaaccaactatgagctcagccgagatcgtggccgtcgaccccgatgagcccatccacggcccacctttcgactttagcctggagtcctcaactagcgaggtccagaggatgtggcggctcaaggcaatcaacgataccgccgcacggctgagctatcaaaatgaccctcctttcggttcatatgtggttcccatcaccgtgagggatcgattgggcatgtccagcgtgaccagtttggacgtgacactctgtgactgcatcaccgaaaatgactgcactcatagggtcgatccacgaattggaggaggcggtgtacagcttggcaagtgggctatccttgcaattctcttaggcatcgcccttctgttctgtatactgtttacactggtttgtggagcctcagggacatccaaacaacccaaagtgattcctgatgacttagcacagcagaatctgatagtctcaaacaccgaggcccctggggatgataaagtttatagtgcaaacgggtttaccacgcagaccgttggagcttccgcccagggggtctgtggaaccgttggaagtggcatcaaaaacgggggacaagagactatcgagatggtgaagggtggtcaccagacctcagaatcatgtagaggagccggacaccaccatacactggattcttgtcgcggaggccataccgaggtcgacaactgtaggtatacttacagtgagtggcactcattcacgcaacctagactaggcgaagagagtataagagggcatacactgattaagaattag

SEQ ID NO: 28353 - DNA, 2706 bp, synthetic construct
  misc_feature 1..2706: note = Description of Artificial Sequence: Synthetic coding sequence
  source 1..2706: mol_type = other DNA
atggaagctgctagaccttcgggatcttggaatggcgctttatgcagactgctgctactgacgctggctatcctgatttttgcctctgatgcatgcaaaaatgttacactgcacgtacccagcaaactggatgcagaaaaattagtcggaagggtgaatctgaaggagtgcttcaccgcagcgaatctgatccacagctctgacccagattttcagatactcgaggacggttctgtgtacacgacgaacaccatactgctgtcaagcgagaagcgctccttcactattctgctgagtaatacagagaaccaagaaaaaaaaaagatcttcgtgttcctcgagcaccagacgaaagtactcaagaaacggcacactaaagagaaagttctgaggagggctaagaggagatgggccccaatcccgtgttctatgcttgaaaatagtttgggacccttcccacttttcctgcagcaagtgcagagtgacacggcccaaaactacacgatttattactccatcagaggccctggcgtggaccaagaaccaagaaatctgttttacgtggagcgtgacacagggaacctctattgtactaggcccgttgacagggagcagtatgaaagctttgagatcatcgcctttgcaacgacccccgatgggtatactcctgagttacccctgcctctgattatcaagatcgaggatgagaacgacaactacccgatttttacagaagaaacctatacctttacaattttcgaaaactgccgagtcggtaccactgttggtcaagtgtgtgccaccgacaaggatgaacccgatacgatgcataccaggctcaaatatagtatcattggacaggtgccgcctagccccaccttattcagcatgcatccgacaacaggtgtgataaccactacgagcagccagctggatagagagcttatagataagtaccagctgaaaatcaaagtgcaggatatggacgggcaatactttggcctgcaaaccacctcaacctgcatcatcaatattgatgacgtcaacgatcatttaccgactttcacccggacttcctacgtcacaagcgtggaagaaaatacggtggatgtggaaattcttagggttaccgtcgaagacaaagatctagttaatactgccaactggcgggcaaattataccatactgaaaggtaatgagaacgggaacttcaagattgtcactgatgcaaagacaaacgaaggagtcctttgcgtggtaaaacctctgaattacgaggagaagcagcagatgatcttgcagatcggcgtcgtaaatgaagcccctttttctcgtgaagcttcccccaggtcagccatgtctaccgccactgtgacggtgaacgtagaagaccaggacgagggacccgagtgcaatccaccgattcagactgttaggatgaaggaaaatgccgaagtcggtaccacctccaacggttacaaggcgtacgaccccgagactcgctccagcagtggaataagatataagaaattaaccgaccccactgggtgggtaactatcgatgagaatacaggttcgatcaaggttttcagaagcctggaccgcgaggctgaaacaattaaaaacggcatttacaacatcaccgttttagcatctgatcaaggtggccgaacctgtacgggcaccctggggatcattctccaggacgtaaacgataactccccatttatccctaagaagactgttattatttgcaaaccaaccatgagtagtgccgagattgtggcggtcgaccctgacgagcccatccacggcccaccctttgacttctcactcgaaagcagcacatcagaagtccagcgcatgtggcgcctgaaagcaattaatgatacagccgcacggctttcatatcagaatgacccaccattcggaagctatgtcgtgcccatcactgtccgcgacaggcttggaatgtcaagtgtcaccagccttgacgtcacactctgtgactgtatcaccgaaaatgattgtacccatagagttgatccgcgtattggtggcggtggggtacagctggggaagtgggccatccttgctattctccttggcattgcgttactattctgcattctttttaccctggtctgtggcgcttccggtacctcaaagcaaccgaaggtcattcccgatgacctagcgcagcagaatctcattgtgtcgaacacagaggccccaggcgacgataaggtgtactctgccaatgggttcaccacccagacagtgggtgcaagcgcccagggtgtgtgcggcacagtagggtccggaattaagaacggaggccaggaaacaatcgaaatggttaagggtggtcaccagactagcgagtcttgccggggagccggacaccaccataccctggacagctgccggggaggacacactgaagttgataattgtcgttatacttactccgagtggcactcctttacacagcctagacttggtgagaaagtgtatctttgtaatcaagatgaaaatcacaaacacgctcaagactacgtactgacatacaactacgaggggagaggttccgtcgcgggatctgttggttgctgttctgagcgacaggaagaagacggtctggaattccttgacaatcttgaacccaaattcagaaccttagctgaagcctgcatgaagcggtag

SEQ ID NO: 28354 - DNA, 2745 bp, synthetic construct
  misc_feature 1..2745: note = Description of Artificial Sequence: Synthetic coding sequence
  source 1..2745: mol_type = other DNA
atggaagcggcacggccttctggatcttggaatggggcactatgccgtttgctgctgctgaccctggctattctgatctttgcttctgatgcctgtaaaaacgtgacactgcatgtcccaagtaagctggatgcggagaagttagttggccgagtcaatctgaaagaatgctttacggctgccaatctgatccactcatccgacccagattttcagatccttgaggacggttccgtgtatactacaaataccattctcttgtcctccgagaagcgctcattcacaatcctgctcagcaacacagagaatcaagagaagaaaaagatttttgtgtttttggaacatcagacaaaaattagcctgctggtgccgtggctttgcttagtagccgaggtgctgaagaaacgacataccaaggaaaaggtcctgcggagggccaagcgccgttgggcgccaattccctgctcaatgctcgagaatagtcttggacctttcccactcttcctgcaacaggtgcaatccgacacagcccagaattatactatctattatagcatcagaggacctggagttgatcaggaacccagaaatctgttttacgtagaacgcgacactggcaatctgtactgtacccgtccagtggatcgggagcagtatgagtcgtttgaaatcatcgcctttgcgaccacgcccgatggatataccccagagctcccactaccattaataattaagattgaggatgagaatgacaattatccaatcttcaccgaggaaacatacactttcaccattttcgaaaactgccgcgtgggtacaaccgtggggcaggtgtgcgcaacagataaggatgagcctgatacaatgcatactcgcctgaagtatagcattattggacaagtcccaccttcacctaccctcttttctatgcatccaactactggcgttattacaacgacctcatctcagctggaccgcgaactgatcgacaagtaccagcttaaaattaaagttcaggatatggacggtcaatactttggactgcagacgacgagtacttgtatcattaatatagatgacgtcaatgatcaccttcctaccttcactagaacgtcatatgtgacctcagtggaggagaacactgtggatgtcgagattctgcgcgttaccgtggaagacaaagatctggtgaatactgccaactggcgtgccaattacacgatactcaagggcaatgagaacggcaatttcaagattgtgacagatgctaagacgaacgaaggcgttctgtgtgtggttaagccactgaactatgaagaaaagcagcagatgatcctgcagatcggcgtagtgaatgaggcaccattttcaagggaagcctctccacggtccgctatgtccactgcgacagtgaccgtcaatgttgaggaccaggacgaaggacccgaatgtaatcctcccatacagaccgtgcgaatgaaggaaaatgccgaggttggcaccacatccaacgggtataaagcgtatgaccccgagacccgcagctcttccggtattcggtacaaaaagctgacagacccaacaggttgggtcactatcgatgagaataccggcagcatcaaggtctttagatctctagatagagaggctgagactatcaagaacgggatctataacatcactgtcctggcaagcgaccagggcggaagaacatgtactggcactctggggattattttgcaggacgttaacgataatagcccgtttattcctaaaaaaacagtgattatatgcaaacccaccatgtcctcagctgagattgttgcagtagaccctgatgagcctatccatgggccaccattcgatttctctctggagagttccacttctgaggtccagcgcatgtggcggttgaaagctatcaatgataccgctgctcgcctgagttatcagaatgaccctcctttcggcagctacgtggtaccgatcacagtacgggaccgcctgggaatgtcaagtgtgaccagcctggacgtgaccctttgtgactgcatcacagagaatgattgtacccatcgggtggacccgcgaatcgggggaggtggcgttcagctggggaagtgggccatcttggccattctgctgggtattgccctcctcttttgtatcttattcactcttgtatgcggtgcctccggaacatcgaagcagcctaaagttatccctgatgatttggcccaacagaatttgatagtcagcaacactgaggcccctggcgacgataaagtgtactctgccaatggattcaccactcagacagtgggagcttcagctcagggtgtgtgcggtaccgtcggctctgggattaagaacgggggacaggaaaccatcgaaatggtaaagggtgggcaccagacttcagaatcttgcagaggcgctggtcaccatcataccttggattcctgtcggggaggacacacggaagtggacaattgtcgatacacctatagtgagtggcactcttttacgcaacctcgactgggagagaaggtatacctatgtaaccaggacgagaaccataaacacgctcaggattacgtgttgacttataattatgaaggaaggggtagtgtggcagggagtgtggggtgttgctctgagcggcaggaagaagatggcctggagtttctcgataatttggagcccaagtttaggactctggcagaggcatgtatgaagaggtag

SEQ ID NO: 28355 - DNA, 2004 bp, synthetic construct
  misc_feature 1..2004: note = Description of Artificial Sequence: Synthetic coding sequence
  source 1..2004: mol_type = other DNA
atgaagatgatcactacccagtttctccaaaagaagctaattctgctgcaatttctgaagattgccgagtgggggacgacagttggccaggtgtgcgccacagataaagatgaacccgacacaatgcataccagattgaagtattccatcatcggacaggtacccccatctcccacccttttctcaatgcacccaacaacaggagtcataacaactacctcttcccagctcgaccgtgagctgatcgacaagtaccagttgaaaatcaaggtccaggacatggacggccagtacttcggcctacagaccacatccacctgcatcatcaatatcgatgacgttaatgaccatctgcccacctttacacgcacatcatacgtgacgtcggttgaggagaatactgttgacgtcgagattctgcgggtaactgtggaagacaaagatctagtaaacacagccaactggcgcgcaaattatacaatcctgaagggaaatgaaaatggtaattttaaaattgtcaccgatgctaagacgaatgaaggggtactgtgcgtggtgaagccgctaaactatgaagagaaacagcagatgattttgcaaatcggcgtcgtaaatgaggcacccttctctcgggaggcctcacccagaagtgcaatgagtacagctactgtgaccgttaacgttgaagaccaagacgaggggcctgagtgtaacccgccaatccagacggtccgcatgaaggagaacgcagaggtggggaccacatcaaatggatataaagcctacgaccctgagacacgctcaagctctggcatccgatataaaaaattaaccgacccaacgggctgggtgaccatagacgagaataccggttccattaaggtgttccgatctttggacagggaagccgagactatcaagaacgggatttataacatcacagtcctcgcctccgaccaggggggacggacatgcactgggacgttgggaatcattctacaggacgtgaacgacaactctccattcatccccaaaaagactgtgatcatctgtaagccgaccatgtcctccgctgagattgtcgctgtagatcctgatgaacccatccacgggccaccattcgatttttctctggagagcagtaccagtgaagtgcaaagaatgtggaggcttaaggccattaatgacacggctgctaggctgagctaccaaaatgaccccccatttggctcttatgttgtgccaattaccgtgcgagataggttagggatgagctcggtcacctctctggatgtcaccctctgtgattgcatcacagagaacgactgtacgcatagggtggaccccagaattgggggaggaggagtgcagctgggtaagtgggcaattttagcgatactgctgggcatcgcacttctcttttgtatactattcacactcgtgtgtggcgctagtggaacctccaagcagcctaaggtcattcccgatgatctggcccagcagaaccttatcgtatcaaacacagaagctcccggtgacgataaagtatactctgccaatggcttcacaactcagacagttggtgcctccgcacaaggagtgtgtgggaccgttggaagcggaattaagaatggagggcaagagaccattgaaatggttaagggaggtcatcaaactagcgagagctgccgcggtgccggtcaccaccatacgctggattcgtgcaggggaggacatacagaggtggataactgtagatacacttacagtgagtggcatagctttacccagcccaggctgggcgagaaagtttacctttgcaaccaagatgagaatcacaaacatgcccaggattatgtattgacatacaactacgaagggcgaggctccgttgccggaagcgtgggctgttgtagcgagaggcaggaagaagatggccttgagttcctagataatcttgagcccaagtttcggactctggcagaggcatgtatgaagagatag

SEQ ID NO: 28356 - DNA, 3000 bp, synthetic construct
  misc_feature 1..3000: note = Description of Artificial Sequence: Synthetic coding sequence
  source 1..3000: mol_type = other DNA
atgatggggttgtttcctaggactaccggcgctcttgctatatttgtggtggtcatattggttcatggggaattgagaatcgaaaccaaggggcagtatgatgaggaggagatgaccatgcagcaggccaagcggaggcaaaagagagaatgggtcaagttcgcgaaaccatgtcgagagggtgaggacaacagcaagagaaatcccatagccaagattacatctgattatcaggccactcaaaaaattacttaccggattagcggcgtcgggatcgaccaacccccattcggcatatttgttgtcgataagaacacaggggatatcaacattaccgcgattgttgaccgcgaagagaccccgagcttcctgattacatgtcgcgcactcaatgcacagggcttggatgtcgagaagccactgattctcactgtaaagatcttggatatcaacgacaaccccccagtgttctcacagcagatctttatgggcgagatcgaggagaattcagcgtctaattccctcgtgatgatcctaaacgcaacagacgcagatgagcctaaccacctgaacagtaaaatagctttcaagatcgtgagccaggagccagccggaactccgatgtttcttctgagtcgtaacactggcgaggtgcgcactctcactaactcactcgacagagaacaggctagctcttatcggctggtggtttccggcgctgataaggacggtgaggggttgagcacccaatgtgaatgtaacatcaaagtgaaggacgtcaacgacaatttccccatgttcagagattctcagtactccgctagaatcgaagaaaatattctgagctccgaactcctgagatttcaggtaaccgaccttgacgaagaatacacagataattggctggctgtgtacttctttacttcaggtaacgaagggaattggttcgagatacagaccgacccccgtaccaatgaagggattctgaaagtggtcaaggcgctggattacgaacagctccagtctgtaaagctgagtattgcagtgaagaacaaagcagaattccaccagagcgtgatttcacggtacagagtgcagtcgacaccagtcaccattcaggtcatcaacgttagagagggtatagctttcaggcctgcttccaaaacctttacagttcagaaaggcatatcctccaagaaactggtggattatatcctcgggacataccaagccattgacgaggacactaacaaggccgcttccaacgtgaaatatgttatgggacggaatgacggaggctatttaatgattgacagtaaaacggcagagatcaagtttgtgaaaaacatgaatcgtgactcaacattcatagtcaataagacgataacggcagaggttctggccatcgatgaatacacaggaaagacgtctaccgggacagtttacgttagggtccctgactttaacgacaattgtcctaccgctgtgctggagaaagacgctgtgtgtagtagcagccctagtgtcgtcgtatctgcaaggacactgaataatcggtatactgggccatacacctttgcactcgaggatcaacccgtcaagcttcccgctgtttggtcaatcacaaccttaaacgccacctcggcactgttgagggcacaagaacagattccgccaggagtgtaccacataagtctcgtactgacagatagccagaataaccggtgcgaaatgccacggtctctgactctcgaggtgtgtcagtgcgacaacagaggaatctgtgggacctcctatccaacaactagtcccggtaccaggtatgggcgtccacactccggaaggctggggcctgccgcaatcggattgttgctgctgggcctactgcttttgctgctcgcccctctgctgttgctgacctgcgactgtggcgctgggtccacggggggagtgacaggtggcttcatccccgtccctgatggaagcgagggcacaattcaccagtgggggatagaaggcgctcaccctgaagataaggagatcacgaacatctgcgtgcccccagtgaccgcaaacggagcggacttcatggagagcagcgaagtctgcaccaacacttacgccagaggcaccgctgtggaaggcacatcaggcatggaaatgacgacaaaattaggagccgctaccgagagcggaggggcagcaggattcgccaccggaaccgttagtggcgctgctagtggattcggggcagctacaggcgttggcatttgtagtagtggacagtcaggcaccatgcgtactagacactccactgggggtactaataaagactatgctgacggagctatctccatgaattttctggattcctacttcagccagaaggcctttgcctgtgccgaggaggacgacgggcaggaagccaacgactgcctgctaatatatgacaacgagggggctgacgctaccgggagccccgtgggatccgtgggctgttgctcttttatcgccgatgacctggatgactcctttttggacagcctgggacctaagtttaaaaagcttgcagaaattagtctcggcgtggacggagaaggaaaggaggtgcagcccccatcgaaggattccggatacggtatagagtcgtgcggacacccaattgaggtccagcaaaccggctttgtaaagtgtcaaacactgagtggatcacagggcgcttccgctctctcgacctccggaagtgtgcaaccggctgtctctatccccgatccactgcaacatgggaattatctggtgacagagacatactcagcgtctggctccctggtgcaaccttctaccgccggttttgaccctcttctgacgcagaacgtgattgtgaccgagcgggtgatctgtcccatctcaagcgtcccaggtaatcttgcagggcctacacagctccgaggttctcacaccatgctctgtaccgaggatccctgtagtcggctgatctag

SEQ ID NO: 28357 - DNA, 8615 bp, synthetic construct
  misc_feature 1..8615: note = Description of Artificial Sequence: Synthetic coding sequence
  source 1..8615: mol_type = other DNA
atgtcatgcaatggagggtcccaccccaggatcaatactttgggccgtatgatccgggcagagtcaggccctgatttgcgatatgaggtgacttcaggcggagggggaacttccagaatgtattacagcaggcggggtgtaataaccgatcagaattctgacggatattgtcaaactgggaccatgagcaggcaccagaatcagaacactatccaggaactcctgcagaattgttcagactgcctaatgcgcgcagaactgatagttcagcccgaactgaaatatggagatggcattcagttaacacgcagtcgagagctggacgagtgttttgcacaggcaaacgatcagatggagattctggacagtctgatacgcgagatgaggcaaatggggcagccgtgcgacgcgtaccagaagcggttactccagctgcaggaacaaatgcgcgctctgtacaaggcgatttctgtgccacgggtgagacgggcttcttccaagggtgggggaggttatacatgtcagtcaggatccggttgggacgagttcacaaagcatgttacttctgaatgcttggggtggatgagacagcaaagagcagagatggacatggtggcctggggtgtcgatttggcttccgtggagcaacatattaactcccaccggggaatacataattcgatcggcgattacagatggcagttagataaaatcaaggcggacctaagagaaaaaagtgccatctaccagctcgaagaggaatatgagaatctgctgaaggccagctttgagaggatggatcacctgagacaactgcagaacataattcaggccacctcccgggagataatgtggatcaacgactgcgaggaggaagagctgctttatgattggtctgacaagaatacaaatattgcgcaaaagcaggaagctttcagcatccgtatgtctcagctcgaagttaaggaaaaggagctgaacaagttgaaacaggagagcgaccagcttgtacttaatcagcatcccgctagtgacaaaattgaagcatatatggataccttgcagacccaatggtcatggattctccagatcaccaaatgcatagacgtccacctaaaggagaacgccgcttattttcagttcttcgaggaggcacaatccaccgaggcctatctgaaaggcctgcaggatagcataagaaaaaaatacccatgcgataagaatatgcctctgcaacatctgctggagcagattaaggagctggagaaagaaagagagaagatcctggaatacaagcgccaggtccaaaatctcgtcaataaaagcaaaaagatcgtacagctgaagccaaggaatcctgactatcggagcaataaacccatcatactgagggccctgtgtgattataagcaggaccagaagatcgtgcacaaaggagacgagtgtattctcaaagataataacgagcggtcaaaatggtacgtcaccggtccaggcggagtcgacatgcttgtcccatcggtgggcttgatcatccctcccccaaacccgctggccgttgacttgtcctgtaagatcgagcagtactacgaagccattctagccttgtggaaccagctctatattaacatgaaatccttagtctcctggcactattgtatgattgatattgaaaaaattagagcaatgaccattgccaagctcaagaccatgcggcaggaggactatatgaagacaattgctgatctcgagcttcattaccaagagtttattagaaactcacaaggttcggaaatgtttggggatgacgacaaaaggaagatccagtcacagttcactgacgctcagaagcactatcagaccctggtcatacagctcccaggttacccacaacaccaaaccgtaacaaccactgagataacccaccatggtacctgtcaggatgttaaccataataaagtgatcgaaaccaaccgcgaaaacgacaaacaggaaacctggatgctgatggaacttcagaaaatccgacgacagattgaacactgtgaagggaggatgacactgaaaaatctgccccttgctgaccaaggcagcagtcatcatattacggtgaaaatcaacgagctgaaatccgtacagaacgactcgcaggccatcgcagaggtgttaaatcagttaaaagacatgctggccaattttaggggcagtgaaaagtactgttatctgcagaatgaagtgttcggactttttcaaaaactggagaatataaatggagttaccgatgggtatctgaacagcctgtgtacagtccgtgctctgcttcaagctatattgcagacggaagacatgctgaaggtgtatgaagcccgtctgaccgaggaagagacagtatgcctggatctcgacaaagtggaggcttaccgctgtggcctgaagaaaattaagaatgacctaaacctcaagaagtctcttcttgcaacgatgaaaactgaactccaaaaagctcagcagatccactcacagacgagtcagcagtaccctctgtatgaccttgacttaggcaagttcggcgagaaggtgacgcagctgacggaccgctggcagcgtatcgacaagcagatcgacttccgcctgtgggacctcgaaaaacagattaagcagctcaggaactaccgagacaactaccaggccttttgtaaatggctctatgacgccaagagacgccaagattcactggaatccatgaagttcggtgactccaacactgtgatgcgattccttaacgagcaaaaaaatctgcatagcgagatttcaggtaagagagacaagagcgaggaagtccaaaaaattgctgagctgtgcgccaacagcattaaggactacgaattacaactggcttcctacacctctggtctcgaaaccttgctgaatatccctataaagcgaactatgattcagagtcctagtggtgtcatcctccaggaggcagccgatgtgcatgctaggtatatagagctcctcacccgcagcggcgactactataggttcctttctgagatgttaaaaagcctggaagatttgaagttaaagaacacgaagattgaggtattagaagaagagctgagactggctcgtgacgctaatagtgaaaattgtaacaagaacaaatttcttgatcagaacttacagaagtaccaggctgagtgcagccagttcaaagctaagctggcatctctcgaggagttgaagagacaggccgaattggatgggaagtcggccaagcaaaaccttgacaagtgttacggacagattaaggaactcaacgaaaagattacacgcttgacatacgagattgaagatgaaaaaaggcgtaggaaatcagtcgaggaccggttcgatcagcagaaaaacgattacgaccaactccagaaagccaggcaatgtgaaaaggagaacctcggatggcaaaaactcgaatcagagaaggctattaaagagaaggagtacgaaatcgagcggctccgcgtgttgttgcaggaagaggggacccgtaagcgagaatatgagaacgagctggctaaggtgcgaaaccattacaatgaagagatgagtaacctgaggaacaaatatgaaaccgaaattaacattaccaagaccacaattaaagagatctcaatgcagaaggaagacgatagtaagaacctgagaaaccaactcgataggctctcgagagaaaacagggacctcaaggacgagattgtgaggttgaatgactccatcctgcaggctacagaacagcgcagaagagccgaagagaacgctcttcagcaaaaggcctgtggcagcgaaattatgcagaaaaagcagcacctggaaattgagttgaaacaggtcatgcagcaacggagcgaagacaatgctcgtcacaaacagagcttggaggaagccgctaaaacaattcaggataagaacaaggagattgagagacttaaggcggaatttcaagaggaggctaagaggaggtgggagtacgagaacgagctgtccaaggtgagaaataattacgatgaagaaataattagtcttaaaaatcaattcgagactgagatcaatatcactaagaccaccatacatcagttaactatgcagaaggaggaggacaccagtggatacagagcccagattgataatctgacaagggagaacagatccctgagtgaagaaatcaaaagactcaagaacacactgacccagaccactgagaacctccgcagagtggaggaagacatccagcagcagaaggccacaggctccgaggtgagccagcgaaaacagcagctggaggttgaattacgtcaagttacccagatgcgaaccgaggaaagcgtgagatacaagcagagtctggacgacgctgccaaaacgattcaggacaaaaataaggagattgaacgcctaaagcagctgattgacaaggagacgaatgatagaaagtgtctcgaagacgagaacgccaggctgcagagggtgcagtatgaccttcagaaagcgaactcttctgccaccgaaacaatcaacaaacttaaagtccaggagcaagaactgacccgacttaggattgactatgaaagagtgtctcaggagcgtacggtgaaggaccaggatattacaaggttccagaacagtctgaaggagctgcagcttcaaaaacagaaagtggaggaagaactgaacagattaaaacgcaccgcatccgaagactcttgcaaaaggaagaaacttgaggaagaactggaagggatgcggaggtccttaaaggagcaggcaatcaagataaccaatttgactcagcagctcgagcaggcatcgatagtcaaaaagcgcagcgaagacgatctgcgccagcagcgcgatgtgctggacgggcacttgcgggaaaagcagcggactcaagaagaactgaggaggttatcaagcgaggtggaggccttacggcgtcagctccttcaggagcaggaatcagtgaagcaggcccatctgcgcaatgagcacttccaaaaggctatagaggacaagtcaagaagtctgaatgagagtaagatcgagatcgaaaggctccagagtctgactgagaacctcacaaaggagcacttaatgctcgaggaggaacttcggaatctgcgcttggaatacgacgacctccggagaggccgatccgaagccgatagcgataagaatgccacgatactggagctgaggagccagcttcagatctctaataaccgcactcttgagctgcagggcctgatcaatgatctccagagggaaagagaaaacctcagacaagaaatcgagaagtttcagaagcaggcgcttgaggccagcaaccgcattcaggaatcaaagaatcagtgtacgcaggtcgtgcaggaaagagaatctctgctggtcaagataaaggtgttggagcaggacaaagccaggctgcaacggctggaagacgaactaaacagggctaaaagtactcttgaggcagagactcgggtgaaacaaagacttgaatgcgaaaaacagcagattcagaacgacttgaatcagtggaagacgcaatactcccggaaagaggaggccatccggaaaatcgagagcgagagagagaagtcagaacgggagaaaaactctctgagatctgagatcgagaggctgcaggccgaaatcaaacgcatagaggaacgttgccgacgcaaacttgaagattccaccagggaaactcagagccagttagaaactgaaagaagtagatatcagcgggagattgataagttgcggcagcgcccatatgggagtcacagggaaacccagaccgagtgtgagtggacagtggacacctctaaactcgtcttcgacggcctgcgcaaaaaagtgactgctatgcaactctatgaatgccaactgattgacaagactactctcgataagctactaaaaggtaagaagtcggtagaggaggtggcctctgaaatacagccatttctcagaggggctggctcaatcgccggtgcctcggctagccccaaggagaaatactcactcgtggaagctaaaagaaagaagctgatcagtcccgagagtacggtgatgctgctggaagctcaagcggcaaccggcggaattatcgaccctcaccgcaacgagaagttgactgtcgactctgctatcgcgagggacttgatcgattttgacgataggcagcagatatacgcagcagagaaggctataacaggatttgatgatcccttcagcggtaaaactgtaagcgtgagcgaagcaatcaaaaagaatctgattgacagagagaccgggatgaggcttttggaggctcagatagcatcgggaggagtggtggatccggtgaatagcgtgttcttacccaaagatgtggctctagctagggggctgatcgaccgggatctgtacaggtccctgaatgacccaagggactcccagaaaaatttcgtggatcctgtaacaaaaaagaaggtgagttatgtgcagttaaaggaaaggtgtaggattgaacctcacaccggtttgttgttgctgagcgttcagaaaaggagcatgtctttccaagggatacggcagccagtcaccgtcaccgagctggtggatagcggcatcctgcgaccttccactgttaatgaactcgagtccggacagatctcttacgacgaagtgggagagaggatcaaagactttctccaaggctcctcatgcatcgcaggtatctataatgaaactacgaaacaaaagctggggatctacgaggctatgaagattggcctggtacggccaggcactgccttggaactgctagaagctcaggcagccacaggtttcattgtagacccagtgtctaacttgcgccttcctgtcgaagaagcatacaaaaggggcctcgttgggatcgaattcaaggaaaaattgctctctgcagaacgagctgtcactggttacaatgatcctgaaaccgggaacataataagtctgttccaggcaatgaataaggagctcatcgagaaaggccacggaatcagattactggaagcccagatcgccaccgggggaattatcgacccaaaggagtcccacaggctccctgtagacattgcttacaaacggggttatttcaatgaggaactgtctgaaattctatcagatccctccgacgacactaaggggtttttcgatccgaacaccgaagagaacctcacatatctccagctaaaggagcgttgcataaaggacgaagagactgggttgtgtcttctgccattgaaagaaaaaaagaagcaggtacagactagccagaagaatacactcaggaagagacgggtcgtgatcgtcgaccccgagactaacaaggagatgtcggtccaggaggcttataagaaaggcttgatcgactacgagacgttcaaggaactgtgtgagcaggagtgcgaatgggaggaaatcactataacaggcagtgacggctcaacccgggtggtcttagttgaccgaaagacgggttcccaatacgacatccaggatgcaattgataagggcctggttgaccggaagttcttcgatcagtatcgttctggcagcctgtccctcacccaattcgcagacatgatcagtctgaagaatggcgtgggcacttcttcctcgatgggtagtggcgtgagtgatgacgtcttttcctcaagccgtcacgagtccgtatccaaaatctcaacgatatcatccgtgaggaatctaaccattagatctagttcattctcagacacacttgaagaaagctcccccattgccgctattttcgacaccgagaacctggagaaaatctccattactgagggaatcgaacggggaatcgtcgactccatcactggccagcgcttgttggaggcacaagcttgtactggagggataattcaccccactaccggacaaaaactgtcgcttcaggatgctgtctcccagggcgtaatcgatcaggatatggccactcggttgaagcccgcacagaaggcctttattgggtttgagggagttaagggtaagaaaaagatgtcagcagccgaagccgtgaaggaaaaatggctcccatacgaggccggtcagaggttcctggagttccagtatctcactggaggcctggtggaccccgaggtgcatggcaggattagcaccgaggaagccatccgcaagggattcatagatggacgagccgctcaaaggctgcaagacacatcctcttacgctaagatccttacctgcccgaagaccaagcttaagatctcctataaggatgccatcaaccggtctatggtggaggacataacaggcctgaggctgttggaagccgcatcagtctcatcaaagggactccccagcccttataatatgtccagtgcgcctggtagtcgaagcggttctagatccggctctagatccggttctaggagcggttcaagatctggatctaggaggggaagctttgatgctactggaaattctagttacagttactcatacagcttcagttccagcagcatcggacatta

SEQ ID NO: 28358 - DNA, 2862 bp, synthetic construct
  misc_feature 1..2862: note = Description of Artificial Sequence: Synthetic coding sequence
  source 1..2862: mol_type = other DNA
cagcaacagcgcgctgagatggacatggtagcctggggggtcgatttggcaagcgtggaacagcatattaacagtcacaggggaattcacaatagcattggggactatcggtggcagcttgataagattaaggccgatcttagagaaaaaagcgcgatttaccaactggaggaggagtacgaaaatctactgaaagcctcttttgagcgtatggatcatctgcgccagttacaaaatatcatacaggcgactagtagggagatcatgtggattaacgattgtgaagaggaagagctgctatatgactggagtgacaaaaacacgaacattgcccagaaacaggaggcattctccattagaatgtcacagcttgaagtgaaggagaaagaactcaacaaactcaagcaggagtctgaccaactcgtgctgaaccagcatcccgcttcagataagattgaagcatatatggataccctgcagacgcagtggagctggatcttgcagatcaccaagtgtatcgacgtacatctgaaggagaacgctgcttacttccagtttttcgaagaggcgcagagcactgaggcctatctgaaagggctgcaggactccatccgtaagaagtacccttgtgataagaacatgccgctacaacatttactcgagcaaatcaaagaattggagaaggagagagaaaagattttagaatacaagcgacaggtccagaacttggttaacaaatcaaagaaaattgtacagctgaaacctcgcaaccctgactaccggtcaaacaagccaatcatcctgagggccctctgcgactataagcaggatcagaagatcgttcacaaaggtgatgaatgcattctcaaagacaataacgagcgctctaagtggtatgtgacgggaccaggaggagttgacatgctcgtgcccagcgtgggtctcatcatacctccacccaaccctctggctgtggatctctcctgcaaaatcgagcaatactatgaagctattctggcactgtggaaccagttatacatcaatatgaagtccctggtttcatggcattattgtatgatcgatatcgaaaaaatccgggcaatgacaattgccaaactgaaaacaatgaggcaggaggactatatgaaaacaatagccgatctagaactgcattatcaggaattcattcgtaatagccaaggtagcgagatgtttggggatgacgacaagaggaagattcagtcacagttcacggacgcccaaaagcactatcagacacttgtgattcagcttcccggttatccacagcatcagaccgtcaccacaactgagattacacaccacggaacttgtcaagatgttaatcacaacaaggtcattgagacaaaccgggagaatgacaagcaggagacctggatgttaatggagctgcagaagatccggagacagattgaacactgtgaaggcagaatgaccctcaaaaatcttcccctcgccgatcagggtagctcccaccacataaccgtgaagataaatgagctgaagtccgtccaaaacgactcacaagccatcgcggaggttctgaaccagctgaaagatatgctggccaatttcaggggcagtgagaagtactgctacttgcagaacgaggtcttcggcctttttcagaagctggaaaacatcaatggggtcaccgacggatacctgaactcgttgtgtaccgttcgcgctttacttcaggctattctgcagaccgaggacatgctcaaagtctatgaggccaggctcaccgaggaggagactgtctgcctggacctggacaaagtggaggcgtacaggtgcgggctgaagaagattaagaacgatctcaatttgaaaaagtctcttcttgccaccatgaagacggaactgcagaaggcacagcagatccattctcagacaagtcaacagtaccctttgtacgacctagacctgggtaagtttggagagaaggtgactcagctgacagataggtggcagcggatcgacaagcagattgatttcaggctgtgggaccttgagaagcagataaagcagcttcgtaattaccgcgataactaccaagctttttgtaagtggttgtatgatgctaagaggcggcaggacagtctagaaagcatgaaatttggcgactccaacacagttatgcgcttcctgaatgaacagaaaaatctgcacagcgagatcagtgggaagcgggataaatccgaagaagtgcagaaaatcgccgagctctgcgccaactctattaaggattatgagctccagctggcctcttacacgagtggactagaaacattgcttaatattcccattaagcgcacgatgattcagagcccaagcggggttattctgcaggaggcggctgatgtacatgcccgttacattgaactgctcacaagaagtggggattattaccgcttcctgtccgagatgttgaaaagcttagaagatcttaagttgaagaatacaaagatcgaagtgctcgaggaggagctgcgcctggctagggacgcaaattcggaaaactgcaacaagaacaagtttctggatcagaacttgcaaaagtatcaggcagaatgctctcaattcaaagctaagcttgcgtctctggaagaattgaagcgtcaagcggaactcgatggtaagtcagcgaagcagaacttggataagtgctatgggcagattaaggagctcaatgagaaaatcacgcgtctgacatacgaaatcgaggatgaaaagcgacggaggaagtcagtggaggatcggttcgatcaacagaagaacgactatgaccagctgcaaaaagctcggcagtgttag

SEQ ID NO: 28359 - DNA, 6818 bp, synthetic construct
  misc_feature 1..6818: note = Description of Artificial Sequence: Synthetic coding sequence
  source 1..6818: mol_type = other DNA
atgagctgcaatgggggtagtcacccaaggattaacacactgggcaggatgattcgggctgaatcaggacctgacctgagatatgaagtgacatccgggggaggcggaacctcgagaatgtactattccaggcggggtgtgattactgaccagaacagcgacgggtactgccaaaccggtaccatgtctagacaccaaaaccaaaataccattcaggagctgctgcagaattgctcagactgccttatgcgcgctgaactcattgtccaaccggagcttaaatacggtgatggaatccaactgactagaagcagggaactggatgaatgttttgctcaagccaacgatcagatggagattctggacagcttgatccgggagatgcggcagatggggcaaccttgcgatgcttaccaaaagaggttactgcagcttcaggaacagatgcgggcactctacaaggcgatcagcgtgccacgagttaggcgagcctcctcaaagggtgggggaggatacacctgccagagcggcagcggttgggatgaattcacaaaacacgtcacatcagagtgtctcgggtggatgcgtcagcagcgcgctgaaatggatatggtcgcgtggggcgtggacctggcaagtgtcgagcagcacatcaactcacaccggggtattcataactccataggagactacagatggcagctcgataaaatcaaggccgatctgcgcgagaagagtgccatttaccagctcgaggaggagtacgagaatttactcaaggcttcgtttgaaaggatggaccatctgaggcagctccaaaacataatccaagctacgtcccgcgagattatgtggattaacgactgcgaagaggaagagctgctgtatgactggtcagataagaataccaatattgcccagaagcaagaggcattcagcatccgaatgtcccagctcgaggtgaaagaaaaggagctgaacaagcttaagcaggaaagcgatcagctcgtgctaaaccagcatcccgcatcggataaaatagaagcatatatggacaccctgcagactcagtggtcgtggatactgcagattaccaagtgtatcgatgttcaccttaaggagaacgcagcatacttccaatttttcgaagaggctcaaagtacagaggcttatttgaaaggacttcaagactcgatacgaaagaagtacccttgcgacaaaaatatgcccctgcagcacttgcttgagcaaattaaggagctggaaaaagagagggagaaaattctcgaatataagcgccaagtgcaaaatttagtgaataaatccaagaaaattgtacagctgaagccaagaaatcccgattaccgctcaaacaaacctattatactacgcgctttgtgcgattacaagcaagaccagaagatcgtgcataagggagacgagtgcatactcaaggacaacaacgaaaggtcaaaatggtatgttacaggccctgggggtgtggacatgctcgtgcctagcgtgggcctgatcatcccccctccgaaccccctggccgtcgacctctcttgtaagatcgagcagtattatgaggccatcttggctctgtggaaccagctgtacattaacatgaagagcttagtttcttggcactactgcatgatagatattgagaaaatccgagctatgacaatcgcgaagctgaagaccatgcggcaggaagactacatgaagaccattgctgatctcgaattgcattaccaagagtttattagaaattcccagggaagcgagatgtttggagacgatgataagcgcaagattcagagtcagttcaccgatgcacagaagcactatcagacactggtgatacagttgccaggctacccccagcaccagaccgttacaactactgaaattacccaccatggaacctgccaggatgtcaatcataataaggtgatcgagaccaaccgcgagaacgacaaacaggagacctggatgctgatggagctgcaaaaaatccgtcggcaaatcgagcattgtgaggggaggatgacgctgaagaacctccctctggccgatcaagggtccagccaccatattactgtcaaaattaacgagctcaaatctgtgcagaatgactctcaggctatcgcggaggttttgaaccagctgaaagatatgcttgcgaattttagagggtctgaaaagtactgctatctgcagaacgaggtatttggcctttttcagaagctggagaacataaacggagtcacggatggctacctgaacagcttgtgcactgtcagggcgcttttgcaggccatcctgcagacggaagacatgttaaaggtctatgaggcgagacttaccgaggaggagacagtttgtctggatctggataaggtggaagcctatagatgcggcctgaagaaaataaagaacgacctaaatctcaagaaatcactcttagccaccatgaagaccgagctgcagaaagctcaacagatccatagccaaactagccaacagtatccactgtatgacctggatctgggtaagtttggcgaaaaggtaacccagttaaccgacaggtggcaacgcatcgataagcagatcgactttcgactgtgggacctcgaaaaacagatcaaacagctgcggaactacagagataactaccaggctttttgtaagtggctttatgacgctaagagacggcaggattctctcgaaagtatgaagttcggagatagcaacaccgtgatgaggttcttaaatgagcaaaagaacctccactctgagatttccggcaagcgcgacaagtctgaagaggtgcagaagatcgccgaactctgtgctaatagcattaaggattatgagctgcagctggcttcttacacgtccggcctggagaccctgctaaatatccccattaagaggactatgatacaaagccccagtggagtcatccttcaggaggccgcagacgtccatgccagatatattgagctactcactaggtcaggagactactacaggtttctaagtgagatgcttaagtctctagaggatctgaagctgaaaaacacaaaaatcgaggtgctggaggaagagctccggctggccagagatgcgaatagcgagaattgcaataagaacaaattcctggaccaaaacctccaaaaatatcaagccgagtgtagtcagtttaaagctaagctggcgtctctagaggaattaaagcgccaagctgaactggatggaaagtccgctaagcagaatctggacaaatgttacggacagatcaaagagctgaatgaaaagatcacccgtcttacgtacgaaattgaagacgagaaacgtcggaggaagagcgtggaggacagattcgatcagcagaagaacgattacgaccagctgcagaaggcccgacagtgcgagaaggaaaatctgggctggcagaagctagagtctgaaaaagctataaaggagaaggagtacgagatcgagcggctccgggtactgttgcaggaggaaggtacacggaagagagaatatgaaaatgagctggccaaagccagcaatcgtatccaggaatctaagaatcaatgcacccaggtcgttcaggaacgggagagccttctggtaaaaattaaggtgctggagcaagataaggcacggctgcagagactggaggacgaactgaacagagcaaagtccacgttggaggccgagacacgcgtcaagcagcgcttagagtgtgagaagcagcagattcaaaatgatctgaaccaatggaagacacaatatagcaggaaggaggaagctattcggaagattgaatctgaacgcgaaaagagtgagcgagagaagaattcattgagaagtgagatcgagaggttgcaagccgaaatcaaaagaatagaagaacgttgccgcaggaagttggaagacagcacccgcgagacccagtcccaactggaaaccgaaaggagtaggtaccagagagagatcgacaagttaagacagcgtccttacggatctcaccgagaaacccagaccgagtgcgagtggacagttgatacaagtaaacttgtgtttgatggcctgagaaaaaaagtgacagctatgcaactttacgagtgtcagctcatagataaaactaccctggataagcttctcaaagggaagaagtctgtcgaagaggtggcctctgagattcagccatttctgcgcggagctggttccatcgccggagcatctgcgtcaccgaaggagaagtacagtttagtagaagccaaaagaaagaaacttatctcccctgaatccaccgttatgctcctggaagctcaggctgccacgggtggcatcatagatccgcaccgaaatgagaagctgactgttgatagcgccatcgctagggatctgatcgacttcgacgatcgccagcagatctacgctgcagaaaaggcgatcacgggcttcgatgacccattcagcggaaagacagtgtctgtgtccgaggccataaagaaaaacctcatcgatcgcgagactggaatgagattactggaggctcagattgcatctggaggtgttgttgatcccgtgaactccgtctttctccctaaggacgtcgctttagctagaggtctcatcgatcgcgatctgtaccgaagcctgaacgatcctagagactcgcagaagaactttgtagaccccgtgacaaaaaaaaaggtgtcatatgtgcagttgaaggaaaggtgccggatcgagccccacaccggactgttgctgctgagcgtgcagaagaggagcatgtccttccagggtatccggcagcccgtcactgtgacagagcttgtcgacagcggcattctgagaccatccaccgtaaatgagctggaatcggggcagatctcatacgatgaggtgggggagcgcatcaaggactttctccaggggagttcgtgcatcgctggaatctacaacgagacgacaaaacagaagttgggaatatatgaagcgatgaagatcgggctcgtcagacccggtaccgctctggaactgctggaggcccaggccgcaaccggttttattgtcgatccggtatctaatttaagattgccagttgaagaagcctataaaagggggctcgtgggcattgaatttaaggagaagctccttagcgctgaaagggcagtgactgggtacaacgaccccgaaactgggaatatcatctctctctttcaggctatgaataaagagctcatagagaagggtcacggcatcagactcctggaggcgcaaatcgccacaggcggtatcatcgaccctaaagaaagccacaggctcccggtagacatagcctacaaaagaggctatttcaatgaggagctgtccgagattctcagcgacccctcagacgacacgaaggggttcttcgaccccaacaccgaggaaaacctgacttatctacagctcaaagaacgttgcattaaggacgaagaaacaggcctctgcttgctgcctcttaaagagaaaaagaagcaagtgcagacttctcagaagaatacacttcggaaaagaagagttgtgattgtcgaccctgagacaaacaaagaaatgtccgtgcaggaagcctataaaaagggactgatagattacgaaactttcaaagagctttgtgagcaggaatgtgagtgggaggagatcacaatcaccggttccgacggcagtacacgggtggtactggtcgataggaagacggggtcccaatatgatattcaggatgccatcgacaaaggactggtggatcgcaagttcttcgaccagtaccggagtggaagtttatctctcactcagtttgccgacatgataagtttgaagaacggcgtggggacctcttcatctatggggtccggagtgagtgacgacgtattttcctcatcaagacacgagtctgtttctaagatttcaactatctcgagcgtgagaaatctgaccatcaggtcctcctctttttcagacacgctagaggagagttctccgattgccgcaatttttgacacagagaatcttgaaaaaatctctatcaccgagggcatagaacgcggaattgtcgattccatcaccggtcaaagactgctcgaggcccaggcctgtacgggcggtatcatccaccccaccactggacagaagctgagcctccaggatgcggtgtcacagggtgtcatcgaccaggacatggctacccgactgaaacccgctcagaaagccttcatcggatttgaaggcgtgaaggggaaaaaaaagatgtcagccgctgaggccgttaaggagaagtggctgccatacgaggccggacagagatttctggaattccaatatctgaccggagggctggtggacccggaggtgcatgggaggattagcacagaggaagctatccgcaagggcttcattgacggcagagcagctcagcggctacaggacaccagctcctacgcaaagattttgacgtgtcctaaaaccaagctcaaaatctcatataaagatgccattaatcgcagcatggttgaagatatcaccggactcaggttgcttgaggcagctagcgtgtcatcgaaaggtctgcctagtccgtataacatgtctagcgctcccggaagtcgatcagggagtaggagcggatcaaggagcggaagcaggtccgggagccggtctggaagtcggaggggcagcttcgacgctaccggaaattcctcatattcttacagctacagcttttctagtagcagcattgggcatta

SEQ ID NO: 28360 - DNA, 507 bp, synthetic construct
  misc_feature 1..507: note = Description of Artificial Sequence: Synthetic coding sequence
  source 1..507: mol_type = other DNA
atggagcctccgaacctgtaccctgtgaaactctatgtctacgatctctccaagggcctcgcccgacgtctctcgcctattatgcttggcaagcagttggaggggatatggcacacgtcaatcgtggttcacaaagacgagttcttcttcggttcaggcggaattagtagttgcccccctggaggaactcttctgggccctcctgacagcgtggtagacgtgggaagcacagaagtgaccgaagagattttcctggagtatttgagctcactaggggagagtctgtttcggggtgaagcttacaatctttttgaacataactgcaataccttctctaacgaagttgcgcaattcctcacaggacgaaagatccctagttacataaccgatctgccttctgaagtcctctccacccccttcgggcaggcgctgaggcctcttttagactcaattcagatccaaccacctggcggttctagtgtcggcagaccgaacgggcagtcctag

SEQ ID NO: 28361 - DNA, 561 bp, synthetic construct
  misc_feature 1..561: note = Description of Artificial Sequence: Synthetic coding sequence
  source 1..561: mol_type = other DNA
atgaaatccgatttttactttcaaaagtccgagccacactcactgtcctcagaagcactcatgcgaagagccgtgagcctggtcaccgattcgacttcgacgtttttgtctcagactacctatgctctgatcgaggccataacagagtacacaaaagccgtgtacaccttaacaagtctgtatcgtcagtacacatcactgctcggtaaaatgaattcagaggaggaggacgaagtctggcaggtcataatcggcgcacgagccgagatgaccagtaagcaccaggagtatctgaaactggaaacgacatggatgacagccgtgggtctttctgaaatggccgcagaggcagcctaccagaccggtgcggatcaggcctcaatcactgcccgaaaccacatccagcttgtgaagttgcaagtggaggaagtacaccagctgtcccgcaaggcggagaccaaactcgccgaggcacagattgaagaactcaggcagaaaacacaggaggagggggaggaacgtgcagaaagtgagcaggaggcctacctgcgagaagattag

SEQ ID NO: 28362 - DNA, 588 bp, synthetic construct
  misc_feature 1..588: note = Description of Artificial Sequence: Synthetic coding sequence
  source 1..588: mol_type = other DNA
atggccgcactcaaaagctggctgagtaggtctgtgacgtcattctttaggtacagacagtgtctgtgtgtgccggtggtggcaaattttaaaaagaggtgcttctccgagttaatccggccttggcataaaactgtgacaatcggattcggtgttacattatgtgctgtcccgattgcgcaggccgtctacactctcacttctctttacaggcagtatacttccctcctgggaaagatgaattcagaggaggaagatgaagtgtggcaagtcattattggggctagggcagagatgactagtaagcaccaagagtacctcaaactggagaccacatggatgacagctgtgggcttaagtgagatggccgctgaggccgcataccagaccggagctgatcaggcttccatcactgctagaaaccatatccagctggtcaaactccaagttgaagaggttcaccagctctccagaaaggccgagactaagctagcagaagcgcagattgaggagcttagacagaaaacccaggaggaaggggaagaaagggccgagtctgagcaagaggcttatcttcgcgaggactag

SEQ ID NO: 28363 - DNA, 588 bp, synthetic construct
  misc_feature 1..588: note = Description of Artificial Sequence: Synthetic coding sequence
  source 1..588: mol_type = other DNA
atggctgccctaaagtcctggctgtctagatctgtaacaagcttctttcgctatagacagtgcctttgtgtgcccgtggtggccaacttcaaaaagcgctgcttctccgagcttattaggccctggcacaagaccgttactattggcttcggagtgactttatgcgccgtccctattgcacaggcagtttacacgttgaccagcctgtatcggcagtacacaagccttctgggaaaaatgaatagcgaagaggaggatgaagtctggcaggtgatcattggtgcaagggcagagatgacaagtaaacaccaggagtacttgaagctcgagaccacatggatgactgccgtgggcttgagtgaaatggccgcagaagccgcatatcagaccggggcagatcaggcgagcatcaccgcccgaaaccacatccagcttgttaagctacaggtcgaggaggttcatcaactgagccgtaaagcagaaacaaagctcgcagaagctcagattgaggaactgcggcaaaaaacccaagaagagggcgaggagcgggcagaatctgagcaggaagcttatctgcgggaagactag

SEQ ID NO: 28364 - DNA, 720 bp, synthetic construct
  misc_feature 1..720: note = Description of Artificial Sequence: Synthetic coding sequence
  source 1..720: mol_type = other DNA
atggccgcacttaaaagttggctttctaggtcagtcacgagtttttttagatacaggcagtgcttgtgcgtgcctgttgtggcaaattttaaaaagcgctgttttagtgagctgattaggccctggcataaaaccgtaacaatcgggttcggggtgactctctgcgcagttccaatagcccagaagagcgagcctcattcgctgtcatctgaggctctgatgcgacgggctgtgtctctggtcactgactccaccagtaccttcctgtcccagactacatatgcactgatagaagctattacagagtataccaaggcagtgtacaccctgacgtctctgtatcggcagtacacatcactgctaggcaaaatgaacagtgaggaagaagacgaggtgtggcaggtgattattggtgcccgtgcggaaatgacatctaagcatcaggaatacctgaaattggagaccacatggatgacagctgtgggtctcagcgaaatggcagccgaggcggcttaccaaactggtgcagatcaagcaagtatcacagcaagaaatcacatccagctggtcaagttgcaggtagaagaagtgcaccagctctctcggaaagcagagaccaagctggcggaggcacagattgaagagctcagacaaaagactcaggaagaaggagaagaacgagcggagtctgaacaagaagcatacctacgcgaagactag

SEQ ID NO: 28365 - DNA, 561 bp, synthetic construct
  misc_feature 1..561: note = Description of Artificial Sequence: Synthetic coding sequence
  source 1..561: mol_type = other DNA
atgaagtccgacttctactttcagaaatcagaaccccactccctcagctcagaggctctgatgagacgggctgtaagcttggtcactgattcaactagcacgtttttatcccaaacaacttacgcattgatcgaagccataaccgaatacactaaggcagtgtacacactgacttcactgtatagacagtacaccagccttttaggcaagatgaattctgaagaggaagacgaagtgtggcaggtgatcatcggagcccgagctgagatgacatcgaagcaccaggagtatttgaaattggagactacttggatgaccgcggtgggcctgtctgagatggccgctgaggcagcttaccaaacaggtgcagaccaggcttctataacggctcggaaccacatccagttggtgaaactgcaggtggaggaagtccatcagctgtctcgtaaggcagagacgaaacttgccgaagcccaaattgaagaactgaggcaaaagacccaagaggagggtgaggagcgggcagaatcggaacaggaagcatatcttagagaggattag

SEQ ID NO: 28366 - DNA, 3822 bp, synthetic construct
  misc_feature 1..3822: note = Description of Artificial Sequence: Synthetic coding sequence
  source 1..3822: mol_type = other DNA
atggagccacctgggggatcattaggaccagggaggggcactcgagataagaagaaaggcagatctccagatgagctcccatcagcagggggagacggaggcaaaagtaaaaaattcaccttgaagcgactgatggccgacgagctggaaaggttcacctcaatgcggataaagaaagaaaaggagaagcccaactccgctcaccgcaacagttctgcgagctatggggacgatccgactgcccaatcattgcaggatgtttccgatgagcaggtcctggtgctgttcgaacagatgctcctagacatgaacctaaacgaagaaaagcaacagccgctgcgggagaaggatattataatcaaaagagagatggtgtcccaatacttatacacgtcaaaggccggaatgtcacagaaagagagcagcaagagcgcgatgatgtatatccaggaactgcgcagcggactgcgcgacatgcccctgttatcttgcttggagtctttgcgagtgagtctgaataataaccccgtcagctgggttcagacctttggggcagaagggctagcatctctcctagacatcttaaagcgcctgcatgacgagaaagaggaaaccgcaggctcttatgattctcgaaacaagcacgaaatcatccggtgcctgaaagccttcatgaataacaagttcgggattaagactatgctggaaacagaggagggcattctgctgttagtaagggccatggatcctgccgtaccaaacatgatgattgacgccgcaaaactgctttccgccctatgtattctaccgcaacccgaggacatgaatgagcgcgttctggaagctatgacggaacgcgctgaaatggacgaagtggagcgattccagcccctgctggatgggcttaaatcaggaaccaccatagcactgaaggtgggctgcttgcagttgattaacgccctgataacgcccgctgaggagctggatttcagggtccatatccgctctgagttgatgcgcttggggctgcaccaggtcctgcaggacctgagggagattgaaaacgaagacatgagagtacaattgaatgtgttcgatgaacaaggggaggaagacagctacgacctgaagggtagacttgatgacatccgcatggagatggacgacttcaacgaggtgtttcaaatcctgctcaacaccgtcaaggattctaaggctgagccacacttcctatcgattctgcagcacctcctgcttgtacgaaacgattatgaggccaggccacagtactataagctgattgaggaatgtatttctcagattgttttgcacaagaacggggctgatccggattttaaatgccggcacctccaaatcgagatcgaaggactgatcgaccagatgatcgataagaccaaagtcgagaagagcgaggctaaggccgcagaattagaaaaaaaactcgatagtgaactgacagcaaggcatgagttgcaggtagagatgaaaaaaatggagagcgactttgagcagaaactgcaggatctgcagggagagaaagacgctctccattctgaaaaacagcagatcgctacggagaagcaggacctggaagctgaagtgtctcaactgaccggagaggtggccaagcttacaaaggagctggaggacgcaaagaaggagatggccagtcttagtgccgctgctattaccgtccccccttcagtcccatctagagcccctgtccccccagccccaccccttcctggggacagcggcacgatcataccccctcccccagcgcctggcgactctactactcccccacctccgccaccacccccaccacctcctccccctctgccagggggagtgtgcatctcatctccgccatcattaccagggggtacagccatctctccaccccctccactctccggggacgccactatccctcccccaccgcctctccccgaaggtgtcggaatcccatcgccgtctagtcttcccggaggaaccgctattccccctccccctccactccctgggtccgccaggatccctcccccacctcctcccctgcctggttctgccggaattcccccaccaccgccacctcttcctggggaggctggaatgcctccaccccctccacctttaccaggtggccctggaattcctccacctcctccattcccaggtgggcctggcatcccccctcctcccccagggatgggaatgcctcctccacctccatttggtttcggggtgcctgccgcaccagtgctcccatttgggctcacaccgaagaagctgtacaagcccgaagtccagcttaggcgcccaaattggagtaaattggtcgcagaggatttgagccaggactgcttttggacaaaagtgaaagaggacaggttcgaaaataatgaacttttcgcgaagttgacactgactttcagcgctcagaccaaacgcacaaaaaaggccaagaaagatcaggaaggaggtgaggaaaagaaaagcgtacagaagaaaaaggtgaaagaactcaaggtcttggattctaagaccgcacaaaatttaagcatcttcctgggttcctttcgaatgccttatcaggaaatcaaaaacgtcattttagaggttaacgaagcagtcctgacagagtccatgatccagaatctcattaagcagatgccggaaccagagcagctcaagatgctgtctgagctcaaggacgagtacgatgatctggctgagtctgaacagtttggcgtggtgatggggacggtcccaaggctcaggccccgactgaacgcaattctgttcaaactgcaattcagcgagcaggtcgaaaatattaaacctgaaatcgtcagtgtgacggccgcatgcgaggagctgcgcaaatctgagtcttttagcaaccttctggagataacgctcctggtcggcaattacatgaacgctgggtctaggaacgctggcgcatttggattcaacatatctttcctgtgcaagcttcgcgatacaaaatctacagatcagaagatgaccctcttacactttttggccgagctgtgtgagaacgactatcctgacgtgctcaaattccccgacgagcttgcacatgtcgaaaaagcctcgcgtgtgagcgcagagaatctgcagaaaaacctcgaccagatgaagaagcagatttcagacgtggagagagatgttcagaatttccctgccgcaaccgacgagaaagacaaattcgttgagaagatgaccatttttgtaaaagatgcccaggaacagtataataagctgaggatgatgcactccaatatggagaccttgtataaggagctgggcgaatatttcctgtttgatcctaaaaaactttccgtggaggagttcttcatggatctgcataacttcaggaatatgtttcttcaggcagtaaaggaaaatcaaaaaagacgcgaaacagaggagaagatgagacgagctaagctggccaaggagaaggccgaaaaggaacgactggaaaaacagcagaagcgtgaacagctgatcgacatgaacgcggagggagacgagactggcgtgatggatagtctgttggaagctctccagtccggtgctgccttccgaagaaaaagaggcccaaggcaggcaaaccggaaagccggatgcgccgttacgtctttactggcgtccgagctcactaaggacgatgctatggccgctgtgccagctaaggtgtccaagaacagcgagaccttcccaactatcttggaagaggccaaggaactggtgggcagagccagttag

SEQ ID NO: 28367 - DNA, 3810 bp, synthetic construct
  misc_feature 1..3810: note = Description of Artificial Sequence: Synthetic coding sequence
  source 1..3810: mol_type = other DNA
atggagccccctgggggaagcttaggtcccggtcgcggaacacgcgataagaagaagggaagaagcccagacgagctcccttccgctggcggtgacggaggcaaatcaaaaaaatttaccctgaagcgacttatggctgacgagcttgagaggtttaccagtatgagaattaagaaagaaaaggagaagcccaatagcgcacacaggaacagtagcgctagctatggagatgatcccacagctcaaagcctgcaggacgtctcggatgagcaggtgctagttctgtttgaacaaatgctgctagatatgaatctgaacgaggagaaacagcagcctctgagggagaaagacataattatcaaaagggagatggtgtctcaatacctatatacttctaaggccggtatgtcccagaaagagtcaagcaaaagtgccatgatgtatatccaggagctgcgcagtggattgcgggacatgccccttctctcatgtttggagagccttcgagtgtcactgaacaataaccccgtttcatgggtacaaacctttggtgccgaaggattggcaagcttgcttgatatcctgaaacggttacacgacgaaaaagaggagaccgctgggtcatacgattctcggaataagcacgagataatccgatgcctcaaagcgttcatgaataacaagttcggcatcaaaacaatgctggaaaccgaagaaggtatcctgctgctcgtgagggcaatggacccagccgtgccaaacatgatgattgacgcagcgaagttgctaagcgccttgtgcatcttgccccagccagaggatatgaatgagcgagttctcgaggccatgacggagagggctgagatggacgaggtagagagattccaacccctgctagatggtttaaagtccggcacaacaatcgccctgaaggttggatgcctgcagcttatcaacgccctgataacacctgccgaggaactggattttcgcgtccacatcaggtctgagctaatgagactcggtctgcaccaggtgttgcaagatttgcgagaaatcgagaacgaggatatgcgcgttcagctcaatgtgtttgatgagcagggtgaagaagattcttatgatctcaagggacgactggatgacatccgcatggaaatggacgactttaatgaagtcttccaaatcctgctgaacacagtgaaggacagcaaggctgagcctcacttcctaagtatattgcagcatctgctgctggtgcgcaatgactatgaggcacgcccacagtactataaattgatcgaagagtgtatcagtcaaattgttctccacaagaatggggcagatccagatttcaaatgtcgccacctccagatagagatagagggcttgatcgaccagatgatcgacaagaccaaggtggagaaatctgaggctaaagctgccgagctagaaaaaaagttggatagtgaactgacagcccgacacgagttgcaggtggagatgaaaaagatggagagcgactttgagcaaaagctgcaggatctgcagggagaaaaggacgccttacacagcgaaaaacagcagatcgcaaccgagaaacaagatttggaggcagaggtcagtcaactgaccggtgaagtggctaagctcaccaaagagctggaagacgcaaagaaggagatggccagcctcagcgccgctgccatcactgtcccaccctccgtgccctctagggcgccagttccccctgccccacctcttccaggcgattcaggcacaatcatcccaccgcctccagctccaggagactccacgacccccccaccaccaccacctccacctcctcccccacctcctcttcccggaggcgtgtgcatcagttcacccccaagcctgcccggaggaactgcgatctccccacctcctcccctttccggcgatgcaaccattcctccccctccacctctccctgaaggcgtgggcatcccttccccttcatcactcccaggcggtactgcaataccccctccgccaccactgcccggttctgccaggattccccctccacccccaccgcttcccggatcagccggtatcccccctcctcccccacctctgcccggagaggctggcatgcctcctcctccccctccattgccaggtggaccaggcattcctccacccccaccctttcccggaggaccaggcataccccctccgccaccaggaatgggaatgccaccaccaccgccttttggatttggcgtaccagcagccccagtcctgccctttgggctgaccccaaagaagttatacaagccagaagtccagctccgtcggccaaactggtccaagttagttgccgaggacctgtcccaggactgtttttggacaaaggtcaaggaggatcggttcgagaataacgagctgttcgccaagctcaccctgacgttctcggcacagaccaagacaaagaaagaccaggagggtggggaagagaagaagtctgtacagaagaaaaaggtgaaggaattaaaagttttggactcaaaaactgcgcaaaatctctcaatctttcttgggagttttcgtatgccttaccaagaaattaaaaatgtgatcctggaggtgaatgaagccgtgttaaccgagagcatgattcaaaatctgataaagcagatgcccgagccagaacaacttaaaatgctgtcggagctaaaggacgagtatgacgacttggctgaatcagagcagttcggcgtggtgatgggaacagtaccccgtctcaggccaagattgaacgcaatcctcttcaagctgcagttctcggaacaggtcgaaaacattaagcctgagattgtctcagttacagcggcatgtgaggaactgcggaaatcggagagtttttccaacctactggagattacgcttctggttggtaactacatgaacgctggaagtcgtaacgcaggtgctttcggctttaacatcagcttcctctgcaagctacgggatacgaagagtacagatcagaagatgaccctgctgcattttctggctgaattgtgtgagaatgattaccctgatgtgttaaagtttcccgatgagcttgcccatgtggaaaaagctagtagggtcagcgccgaaaaccttcagaagaatctggatcagatgaaaaaacaaatcagcgacgtcgagagagatgtgcagaattttcccgcagccaccgatgagaaagataagttcgtggagaagatgacttcgtttgtcaaggatgcacaggaacagtacaataaacttcggatgatgcactcgaacatggaaacactgtataaagaacttggcgagtactttcttttcgatccaaagaagctctcagtggaggagttctttatggatctacacaacttcaggaacatgttcctccaagcggtaaaagagaatcagaagcgtcgtgagactgaggagaagatgcgacgcgcaaaactggcgaaagagaaagccgaaaaagaaagactggaaaaacagcagaagcgagagcagcttatagatatgaatgccgaaggagacgaaactggcgttatggatagtctcctggaagccttacagtcgggagcagctttcagacggaaaaggggcccaagacaggccaacagaaaggcaggctgcgctgtcacctcactattggcctctgaactgactaaagacgacgcaatggcagctgtgcctgctaaggtgtccaagaatagtgagacattccctacaatattggaggaggctaaagaacttgtcggacgcgcttcctag

SEQ ID NO: 28368 - DNA, 3792 bp, synthetic construct
  misc_feature 1..3792: note = Description of Artificial Sequence: Synthetic coding sequence
  source 1..3792: mol_type = other DNA
atggagccccctggcggttccctcgggccagggaggggaacacgggataagaaaaaaggtcgctcacctgacgaactcccatctgcgggaggggacggcggaaagtccaagaaatttctcgagcgctttacgtcgatgaggattaaaaaagaaaaagagaagcctaactcagcgcatcgcaacagcagcgcgagttatggcgacgatcctaccgcccagagcctccaggacgtcagcgacgagcaagtgctcgtgctcttcgaacagatgctgctggatatgaatctcaatgaagagaaacagcaaccgctgcgcgagaaagacatcataatcaagcgcgagatggtctcccagtacctgtatacttccaaggcagggatgtctcagaaagagtcatcaaagtcagctatgatgtacatacaggagctcaggtccggtctaagggacatgcccctgctctcttgcctggagagtctccgtgtatcgctgaataacaacccagtgagttgggttcagacctttggggcagagggcctcgccagtctgctggatatcctaaagcgcttgcacgatgagaaggaggagacagccggaagttacgacagccggaacaagcacgagatcatccggtgtctcaaagcgtttatgaacaataaattcggaatcaagaccatgctcgagactgaggaagggatccttctactggttcgcgctatggatccagctgtcccaaatatgatgatcgacgctgccaagcttctttctgctctttgtatcctgccacagccagaggacatgaatgagcgcgtgctcgaggccatgaccgaaagggccgaaatggacgaagtggagcgattccaacctctcctagacggactcaagagcggaactacaatcgctttgaaggtgggctgccttcagctgataaatgctttgattaccccagccgaggagttggacttccgggttcacattaggagcgagttgatgcgacttggattgcatcaggtactgcaggacttgcgagagattgagaatgaagatatgcgggtccagctgaatgtcttcgatgagcagggtgaggaggactcctatgacttgaagggcaggctggacgatatcagaatggaaatggacgacttcaatgaggtgtttcaaattcttcttaacacagtgaaagatagcaaagccgagccccactttcttagcatacttcaacatctacttctcgtgcgtaatgactacgaagccagacctcagtactacaaactgattgaggagtgtatctctcagatcgtccttcacaagaatggagccgacccggactttaaatgcaggcacttgcagatagaaatcgagggacttattgatcagatgatcgacaagactaaagtagagaaatcggaagccaaagccgctgaactcgagaaaaagttagacagtgagttgactgcgagacatgagctgcaagtagaaatgaaaaagatggagtcagattttgaacagaagctgcaggatctgcagggtgaaaaagacgcattgcacagcgaaaagcagcagatcgcaacagagaagcaggatcttgaagccgaggtatcacagttgaccggggaagtcgcaaaactgacaaaagagctggaggacgctaagaaagagatggccagcctttcagctgccgctatcactgttcctccttctgtgcctagtcgtgctcccgtacccccagcacccccacttcctggcgacagcggcacaatcattcccccaccccctgcccctggggatagcaccactccccctcctccaccccctccgcctcccccaccacctccactgcccggtggggtgtgtattagcagcccccctagtctgcctggtggaaccgctatttctccgccaccacctttatctggtgacgcaaccatcccacctccccctcccttacctgaaggggtcggcatccccagcccgagctcgctccccggtggtaccgctattccacctcccccaccgctgcccggttctgctcggatccccccacctccgcctcccctcccaggctccgccggaatcccgccacctcctccaccattgcctggcgaggcgggtatgccccctcctccaccacccctgccagggggtccaggaatcccaccaccccctcctttcccaggcggacctggaatccccccaccaccacccggtatggggatgcctccaccccctccctttggcttcggggtcccagctgctcccgtcctgcccttcgggctgactccaaagaaactgtacaaacccgaggtgcagttgcgccgtcctaattggtccaaacttgtggccgaagacctgtcccaggattgtttctggacgaaggtcaaagaggacagattcgaaaacaacgagctctttgcaaaactcaccctgactttcagcgctcagacaaagacgagcaaagccaaaaaagaccaagagggtggggaggagaagaagtccgtccaaaagaagaaagtcaaggagctgaaagttctagactccaagacagctcagaacctttccatcttccttgggagcttcaggatgccatatcaagagatcaagaacgtgatcctcgaggtgaatgaagccgtgctgacagagagtatgattcagaacctgattaaacagatgccagaacctgaacagttgaagatgctgtcagagttaaaagacgagtacgatgacctggcagagtccgagcagttcggtgtggtgatgggaaccgtcccgagacttcggccaaggttgaacgcaatcctgttcaagctccaattctctgagcaggtggaaaacatcaagcctgagattgtatctgtcacagccgcttgtgaagagctaaggaagtccgaatctttctcaaacctcctggagatcacactgctggtcgggaattacatgaatgccggatcacggaatgctggcgcttttgggtttaacatttctttcctgtgtaagcttcgagacactaaaagcacagaccagaagatgactttattacacttcctcgccgaactatgcgagaatgattacccagatgtccttaaatttcccgacgaattggctcatgtggagaaggctagcagagtgagcgccgagaatctgcagaagaacctggatcaaatgaagaagcaaatttcggacgtcgaacgggacgttcagaattttccagctgccactgacgaaaaggacaagtttgtggaaaaaatgacttcatttgtgaaggacgcacaggagcagtacaacaagctgagaatgatgcattccaacatggagacactctataaggagctcggcgaatattttctatttgacccgaagaaactgtctgtggaggagttcttcatggacctgcataatttccgtaacatgttcctccaggctgtaaaagagaatcaaaaacgccgtgagactgaggagaagatgagacgggctaaactcgctaaggagaaagccgaaaaagagcggctggagaagcagcaaaagcgcgaacagttgatcgacatgaacgctgaaggtgatgagacgggggtgatggattccctgctggaggcactccaaagcggcgcagccttccggcgaaagagaggccctaggcaagccaatcgcaaggcgggttgcgctgtgaccagcctcctggcatctgaattgacaaaagatgacgccatggcggcagtgcccgcaaaagtgtccaagaacagcgagacttttcccacgatattagaggaggctaaagaactcgtgggcagagcctcctag

SEQ ID NO: 28369 - DNA, 3819 bp, synthetic construct
  misc_feature 1..3819: note = Description of Artificial Sequence: Synthetic coding sequence
  source 1..3819: mol_type = other DNA
atggaaccgccaggcggtagccttggacccggtagggggactagagacaagaagaaggggaggagtcctgacgaactcccaagcgctggcggagatggcggaaagagcaaaaagtttacccttaaacggctaatggccgacgaactcgagcgcttcactagcatgcggattaagaaggagaaagagaaacctaactccgctcaccgtaattcctcagcttcctacggtgatgatcccacagcccaatctcttcaagacgtgtcagacgaacaggttttggtgttgttcgaacaaatgctgcttgatatgaatctgaacgaggaaaagcagcagcccctccgcgagaaagacatcataattaaacgtgaaatggtcagccagtacttatatacatcgaaggctggaatgtctcaaaaggagagctcaaaatctgccatgatgtacatccaggagttacggagcggtctaagagacatgcctctcctttcctgtctggaatccctgcgtgtgagcctaaataataacccggtctcgtgggttcagacattcggcgcagaggggctggcctcactgttggatatcttgaagcgactgcatgacgagaaggaggagacagccggttcctatgatagcaggaacaaacacgaaattattaggtgccttaaggcgttcatgaacaacaagtttggaatcaagacaatgctggaaacagaggagggtatcctcctcctcgtcagagccatggatcctgctgtgccaaacatgatgatagacgccgctaagctactctcagcgctctgtatcctcccacagccagaggacatgaacgaacgcgtcctcgaggctatgaccgaacgtgccgagatggatgaggtggagaggttccagcctctactggatgggctgaaaagcggtaccaccatcgctctgaaagtggggtgcctacagctaatcaatgccctcataacgcccgcagaagagctggactttcgcgtccacatcagaagtgagcttatgcgtctcgggctgcatcaagtccttcaggacctgagagagatcgagaacgaggatatgagagtccagttgaacgtctttgatgagcagggcgaggaagacagctacgacttgaagggcagactagatgatatccggatggagatggacgattttaacgaggtctttcagatactgttgaataccgtgaaggactcgaaagccgaaccacactttctgagtatcctgcagcatttgttgctggtccgaaatgactatgaagccaggcctcagtactacaagcttatagaagagtgcatatctcaaatcgtgttgcacaagaacggagcagacccagattttaaatgtcgccacctccaaattgaaatcgaaggcctcatcgatcagatgatcgataaaacaaaggtggagaaatccgaagccaaagccgctgaactggagaagaagctcgattccgagctgaccgccaggcacgagttgcaggtggagatgaagaaaatggagagcgatttcgaacagaagctacaggacctgcagggtgagaaagatgcactgcactcagaaaagcagcagatcgctactgagaagcaagacttagaagccgaagttagccagctgacgggggaagtcgccaagttgacaaaggagctcgaggacgcaaagaaggagatggccagcctatcagctgcagctattaccgtgcccccttctgttccctcacgagctcctgtgccaccggcaccacctctccccggtgatagcgggaccataatacccccaccccctgccccaggcgattcaactacaccacccccacctcccccacccccacccccaccccctcctctgcccggaggcgtatgtatttcttctcccccatctttgcctggagggactgcaatttcccctccaccacctttgtctggagatgccactattccaccccctcctcccctcccagagggagttgggattccctcacctagctccttgccagggggtacagctattcctccgcctccaccactccctgggtcagctcggattcccccaccaccccctccactgccagggtcggccggtatccctccccctcctccccctctgcccggagaagcaggaatgcccccacctccccctccactgccaggtgggcctgggatcccgccaccacctcctttccccggtggacctggaattccacccccacctccaggcatgggcatgcctccccctccacctttcggatttggcgtgccagcagctccagtgcttccttttggacttactcccaagaaactgtataagcccgaagtgcaattgcgtcgcccaaactggagcaaactggtggccgaggacctgtcccaggactgcttttggaccaaagtgaaagaagatcggttcgaaaacaacgagctcttcgcgaagctaaccctgacattctcagcccagaccaagacttctaaagcaaagaaagatcaggagggaggcgaagagaagaaaagcgttcagaaaaagaaggttaaggagcttaaggtgcttgactcaaaaacagcgcagaacctgtccattttccttggcagttttcgtatgccatatcaagaaattaagaacgtgatacttgaggtaaatgaggctgtgctgactgagtcaatgatccaaaatctgatcaaacagatgccagagcctgagcagctcaaaatgctatctgagctgaaggacgaatatgacgacctggcagagagtgaacaattcggcgttgtaatgggaaccgtacctaggctgaggccccgactcaacgcaatactcttcaagctccagttttctgagcaggtggagaacatcaaacccgaaattgtgagcgttacagcagcctgcgaggagctccgaaaaagcgagtccttcagtaaccttttagagatcacactgctggtcgggaactatatgaacgctgggtcaagaaatgcgggtgctttcggctttaatatcagttttctctgcaagctgcgtgataccaagtccactgatcagaagatgactctcctgcactttctcgccgagctgtgcgagaacgattaccccgatgtgctgaaatttcccgatgaattggcccatgtagagaaagcctcacgggtgagcgctgagaaccttcagaaaaacctggatcagatgaagaagcagattagtgacgttgaacgagacgtccaaaatttcccggctgcaaccgatgagaaggacaagtttgtcgagaaaatgacaagctttgtcaaggacgcacaggaacagtacaataaactgcgtatgatgcacagtaatatggagactttatacaaggagctgggtgagtacttcctatttgaccctaaaaagctgtctgtcgaggaattcttcatggacctgcacaattttcggaacatgttcctgcaggcggtcaaagaaaaccaaaaacggagggaaactgaggagaagatgaggcgcgcaaaattggccaaggaaaaagcggagaaggaaaggctagaaaagcagcaaaagagagagcaactgattgacatgaatgcagagggcgatgaaaccggagttatggatagcctgctcgaggccctccagtcaggggctgcattccggagaaagcggggacctaggcaagcaaatagaaaagctggttgtgcggtgacgtctctgctggcctcagagctcaccaaggatgacgctatggcggctgtgccagctaaggtgtcaaagaattctgagacatttccgaccatactggaggaggcgaaggaactggtagggcgagctagctag

SEQ ID NO: 28370 - DNA, 3747 bp, synthetic construct
  misc_feature 1..3747: note = Description of Artificial Sequence: Synthetic coding sequence
  source 1..3747: mol_type = other DNA
atggaacctcccggaggcagcttggggcctgggaggggcacccgtgacaagaagaaaggaaggtccccagatgagttgcctagcgcaggtggggacggcggaaagtcaaagaaattcctggagagattcacatctatgcgtatcaagaaggagaaagagaagcctaacagtgcacacaggaactcttctgccagttacggagacgaccccacagctcagtccttgcaagatgtgtccgacgaacaggtgctggtcttatttgagcaaatgcttctggacatgaatttaaacgaagagaagcagcagcccctgagggagaaggacattatcattaagcgggagatggtatctcagtatctatacacatcgaaggcaggaatgtctcagaaggagtcatctaagagcgccatgatgtacattcaagaactcaggtctggcctgcgagatatgcccttgctctcgtgtttagaaagcctgagggtctctcttaataataacccagtctcatgggtccagacctttggggcagaaggcttagccagcctgctggacatcctgaagaggcttcatgacgagaaagaagagacagccggaagttatgactcaagaaataagcacgagattataagatgcctgaaggcatttatgaacaacaaatttggcatcaaaactatgcttgagactgaagagggaatactcctgcttgtccgcgctatggaccctgcagtacctaatatgatgattgacgctgctaagcttctgagcgcactctgcatacttccacagccagaagacatgaacgagcgcgttctagaagctatgaccgagcgggctgagatggacgaggtagagaggttccagccccttttagacggtttaaagtctggcacgaccattgccttaaaagtagggtgccttcagctgattaacgctctcattactccagccgaggaactcgatttccgagttcatatcagaagcgagcttatgaggttggggctccatcaagtgttgcaggatctgcgggagattgaaaacgaggacatgcgggttcaattgaatgtgttcgacgagcagggggaggaggacagttatgaccttaaggggaggctagacgacattagaatggagatggacgactttaatgaggtatttcagatcctgcttaacacagttaaggattctaaggcagagccccacttcctgagtatcttgcaacatctcctgctcgttagaaacgattatgaagcgagacctcaatactacaagctaattgaggaatgcatctcgcaaattgtgctgcacaagaacggtgcggatccggatttcaagtgtagacatctgcagatcgaaatcgagggacttatcgatcaaatgatcgataagactaaggtagagaagtccgaagcgaaggccgctgaactggagaaaaaactagactccgaactgacagccagacatgagctgcaagtggagatgaagaagatggagtccgacttcgaacaaaagcttcaggacctgcagggagagaaagacgcccttcatagcgaaaaacagcaaatagctactgagaaacaggacctggaggccgaggtgtcccagctcacaggtgaagtcgcgaaattaacaaaggagttagaggatgcgaagaaggaaatggcgagtctttctgcggcagcgatcactgtgcccccatctgtgccaagtcgagctccagtaccacctgctcccccactgcccggtgatagcgggactataatcccaccaccgcctgcacccggagattctaccaccccaccaccacccccaccgccaccccctccccctccacccttgcctgggggtaccgcaattagcccaccaccccctctgtctggagatgctaccatccccccacccccaccgctacctgagggggtcggaattccgtctccatccagcctgcccggtggaaccgccataccacctcctccacctcttccgggtagtgcccgtatcccacctccaccacctcccctgccgggtagcgccggtattccaccccctccacctcccctcccaggcgaagctggtatgccgccaccacctccccctttgccaggcggacccggaatcccccctccaccgccatttccagggggaccaggtatacctcctccacctccaggaatgggtatgccacccccaccacctttcggatttggcgtcccagccgcaccagtgctcccatttggtttgactcctaagaagctttataaacctgaagtgcagcttcggaggcccaattggtccaaactcgtcgccgaggacttgtctcaagactgtttttggacaaaagtcaaagaagatcgattcgagaataatgagctgttcgccaagctcacgctgacatttagcgcccaaacgaagaccaagaaggatcaggaggggggagaagaaaaaaaatcggtgcagaaaaaaaaggttaaggagttaaaagtcctagacagtaagaccgcccagaatctgtccatcttcctgggcagttttagaatgccatatcaggagataaaaaacgtgatcctggaagtgaacgaggctgtcctgacggagtccatgatacagaacttgatcaagcaaatgcccgagcctgagcaactcaaaatgcttagcgagctgaaggacgagtatgacgacttggccgaaagcgaacaattcggcgtggtgatgggcactgtaccgagattgcggcctaggttaaacgccattttattcaagctgcaattttctgagcaggtagagaatattaagcctgagattgtgtcagttaccgctgcctgcgaggaactaagaaagtctgagagcttttctaatctgttagagatcacattacttgtagggaattatatgaacgctggcagccggaacgccggagcctttggcttcaacatcagctttctgtgcaaactccgtgacactaaatctacagatcagaagatgactttgttacactttcttgctgaattgtgtgagaacgattaccccgatgtgcttaaattccccgacgaactggcacacgtggaaaaggcctccagggtgtcagccgagaatctgcagaagaacctcgaccaaatgaagaaacagatctcagatgtagaacgggacgtgcaaaacttcccagcagccaccgacgagaaggacaaattcgtcgaaaaaatgacaatttttgtgaaggacgcgcaggaacagtacaataagcttaggatgatgcactcaaacatggagacgctgtacaaggaactgggagaatactttttgttcgatccaaagaaacttagtgtagaggaatttttcatggacttgcacaatttcagaaacatgtttctgcaggctgtcaaggaaaatcaaaagcgcagagaaacagaagaaaagatgcggagagccaagctcgcaaaagagaaagccgagaaggagaggctggagaaacagcagaagagagaacagctgatagatatgaatgccgaaggcgacgagacaggcgtgatggactctctgttggaggctcttcaatcaggggctgcgttccgccgaaagaggggacctcggcaggcaaaccgaaaggctgggtgtgctgtcacttctctcctggcaagcgagctgacaaaagatgacgctatggcagcggtgcctgcaaaagtgtccaagaacagtgaaacattccccactattctcgaagaggctaaggagttagtgggacgcgcaagctag

SEQ ID NO: 28371 - DNA, 3795 bp, synthetic construct
  misc_feature 1..3795: note = Description of Artificial Sequence: Synthetic coding sequence
  source 1..3795: mol_type = other DNA
atggagcccccaggcggatccctgggccctggacgtggaacacgagataagaagaagggtagaagccctgatgaactcccttccgctggtggagatgggggtaaatccaaaaagttcttggaacggttcacatctatgcgaatcaaaaaggagaaagagaaaccgaattccgctcatcgcaactcctcggccagttacggtgatgacccgacagcccaaagtctccaagacgtctcagacgagcaggtgctggtcctgtttgaacagatgctgctggacatgaacctgaatgaagaaaaacagcaaccactgcgggaaaaagatatcatcataaaaagagagatggtgtctcagtatctgtatacatcaaaagctggtatgagtcaaaaggagagtagcaaaagcgccatgatgtacatacaggagcttcgttctggtcttcgcgatatgccactattaagttgtctggaaagtcttcgcgtgagtctcaataacaaccctgtgtcatgggtgcagactttcggggctgagggcttagctagcctgctcgacatcctgaagagactccacgatgagaaggaggagactgccggtagttacgattccagaaataaacatgaaatcattaggtgcctgaaagcttttatgaacaacaagttcgggataaaaactatgcttgagacggaagaaggcatcctgctgctggtaagagctatggatccagcagtgcccaatatgatgattgatgccgctaaactattaagcgccctctgcatcctgccccaacccgaagacatgaacgagagggtccttgaggcaatgacagaacgagctgagatggacgaggtcgagagattccagccgcttttagacggtctgaaatcgggcaccacgatcgccctgaaagtcggttgccttcagctgatcaatgcactgattacgcctgcagaggagctggattttcgggtccatattagatctgagctcatgcggctcgggctccaccaggtgctgcaagacctcagggagattgaaaatgaggatatgcgggtgcagttgaatgtttttgatgagcagggcgaggaggactcctacgacctgaagggaaggttagacgacatccgcatggagatggatgatttcaacgaggtgttccagatcctgcttaacactgtgaaagactctaaggctgaaccccactttttatctatattgcagcacctgctgctggtgcgtaatgactatgaagcccgtcctcagtattacaagctgattgaagagtgtatttcacagattgtgctccacaaaaacggtgcagaccctgatttcaagtgtcgccatctgcagattgagatcgaaggcttgatcgaccagatgatcgacaaaaccaaggtggagaagtccgaagcgaaggccgctgagcttgagaagaaactggacagcgaactcaccgcacgtcatgagctccaggtggagatgaagaagatggagagtgattttgagcagaagcttcaggacctgcagggcgagaaggacgctctgcattcggaaaagcagcaaatagccacagaaaaacaggacctcgaggcggaagtatcacagttaaccggcgaggtcgctaaattgactaaggagctggaggatgctaagaaggagatggcatcactgagcgccgcagcaattaccgttcctcctagtgtcccatcccgcgcaccagtacctcctgcccctcccctgcccggagactccgggactataatccctccacctcctgcgcctggcgattcaacgacacctcctccacctccccctcctcctccccctcccccacccttacccggaggggtgtgtatcagcagtcctccctccctgcccggagggaccgccatctcaccacctccacccctgagtggcgatgccaccattccccctcccccaccactccccgaaggagtgggaattccatcgccctcgagtttacctgggggtactgccataccacctccaccccctcttcccggatctgccagaatccctccccctcccccacctttgcccggatctgcgggaattccccctcctccacctccattgccaggcgaggccggtatgcccccaccacctcccccactgccaggaggcccagggatcccaccacctccacccttccctgggggacctggcattcctccgccacctcccggaatgggcatgcctccgccacccccattcggcttcggagtgccagcggctccagttctgccatttggcttaacaccgaaaaagttgtataaaccagaggtgcagctcaggcgcccaaattggagtaagcttgtagctgaagatctgagccaggattgtttctggacgaaggtgaaagaggaccgctttgaaaacaacgaattgttcgccaagttaacattaacattttctgcccaaactaagcgaaccaagaaggccaaaaaggatcaggagggcggtgaagagaagaagtccgtgcagaaaaagaaggtgaaggaactaaaagtactagattctaaaacagcacaaaacctatcgatctttttaggttctttccgaatgccttaccaggagattaagaatgttatcttagaggtgaatgaggccgttctcactgagtccatgatacagaacctgattaaacagatgcccgagccagaacagctgaaaatgcttagtgaactgaaagatgaatatgatgacttggctgagtctgagcagttcggtgtggtcatgggaacagttcccagactgcgaccaaggctgaatgccatcctgttcaagctgcaattttccgaacaggtggaaaatatcaagcccgaaatcgtcagtgtaaccgctgcctgcgaggaactcagaaagtccgaaagtttcagcaacctattggagatcacactgttggttggtaattatatgaatgcgggtagccggaatgctggggcatttggctttaacatatcctttttatgcaaactccgggacaccaagtcaaccgaccagaagatgacactcctgcactttctggcagagttgtgcgagaatgactatcccgatgtgctcaaatttccggatgagctagcgcatgtggagaaggcaagcagggtgtccgctgagaatctgcagaagaatctcgatcagatgaagaagcaaatctccgacgtggagcgagacgtgcaaaacttccccgctgccaccgacgaaaaagataagttcgtagaaaagatgactatctttgtgaaagatgctcaggagcagtacaacaaactgagaatgatgcactcaaacatggagacactctacaaggagctgggagagtactttctgtttgatcctaagaaactctccgtggaggagttcttcatggacctccataattttaggaatatgttcctgcaagcagttaaggaaaatcagaagcgacgagagacggaggagaagatgagacgggcaaagctggcgaaggagaaagccgagaaagagcgactggaaaagcagcagaagcgggaacaattaatcgatatgaatgccgaaggcgacgagacaggtgtgatggattctctgctggaggctttacagtcaggcgcagcctttaggaggaagcgtggaccaaggcaagccaatcggaaagctgggtgcgccgtcacatccctgctagcgtccgagctcaccaaggatgatgcaatggccgcagtgccagccaaagtgtctaaaaattcagagacattcccaaccattctcgaggaagcaaaagaattagtcggccgtgctagctag

SEQ ID NO: 28372 - DNA, 855 bp, synthetic construct
  misc_feature 1..855: note = Description of Artificial Sequence: Synthetic coding sequence
  source 1..855: mol_type = other DNA
atggcctctttatcagctgccgcaatcacagtccctccttctgtacctagccgggctcctgtgccacctgcaccacccctcccaggggactcaggcactatcattcccccaccgccagcaccgggagactccacgacccctcctcctccacctccccctccaccaccaccaccccctctgccaggcggtgtgtgcatcagcagcccaccctcattgcccggtggcacagcaatctccccacctcctccactgagtggcgacgccacaattcctccaccaccgccactccctgagggtgttggaattcccagcccgagctccttgccaggaggtacggccattccacccccaccccctcttcctggatctgccagaattcctcctcctccccctccactccctgggagcgcaggcattccaccccctcctcccccattgccaggagaagccggaatgccccctcccccaccacctctgcctggtggacccggtatccccccacctcccccttttcccggaggccctggaatccctcctccacctccaggaatgggcatgccgcctcctccaccctttggctttggcgttccggctgcgccagtactaccttttggcttgacccctaagaaactgtataagcctgaagtccaactgcgaaggccgaactggagcaaattagttgctgaagatctgtcccaggactgcttctggacaaaagtgaaagaagacagattcgagaataacgagctctttgcgaaactgactttgacatttagtgcccagacgaagtcagagaaagcaaagaaggatcaggagggaggggaggagaagaagagtgtgcagaaaaaaaagtag

SEQ ID NO: 28373 - DNA, 513 bp, synthetic construct
  misc_feature 1..513: note = Description of Artificial Sequence: Synthetic coding sequence
  source 1..513: mol_type = other DNA
atgtactgccagttcgccagttttcagtacacctgtcaaccctgtcggggtcagagaatgctgtgcactagggacagcgaatgctgcggagatcagctgtgcgtgtggggccactgtactaagatggccactcggggaagcaatggaacaatttgcgataatcaaagggactgtcagccgggtctgtgttgcgctttccaacggggtctgctgtttccagtgtgcacaccacttccggtggagggcgaactgtgccatgatcccgcttcacgactgctcgatctcattacatgggaactagaacccgatggcgcacttgatcgatgcccatgtgccagcggcttattgtgccagccccactctcacagtcttgtgtatgtctgtaagcctactttcgttggctctcgagatcaggacggagagattctcttgccaagagaagttccggacgagtatctagcggcatcttggcggaggtgcgcccgatcttggcgtacatggcgtggagcttag

SEQ ID NO: 28374 - DNA, 1053 bp, synthetic construct
  misc_feature 1..1053: note = Description of Artificial Sequence: Synthetic coding sequence
  source 1..1053: mol_type = other DNA
atgcaacgacttggagcaaccctgctatgcttactgcttgcggctgctgttccaaccgctcctgctcctgcaccgactgccacatctgcccctgtcaagcccggaccggctctgagctacccccaagaggaggctacactgaatgagatgttccgggaggtagaagagcttatggaggatacacagcacaaactgcgtagtgcagtcgaagagatggaggccgaggaagccgctgcaaaggccagttcagaggttaacctcgcaaatctgcccccaagctatcataatgaaacaaacacagacactaaggttgggaacaatactatacatgttcaccgggagatccataagattaccaacaatcagacagggcagatggtgttctcagaaaccgtgattacctcagtcggagacgaagaggggagaagaagtcatgaatgcatcattgacgaggattgtgggcctagtatgtactgccagtttgccagctttcaatatacatgtcagccttgccgaggccagagaatgctttgcacccgcgacagcgaatgttgcggggatcagctgtgcgtgtggggtcactgcaccaagatggcaactagaggatccaacgggacaatatgtgacaaccaacgtgattgccagcccggtctttgttgtgcgtttcagcggggactgctgtttcccgtttgtacaccgctgccagtcgagggagaattatgtcacgatccggcatctaggctcctcgacctcatcacttgggagttggagccggacggagctctggaccgctgtccctgtgcgtccgggttgctgtgccaaccccactcgcatagcctggtttatgtctgcaaacccaccttcgtggggtcaagggaccaggatggggaaatactcctccccagagaagtccccgatgaatacgaagtcggttcattcatggaggaagtgagacaggagttagaggaccttgaacgctcactgaccgaggagatggccctgcgggagcccgcagcagctgccgcagcactgcttggaggtgaagaaatctag

SEQ ID NO: 28375 - DNA, 882 bp, synthetic construct
  misc_feature 1..882: note = Description of Artificial Sequence: Synthetic coding sequence
  source 1..882: mol_type = other DNA
atggaggatacacagcacaagttacgcagtgctgttgaagaaatggaggctgaggaggcagccgcaaaggcatcaagcgaagtcaacctggctaatctgccaccctcatatcacaacgaaacaaacactgacacaaaagtgggtaacaataccatccacgtgcaccgtgagattcataagattacaaacaatcagaccggacagatggtcttctccgaaaccgtaataacaagcgtcggtgacgaagagggtcggaggtcgcatgagtgcatcatcgacgaggattgcgggccttccatgtactgccagttcgcctcctttcagtacacgtgtcagccttgccggggacaacgtatgttgtgcacgcgagatagtgagtgttgtggggatcagctctgcgtgtggggccattgcacgaaaatggctacccgcggatcaaatggcacaatttgcgataaccagcgagattgccagccaggcctttgctgcgcgtttcagcgcggtcttttgtttcccgtttgcacccccctgcccgtggagggcgaactttgccacgatccggcatcacggctgcttgatctcattacatgggaattggagccagatggggctctagatcggtgcccctgcgccagtggcctcctgtgccagccacactcccacagcttggtgtacgtgtgcaagcccacctttgtggggtctcgcgaccaagatggggaaatcctcctgcctagggaggtgcccgacgaatatgaggtcggttcatttatggaggaagtgcgacaagagctggaggacctcgagcgctctctgacggaagaaatggccctgcgagaaccggcagcagccgctgcggctctgctgggaggcgaagaaatctag

SEQ ID NO: 28376 - DNA, 1053 bp, synthetic construct
  misc_feature 1..1053: note = Description of Artificial Sequence: Synthetic coding sequence
  source 1..1053: mol_type = other DNA
atgcaaaggctcggggcaacattactctgcctccttcttgctgctgcagtccccactgctcctgcccctgcccctaccgccacaagcgccccagtgaagcccggacctgctttatcttatccacaggaggaggcaacactcaacgagatgtttcgagaggtagaagaattgatggaggatacccaacataaattgagatcggcagtcgaggagatggaggccgaggaagcagcagcaaaagcctcatccgaagtcaacctggccaatcttccgccaagttaccacaatgagaccaacacagacactaaagtgggcaataatacaatccacgtgcaccgcgaaatccataagataacgaacaatcagaccgggcaaatggtcttttccgaaaccgtgattacatcagtaggcgatgaagaggggagacggtcccacgagtgtatcatcgatgaagactgcggcccatctatgtattgccagtttgcgtcttttcagtatacctgccaaccctgccgtggacagagaatgctgtgtactcgggatagcgagtgctgcggcgaccagttgtgtgtgtgggggcactgcactaagatggccactaggggtagcaacggaactatctgcgataaccagcgggattgccagccaggcttatgctgtgccttccagcgtggcctgctgtttcctgtgtgtaccccattgcctgtggagggtgagttgtgccacgatcctgcatctcggttgctggatctcataacctgggagctggagcctgacggtgctttggacagatgcccatgtgctagtggcctgctgtgtcagcctcacagtcacagcctagtctatgtgtgcaagcccacctttgtgggctcgagagaccaggacggtgaaattctgttacccagggaggtgccggatgaatacgaagttggctctttcatggaagaggtgaggcaagagctggaagatcttgagcgatctttgaccgaggagatggccctccgcgagccagctgccgcagctgcggcacttctcggaggggaagaaatttag

SEQ ID NO: 28377 - DNA, 969 bp, synthetic construct
  misc_feature 1..969: note = Description of Artificial Sequence: Synthetic coding sequence
  source 1..969: mol_type = other DNA
atgcagagacttggggcaactttgctgtgtttgctactggccgcagccgtcccaactgcaccagcccctgcgccaacagctacctccgcacccgttaaacctggtcctgcactgagttacccccaggaggaagccacccttaatgaaatgttcagggaggttgaggagctgatggaagatacccagcacaagctccggagcgcagtggaggaaatggaagctgaggaagccgcagctaaggcatcctcggaggtaaacctggccaaccttcccccatcctaccacaacgaaaccaatacggatacgaaagtaggcaacaacacaatacatgttcaccgggagatccacaaggagtgcatcatcgacgaagattgcggcccttctatgtattgccaatttgcaagcttccagtacacatgtcagccgtgcagagggcagcgcatgctgtgcacccgcgattctgaatgctgcggagaccagctttgcgtctgggggcattgtaccaaaatggccacccggggatccaatggcacaatctgtgacaaccagagagactgccaaccaggattatgctgtgcattccagagagggctcttgttccctgtatgtacccctctcccagtggaaggcgaattgtgccacgaccccgctagcaggctgctggacctaatcacatgggaactggagcctgatggagctctagacagatgtccatgcgcatcaggcctgctgtgccaacctcattcccactccctcgtgtatgtatgcaagccgactttcgttggaagtagggaccaggacggcgagatcctcctgcctagggaggtccccgacgaatacgaggttggaagcttcatggaagaggtcaggcaggagctggaggacctagagcgcagcctgaccgaagaaatggctctgagagagcctgccgcagcagccgctgctctcctcggaggtgaagaaatctag

SEQ ID NO: 28378 - DNA, 708 bp, synthetic construct
  misc_feature 1..708: note = Description of Artificial Sequence: Synthetic coding sequence
  source 1..708: mol_type = other DNA
atgcagcgactcggggcaacactgctgtgcctcctgctagcagcagctgtgcctacagcacctgccccagctccgacagcaaccagcgcacctgtaaaacccggtcccgcactgagttatccccaggaggaggccaccctgaacgagatgtttcgggaggtagaggagttgatggaagatacacagcataaactgagatcagctgtcgaagagatggaggctgaagaggcggcagccaaagcatcctcagaagtgaaccttgccaacctgccaccaagttaccataacgagactaatacagataccaaagttggcaacaacacaatccacgtgcaccgggagatccataagatcacaaacaatcagactggacagatggtgtttagtgagaccgtaataacaagcgtaggtgatgaggagggacggcgaagccacgagtgtattatcgatgaggactgtggaccttcgatgtactgccagttcgctagttttcaatacacctgccagccttgtcgcggacagaggatgctctgtactcgggacagtgaatgttgtggagatcaattgtgcgtgtgggggcattgtacgaagatggccacccggggatctaatgggacaatctgcgataaccaacgggactgccaacctgggctgtgttgcgcattccaacggggactgctatttccagtctgcactcccctgccatag

SEQ ID NO: 28379 - DNA, 2301 bp, synthetic construct
  misc_feature 1..2301: note = Description of Artificial Sequence: Synthetic coding sequence
  source 1..2301: mol_type = other DNA
atgaagaccccatggaaggtgctcctggggctgctgggcgctgcggctttggtgactatcattactgtccctgtggtactccttaacaagggaacagatgatgctacagctgactctcgcaagacatatacgctgactgactacttgaagaatacatacaggctgaagctttattctctacgatggattagtgaccacgaatatctctataagcaagagaataatatcctagtgtttaatgcagaatatggcaatagtagtgtcttcctggaaaacagtacatttgacgaattcggacacagcatcaacgattactcaatatcccccgatggccaatttatcttgctcgaatacaactacgttaagcagtggcgacatagctacactgcatcgtacgacatctatgatttaaataagcgacagctgataacagaagaacggatacccaataacacccagtgggtcacctggtctccagtgggccataaactggcttacgtctggaataacgatatctacgtgaagatcgagcctaatctgcctagttatagaattacctggacaggaaaagaagacatcatctacaatgggatcaccgattgggtgtacgaagaggaggtgttcagcgcatattcagctttgtggtggtcaccgaacgggacatttctggcttatgctcaattcaatgacacagaggttccgttgattgaatactcattttacagtgatgaatctctgcagtacccgaagacagtgcgtgtcccctatcctaaggctggcgctgtaaacccgaccgtaaaattcttcgtcgtcaacacagattctctgtcatcagtaactaatgctacttccatccagatcacagcgccagcttccatgttaattggcgatcactatctttgtgatgttacttgggccactcaagagcgcatctctctccagtggctgaggcggattcagaactatagtgttatggatatctgtgattatgacgagagttccggcaggtggaactgcctggtggccagacagcacattgagatgagcacaacgggttgggtaggacgatttaggccctcggagcctcacttcaccttagacggcaactcattttacaagattatatccaatgaggagggttaccgacacatttgctattttcagatagacaagaaggactgcacttttatcacgaagggaacatgggaggttataggcattgaggccctgacttctgattacctgtattacatttcaaatgagtataaaggcatgccaggcggaagaaatttatataaaattcagctgtccgattacaccaaagtcacttgtttgtcatgtgagctcaacccagaacggtgccagtattactccgtcagcttcagtaaagaggcaaagtattaccagctgcgctgctccggcccagggctcccactttacaccctgcatagtagtgtcaatgacaagggactcagagtgcttgaggacaacagcgccctcgataagatgttgcaaaacgtacagatgccatctaagaagctcgactttataatcctgaatgagaccaaattctggtaccaaatgatcctgcccccacatttcgataaaagcaagaagtaccctctgctgctcgacgtgtatgcaggcccatgctcccagaaggccgataccgtgttcagacttaattgggcaacttacttagcatctaccgagaacatcattgtggcatcttttgatgggagaggatcgggctaccagggggacaagataatgcacgcaatcaacaggcggctgggcacgttcgaagtggaggaccagatcgaggccgcaaggcagttctctaagatgggctttgtagacaacaagcgtattgcgatctgggggtggtcttacgggggttacgtcactagcatggtcctaggcagcgggagtggggtctttaaatgcgggatcgcggtggccccagtgagccgctgggagtactacgacagcgtttatactgagaggtatatggggcttccgactcccgaagacaacctggatcactatagaaactctaccgtcatgtcaagggccgagaatttcaagcaggtagagtatctgcttattcacggcacggcagacgataacgtgcatttccagcagagtgctcagatcagcaaggccttggtcgatgttggagtcgatttccaagcgatgtggtacacagacgaggaccacggcatcgcaagtagcacggcgcaccagcatatttatacccacatgagccacttcatcaaacaatgtttcagcctcccctag

SEQ ID NO: 28380 - DNA, 645 bp, synthetic construct
  misc_feature 1..645: note = Description of Artificial Sequence: Synthetic coding sequence
  source 1..645: mol_type = other DNA
atgaatgtcttcagaatcctcggggacctgagccacctcttagcaatgatcctccttttagggaagatttggcgcagtaagtgctgtaaaggaataagcggaaagagtcaaatcctgtttgctctggtctttacaacacgctatctggatttgtttaccaactttatttccatctataataccgtaatgaaggtcgtatttctgctctgcgcctacgtcacggtgtacatgatatatggcaagtttaggaaaacttttgatagcgagaatgacactttcaggctcgaatttctgctagtcccagtcattggactgtcatttctggagaactatagctttacgctattggagatcttgtggactttttcaatttacctagaatccgtcgcaattctgccacaactgtttatgatttctaaaactggggaggctgaaacaattaccactcattacctattctttctgggactgtaccgggcactgtatttggcgaattggatacgcagatatcagacagagaatttttacgaccagatcgcagtagtatctggcgtggtccagacaatattctattgcgacttcttttacctgtatgtgacaaaggtgcttaaaggcaagaagctgtcccttcctatgcctatctag

SEQ ID NO: 28381 - DNA, 498 bp, synthetic construct
  misc_feature 1..498: note = Description of Artificial Sequence: Synthetic coding sequence
  source 1..498: mol_type = other DNA
atgaaggaggatcaggtcgtggccgaggagcctggcttccaggacgaggaagagtccctttttcaggacatcgacctactgcagaaacacggtatcaatgtggccgatataaagaagttaaagtccgtggggatctgcacaattaagggaatccagatgaccactagaagagcattgtgcaatgtgaaaggcttatcagaagcgaaggtcgataagatcaaggaggctgctaataagctgatcgaaccgggttttctgaccgcttttgagtacagtgaaaagcgaaaaatggtgtttcatataaccacaggaagtcaggaatttgacaaactcctggggggaggcatcgagtctatggctatcacggaagccttcggtgaatttaggacagggaagacccagctgtcgcacactttatgtgtgactgcccagttaccaggcgctggcggatacccaggtggaaaaatcatattcatcgatactgaaaatacgctttag

SEQ ID NO: 28382 - DNA, 420 bp, synthetic construct
  misc_feature 1..420: note = Description of Artificial Sequence: Synthetic coding sequence
  source 1..420: mol_type = other DNA
atgaaggaggaccaggtcgtggctgaagaacctggcttccaagacgaagaggagtctttgtttcaagatatcgacttgctgcagaagcatggtataaatgtggcagacatcaagaaactgaagtcagtggggatttgcactatcaaaggcatccagatgaccacaaggagggctctgtgtaacgttaagggtcttagcgaggccaaagtcgacaaaattaaagaggctgctaataaactgatcgagcccggattcttaaccgcctttgagtattccgagaagagaaaaatggtctttcacatcacaaccgggtcacaagaatttgacaagttactcggcggaggtatagagtccatggccattaccgaagcttttggggaattcaggaccggaaaaacacagctgtcacataccctttag

SEQ ID NO: 28383 - DNA, 858 bp, synthetic construct
  misc_feature 1..858: note = Description of Artificial Sequence: Synthetic coding sequence
  source 1..858: mol_type = other DNA
atgaaggaggaccaggttgtagcagaggagcctggattccaagatgaggaagagtctctgttccaagatatcgatctgctccagaagcacggtattaacgtagctgacattaaaaaactgaaatccgtcgggatctgcactatcaaaggaatccagatgaccactcggagagctctctgcaatgtaaagggtctgagcgaggcaaaggtggataagatcaaagaagcggctaacaaacttatcgagcctggattcctcacagccttcgagtactctgaaaagagaaaaatggtgttccatatcactactggatcccaggaattcgataaactactgggaggcggtatagagtctatggcaattaccgaggcattcggggaatttaggacaggcaaaacacaactgtcccacacactctgcggcgagcaccaaatggagctcctggattacgtcgccgctaaattccatgaagaggccggtattttcaaacttctcatcatcgattctattatggctttgtttagagtggacttctcgggacgtggagagcttgcagagcgccaacagaagctggcacaaatgctctccagactgcagaaaatttcagaggaatacaatgtagcggtgtttgtgacaaaccagatgactgctgaccctggcgctacaatgacatttcaggctgaccccaagaagccaatcggcggtcacatcttagcacacgcttctaccacgaggatcagcttgcgtaaaggaaggggagaactgagaatagccaagatttatgattctcccgagatgccagagaatgaggccacgttcgccatcacagctggtggaatcggtgacgccaaagagtag

SEQ ID NO: 28384 - DNA, 612 bp, synthetic construct
  misc_feature 1..612: note = Description of Artificial Sequence: Synthetic coding sequence
  source 1..612: mol_type = other DNA
atgaaggaggatcaggttgttgcggaagagcccggattccaggatgaggaggagtctctgtttcaggacatcgatcttctgcagaagcatggcatcaatgtggccgacatcaaaaagctcaagagcgtcggcatctgtactattaaagggattcaaatgactacccgtcgtgccctgtgtaatgtgaaaggactttccgaggccaaggtggataaaatcaaggaggctgccaacaagctcatcgaaccaggctttctgaccgcctttgagtactcggagaagagaaaaatggttttccacatcaccaccggcagtcaggagttcgataagttactaggaggcggaattgagtctatggccataacagaggccttcggggagtttcgcacgggcaaaacgcaactgtcacacacactttgtggcgagcatcagatggagctgctggactatgtagcagccaagtttcacgaagaggccggaatattcaagcttttaatcatcgacagtatcatggccctctttagagtggatttctcggggaggggtgagctggccgagcgccaacagaagctggcccagatgctgtcacgcctccagaagataagcgaatag

SEQ ID NO: 28385 - DNA, 1599 bp, synthetic construct
  misc_feature 1..1599: note = Description of Artificial Sequence: Synthetic coding sequence
  source 1..1599: mol_type = other DNA
atgaacggggtgttgatccctcacacaccaatcgctgtggatttctggagcctgaggagagccggaaccgcgcgacttttttttttatcccatatgcattcagaccacactgtgggactaagcagcacctgggccaggcctctctattgcagtccgatcacggcgcacttgctgcataggcacctgcaagtgagcaaacagtggatccaagctctggaagttggcgagtcacatgtgcttcccctggatgagatcggccaggagaccatgaccgtaacactgttggacgcaaatcactgcccaggctcagtgatgttcctttttgaaggctacttcggtactatcctctatactggagactttcgatatactccaagcatgctgaaggaacctgcgctgacactgggaaaacagatccataccttgtatctcgacaacactaattgtaatcctgcattggtcctgcctagccggcaggaggccgcacaccagattgtgcagcttattagaaaacatccgcaacataacataaaaattggtctgtatagcctcggcaaagaatccttactcgagcagctcgctctcgagtttcagacatgggtggtactctcaccaagaaggctggagctggtgcagctattgggtctagcggacgtgttcaccgtggaggagaaagccggacgcatccacgccgtggaccacatggagatctgccattccaacatgctgcgctggaaccagacccatccaacaatcgccatcctgccaacatcgcgaaagatccattcttcccatccagacatccacgtgataccttattccgaccactcatcctacagcgagctgcgcgcattcgtagccgcattaaaaccttgtcaggtggtgcccatcgtgagcaggcgtccttgcgggggattccaagattcactctccccacggatttcagtgcccctcatcccagattcagtgcaacaatacatgtccagctccagtcgcaaaccttccctgctctggcttctggagcgaagactgaagagacccagaacacaaggggttgtgttcgagtcccctgaggaaagcgcagatcagtctcaggccgatagggacagtaagaaggctaaaaaggagaaattgtctccttggccagcggacctagaaaagcagcccagccaccatcccctccgaatcaaaaaacagctcttcccagacttgtactccaaggagtggaataaagcggtaccattctgtgagtcacaaaagcgggtcaccatgctaactgcgccactcggattttcagttcacctgcggagcacagacgaggagttcatcagtcaaaagacccgagaagagattggtctcggcagtccattagtgcccatgggcgacgacgatggtgggcctgaggctacgggcaatcagagtgcatggatgggacatggtagtcccctgtcacactccagcaagggtactccgctattggctacggaattccgaggcttggcactgaagtatctgctgacaccagtgaacttctttcaggccggatatagctctcgacggtttgaccagcaggtcgagaagtaccataaaccatgctag

SEQ ID NO: 28386 - DNA, 1734 bp, synthetic construct
  misc_feature 1..1734: note = Description of Artificial Sequence: Synthetic coding sequence
  source 1..1734: mol_type = other DNA
atgaaacatcaggagaggtttttattccaaggcaacaatggaactgttttgtatactggagatttcaggctggctcaaggggaggccgcacgaatggaactgctgcacagtgggggacgcgttaaggacatccaaagtgtgtacttggacactaccttttgcgacccacggttctatcagattcccagtagggaagagtgcttgtcgggtgtcctagaattggtgaggagctggatcactcgcagcccatatcatgtggtgtggctaaattgtaaagccgcatacgggtatgaatacctattcacaaacctttccgaggaactcggcgtccaggtgcacgtaaacaagcttgacatgttccgcaatatgcctgaaatccttcaccaccttaccaccgatagaaacacgcagatacacgcgtgccggcatcctaaggcagaagaatatttccagtggtcgaagctgccatgtggaattacatcacgaaatcgcattcctctgcacattatcagcatcaagccctctaccatgtggtttggggagcgaagccgcaaaacgaacgtgattgtgcggaccggggagtctagctaccgcgcatgttttagctttcactcctcctacagcgagatcaaggattttctgtcatacctgtgtcccgtgaacgcttatcccaacgtgatccctgtgggtactaccatggacaaggtggtggaaatcctgaaacctctgtgcagaagctctcagtctacagaacctaaatacaagcccctgggaaagcttaagagggccagaacagtgcaccgcgacagcgaagaggaggatgattatcttttcgatgacccgttgcccatcccactgcgtcataaggtgccgtaccccgagacattccatcccgaagtgttttccatgaccgctgtctccgaaaagcagcccgagaaacttagacagacacccggatgttgcagggccgagtgcatgcagagctctcggtttactaactttgttgattgtgaagagagcaactccgaatcagaggaagaagtgggcatccctgcctcgcttcagggggatctggggtccgtcctgcatctgcagaaagcagatggagatgtgccgcagtgggaggtattcttcaagcgcaatgacgagattacggatgagtcccttgagaatttcccatcttccacggtggccggtgggtcacagagccctaagctattctctgatagtgatggtgaatccacacacatttcctctcagaactcctcacagagcactcatattacagagcagggaagccaaggttgggattcccaaagcgacactgtgctgctgagcagccaagagaggaactcaggggatatcacgtccttagataaggccgactaccggccaactataaaggagaatatacccgcatcgctcatggaacagaatgtcatttgcccaaaggatacctactctgatctcaaatcacgggataaagacgtaacaattgtgccaagtacaggcgagccaactaccctgagttcagaaacacatatccctgaggaaaaatcacttcttaatttaagcactaatgctgacagccagtcgtcatcggattttgaagtgccatctacccctgaggcggaactgcctaagagggagcatttgcagtacctgtatgagaagctggcaactggcgaatcaattgcggtcaagaaaaggaagtgtagtctcctggacacctag

SEQ ID NO: 28387 - DNA, 255 bp, synthetic construct
  misc_feature 1..255: note = Description of Artificial Sequence: Synthetic coding sequence
  source 1..255: mol_type = other DNA
atgtttctattccaagggaacaacggcacagtgctgtacacgggagacttcaggctggcccagggggaggccgcaaggatggagctcctgcactctggcggaagagtgaaggatatccagtccgtgtacctggacaccaccttctgcgatcctaggttctatcaaatccctagcagagaggagtgtctgagtggtgtacttgaactcgttcggtcctggattaccaggagcccgtaccacgttgtgtggctgtag

SEQ ID NO: 28388 - DNA, 1038 bp, synthetic construct
  misc_feature 1..1038: note = Description of Artificial Sequence: Synthetic coding sequence
  source 1..1038: mol_type = other DNA
atggataaggtggtggagattctcaaacccttatgtaggagtagtcaatccaccgaaccgaaatataagcccctcggcaagttaaagcgtgcacggaccgtccaccgtgattccgaggaagaagatgattacctgttcgatgatccactgcctataccgctacgccataaggtcccatatcctgagacttttcaccctgaggtgttttccatgacggccgtgtcagaaaagcagccagagaagctccgccaaacaccaggatgttgcagagctgagtgtatgcagtcatcccggtttacaaattttgtagattgcgaagaatccaactctgagtccgaggaagaggttggcattcctgcatctctacagggcgatcttggaagtgtactccatctgcagaaggctgatggcgatgttcctcaatgggaggtgtttttcaagagaaacgacgaaattactgacgagtcattggaaaacttcccatcaagcaccgtggccggtggcagtcagtccccaaagctttttagcgactcagatggggagagtacacatataagcagccagaacagttctcagtctacgcatatcacagagcaagggtcccagggctgggattctcaaagtgatacagtcttgctgagctcacaggaaagaaatagcggcgacattacttcgttggataaagccgattaccgcccaacgatcaaggaaaacataccagcctccctaatggagcaaaatgttatttgcccaaaggacacatacagtgacctaaaatcaagagataaagacgtgaccatcgtgccttcaacaggtgagccgactacactgagtagtgaaacccatattcctgaggaaaaatcgttgttgaacctcagcacaaatgcggactctcagtcatcttctgacttcgaggtcccaagtactccagaggccgagttgcctaaacgcgagcacctgcagtacctgtacgagaaactggccacgggtgagagcatcgccgtgaagaaaagaaaatgtagtctgctggatacttag

SEQ ID NO: 28389 - DNA, 1734 bp, synthetic construct
  misc_feature 1..1734: note = Description of Artificial Sequence: Synthetic coding sequence
  source 1..1734: mol_type = other DNA
atgaagcaccaggaaagatttctctttcagggaaataatggcaccgtgctgtatactggagacttccgtctggcacagggcgaagcagcaagaatggaactcctgcactcaggcggacgcgtgaaagatatacaatcagtttatcttgataccactttctgcgaccccaggttttatcagataccgagcagagaggagtgcttgtcgggcgtccttgagctcgtgaggagttggattaccaggagcccataccacgttgtgtggctgaattgcaaagccgcttacggatacgagtatctctttaccaacttaagcgaggagttgggcgttcaggtccatgttaataagctcgatatgttccggaacatgcctgagatactgcaccacctcaccacggacaggaatacccagatccatgcttgtcggcaccctaaggcagaagagtattttcagtggagcaaactgccctgcggcatcactagccgcaatagaattccgctgcatatcatatctataaagccttcgactatgtggtttggggaacgctcacgcaagaccaacgtgatcgtccgaacaggcgagtcgagttatagagcttgtttcagtttccactcaagctattcggaaataaaagattttctttcatatctgtgccctgtgaatgcttacccaaatgtgatccctgtgggaactacaatggataaggtggttgagatccttaaacccctctgtcgcagcagtcagagcaccgagcctaaatacaaacctctgggcaagctcaaaagggcacggacggtgcacagggacagcgaggaggaggacgattacctattcgatgaccccttgcccataccactacgtcataaagttccataccccgaaacttttcatccggaagtcttcagcatgacggcggtctcagagaaacagcccgagaaattgaggcagacacccggatgctgtcgcgcagaatgtatgcaatctagcagattcaccaatttcgtggattgtgaggaaagcaactcagaatccgaagaggaggtggggatcccggcatcattacaaggagacttggggtccgtgttgcatctccaaaaggccgatggagacgtgccccagtgggaggtgttttttaagcgaaacgacgaaataaccgatgagtctctggagaatttcccgtcaagtacagttgcaggcggatctcagtcaccaaaattattttctgatagtgacggcgaatcaacacatatcagcagccaaaactccagccagagcactcacatcactgaacaagggtcccaaggatgggatagtcagagcgacaccgtgctgctgagctctcaggagcggaacagtggggacatcacaagtctcgataaagccgactaccggccaacaattaaagaaaatatccccgcttccctgatggagcagaacgtcatctgccccaaggatacctatagtgacctcaaatcccgagataaggacgtgactatcgtccctagcaccggcgaacctaccacattaagcagtgaaacccatattcccgaggagaaatctctgctgaacttgagcactaacgccgattcacagtcgagctcggactttgaagtcccctccacaccggaggcagaactacctaaacgagagcacctgcagtacctatatgagaagctcgctaccggcgagagcatcgctgtgaagaaacgaaaatgtagccttctagatacctag

SEQ ID NO: 28390 - DNA, 1734 bp, synthetic construct
  misc_feature 1..1734: note = Description of Artificial Sequence: Synthetic coding sequence
  source 1..1734: mol_type = other DNA
atgaagcatcaagagaggtttctttttcagggaaacaatggcacagtactctatacaggcgacttccgcctggcccagggtgaggcagcaagaatggagctgttgcattctgggggacgggtgaaggatattcagagtgtctacctcgatacaacattctgcgatcccagattctatcagatcccgtcccgggaagagtgtctttccggcgtgctggagctcgtgaggagttggatcacccggagtccctatcatgtcgtgtggctaaactgtaaggctgcctacggctacgagtacttattcactaacctgtccgaggagctgggcgtccaggtgcatgtcaataagctggatatgttcaggaatatgcctgagattctacaccaccttaccacagaccgcaacactcagatccacgcttgcagacaccccaaagccgaggagtattttcagtggtctaaattgccatgcggcattacaagtaggaacagaattccattacatattatctcgatcaaacccagtactatgtggttcggcgaaaggagtcgcaagacaaatgtgattgtgaggaccggagagtcttcctacagagcctgctttagcttccatagttcgtattccgagatcaaagactttctgtcgtacctgtgtcccgtgaatgcctacccaaacgtgattcctgtcgggacaacaatggataaagtcgtggaaatcttgaaaccattgtgccggtccagtcagtccactgagcctaaatataagccactgggcaagctaaagagagccaggactgtgcaccgcgattccgaggaagaagatgactacctttttgacgatcctctgcctatcccactgaggcacaaggtgccttatcctgagacctttcatcctgaagtcttttctatgaccgcagtatcagaaaagcagccggaaaaactgcggcagacccctggatgttgccgagcagagtgcatgcagagtagtagatttacaaactttgtcgattgtgaagaatccaactccgaaagtgaagaagaggtaggcatccctgcctcactccagggcgatcttgggtctgtactgcatcttcaaaaggcagatggggatgtgccccaatgggaggtgttttttaaacgcaacgacgaaatcactgacgagtcacttgaaaacttcccaagcagtaccgtcgccggtggtagtcaatctcctaagctttttagtgactcggacggtgaatccacccacatctcctcccagaattcatctcagtctacccacatcacagagcagggcagccagggttgggactcgcaaagcgacactgtgctgctcagttctcaagagcgaaattctggcgatattacatcattagataaagccgattatcggccaaccattaaggagaacattcccgcatctcttatggagcagaatgtcatctgccccaaggatacgtatagcgacctgaagtcccgagataaggatgtcacaatcgttcccagcacaggggagcccactacgctgtctagcgagacccacatacctgaagagaaatccctgctcaatctatccactaacgcagactcgcagagctcttcagattttgaggtcccatccacgcccgaggctgagttgcccaagcgcgagcacctgcagtatctatatgaaaaactcgctacaggcgagagcattgcagtgaaaaagcggaagtgctctctgctcgatacctag

SEQ ID NO: 28391 - DNA, 1719 bp, synthetic construct
  misc_feature 1..1719: note = Description of Artificial Sequence: Synthetic coding sequence
  source 1..1719: mol_type = other DNA
atgtttctctttcagggaaacaacggcacggtcctgtataccggtgactttaggctggcccaaggagaggccgctcgcatggaattactgcattcaggaggtcgcgtcaaagacatccagtctgtttacctagatacaacgttctgtgatccaagattttaccagatcccctctcgagaggagtgtcttagcggcgtgctagagctggttcgaagttggatcacccgatctccataccatgttgtgtggctcaattgtaaggccgcatacgggtatgagtacttatttacaaatctgtcagaggagctgggtgtgcaggtccacgtgaacaagctcgacatgttccgaaacatgcctgagatcttgcatcatctcaccaccgatagaaatacccaaatccacgcttgtcgacaccccaaggccgaagagtactttcaatggtccaagctgccttgcggcataacctctcgaaataggatacctctccacatcatcagcattaaaccctcaaccatgtggtttggggagcgtagcagaaagaccaatgtgatagttcggactggtgaaagttcctatcgggcatgtttcagctttcacagcagttacagtgagataaaggattttctctcatatttgtgtccggtcaatgcataccccaatgtgattccagttgggacaacaatggataaggtggtagagattctgaaacccctgtgtagaagcagccaaagcactgaacccaagtataaacctcttggaaagctgaagcgcgctcgcaccgtgcacagagattccgaagaagaagacgattatcttttcgacgatccattaccaattccgttgaggcacaaggtgccgtaccctgaaacttttcatcccgaagtcttcagcatgaccgctgtctccgagaagcaacccgagaaactcaggcaaactcccggatgttgccgagccgaatgcatgcagtcaagcagatttactaacttcgtggactgcgaggagagtaactcggagagcgaggaggaagtcggcatcccagcctccctgcagggcgacctgggaagcgtgctgcacttgcaaaaagctgacggcgacgtaccccagtgggaggtgttcttcaagagaaacgatgagattacggacgagtcccttgaaaacttcccgtcctctaccgtggccggaggctcccagtccccgaagctcttttctgactctgatggcgagtccactcacatcagctcgcagaactcctcccagagtacccatattaccgagcagggctcacagggctgggactcccaaagtgacactgtcttgcttagctcgcaagagcgaaactctggcgatattacatctctcgacaaagccgactaccgccctaccattaaggagaacattcctgcaagtttaatggaacagaatgtgatttgcccgaaggatacttattcagatttgaaaagtcgtgacaaggatgtgactattgtccctagcacaggcgaaccgacgacactatcaagcgaaactcatatccctgaagaaaagtcactcctgaaccttagcactaatgctgactcccagagtagtagtgattttgaggtcccaagcactcccgaggcggaactccccaagcgggaacatttgcagtacctctacgaaaaactggctaccggcgagtccatcgccgtcaaaaagagaaaatgctcactcctggatacttag

SEQ ID NO: 28392 - DNA, 1719 bp, synthetic construct
  misc_feature 1..1719: note = Description of Artificial Sequence: Synthetic coding sequence
  source 1..1719: mol_type = other DNA
atgttcttatttcagggcaacaatggcactgtgctgtataccggggatttcaggctcgcccagggagaagctgcccgtatggaactattacatagcggcggaagagtgaaggatatccagagtgtgtacctggacaccactttttgcgacccccgtttctaccaaatcccatctcgggaggagtgcctctctggtgtcttggaactcgtgcgatcctggataactcgaagtccctatcatgtggtgtggcttaattgtaaggcagcttacggatatgaatacttgttcaccaatctcagcgaagagctgggggttcaagtgcatgttaacaagctcgacatgtttcggaacatgcccgaaatcctccaccacctcaccactgacagaaacacgcagattcacgcctgccgacatcctaaagctgaagagtatttccagtggtccaaactgccctgcggtataaccagtagaaaccggatccctcttcacattatatccattaaaccgagcacaatgtggtttggcgagcgcagtcggaagactaatgtgatagtgaggaccggggaaagctcataccgggcatgcttcagttttcattcttcctattctgagatcaaggacttcttaagctacctgtgtcctgtcaacgcgtacccaaatgtgattcccgtgggcaccactatggataaggtggttgagattctgaaacccctgtgcaggtcaagccagagcaccgagccaaaatacaagccgctaggcaagctaaaacgcgcacggactgtccaccgggactccgaagaagaagacgactacctcttcgatgatcctctgcctattccactccggcataaggtgccgtacccagagacgtttcacccagaggtctttagcatgacagccgtcagcgagaaacagccagagaagctcagacagacgcctggttgttgtagagccgagtgcatgcaaagctccaggtttaccaacttcgtggattgtgaagaaagtaattcagagagcgaagaggaggtggggatcccggctagtctccagggggatctgggtagtgttctgcacctacagaaagctgatggcgatgtgccacagtgggaagtgttcttcaagcgaaacgacgagattactgacgaaagcctcgaaaattttccctctagcaccgttgctggcggaagtcagtcaccgaaactgttctccgatagcgatggggagagcacccatatttccagccagaactcctcccaatctacacacataacagaacaaggatcacagggatgggactcccagtctgacactgtgctcttgtcctcacaggagaggaattccggtgacatcaccagtttagacaaggctgactatagaccgacaattaaggagaacataccagctagcctcatggagcagaacgttatctgtcccaaagatacgtactctgatctgaagtcaagggataaagacgtgactatcgtgcctagcacaggggaaccgacaacgttgtcctcagaaacccatatccccgaggagaagtccctgctgaatctatctaccaatgccgactcccaatccagtagtgacttcgaggttcccagcactccagaagccgaactcccaaaaagggaacacctgcaatatctctatgagaaactggccactggtgagtctattgccgtaaagaaaagaaaatgtagcctcttggatacctag

SEQ ID NO: 28393 - DNA, 1719 bp, synthetic construct
  misc_feature 1..1719: note = Description of Artificial Sequence: Synthetic coding sequence
  source 1..1719: mol_type = other DNA
atgttcctgttccagggtaacaatgggactgtcctatacacaggggacttcagattggcccagggagaggctgccagaatggaactgttgcactcaggaggcagggtcaaggatattcagagcgtgtacctagatacaaccttctgtgaccccaggttttaccagatcccaagcagagaagaatgcttatcaggggtcctcgagctcgtcaggtcttggatcacacggtcaccataccatgtggtttggctgaactgtaaagctgcttatggctacgaatacttattcaccaatctctccgaagagctgggcgtgcaggtccacgttaacaagcttgatatgttccgcaacatgcctgagatcctgcaccatttgacaaccgatcgcaatactcagatacacgcttgtaggcaccccaaagctgaggagtatttccaatggtcaaaactgccgtgtggaattacctcaagaaacaggattcccctccatatcattagtatcaaaccatccaccatgtggtttggggagcgcagtagaaagactaacgtcattgttcgaacgggtgaatccagctatcgggcttgcttctccttccattcttcttacagcgagatcaaagattttttgtcctatctgtgtcccgttaatgcgtaccctaacgttattcccgtcggcactaccatggataaagtcgtcgaaatccttaagcctctgtgtagatcaagccagagcacagagccgaaatacaagccgctcggtaaactgaagcgcgctcggactgtccatagggactccgaagaagaagacgattatctgttcgatgatcccttgcctattccactgagacacaaagtcccttaccccgagacctttcatcctgaggtttttagtatgacggccgtgagcgaaaagcagccagaaaagctcaggcagacaccaggctgttgccgtgcagagtgtatgcagtcttcacgctttaccaacttcgtggactgcgaagagtcaaattctgagtccgaagaggaggtaggtatccccgcatcactgcagggcgacttgggaagtgttctgcaccttcagaaagcggatggtgacgtcccacagtgggaagtcttcttcaagagaaatgacgagatcacagatgaatcactcgaaaactttccaagctccacggtggccggaggctctcaatctccaaagctgtttagtgacagcgacggggagtctacccatatctctagtcagaactcaagccagtccacacatattacagagcaaggctcacagggctgggactcacagagtgatacagtactgctctcttcccaggaaagaaactccggcgatatcacatcattagacaaggcagactatagacctaccatcaaggagaacattcccgcatcattaatggagcaaaacgtcatctgtccaaaggacacgtattctgatttaaagtcccgcgataaggatgtgaccattgttcctagtacgggagagcctacgaccctctcctcagagactcatattccagaggagaagagcctgctcaacttgtctacaaatgctgatagccagtcaagctccgactttgaggtcccttccactcccgaggcagagctgcccaaaagagaacacttacagtacctttacgagaaattagctaccggagaaagcatcgccgtaaaaaaaagaaagtgtagcttgttagatacctag

SEQ ID NO: 28394 - DNA, 2079 bp, synthetic construct
  misc_feature 1..2079: note = Description of Artificial Sequence: Synthetic coding sequence
  source 1..2079: mol_type = other DNA
atgtcttcgttcgaaggccagatggccgagtatccgactatcagcattgacaggttcgaccgtgaaaacctgcgagccagagcttattttctttcccactgtcacaaggatcatatgaagggcttaagagcgcctaccttgaagagacgactcgaatgctcactaaaagtttacctatactgctctcctgtgactaaggagttgttgctaaccagcccaaagtatcgtttttggaagaagcgcattataagtatagaaatcgaaacccccacacagatcagcctggtcgacgaggcctccggggaaaaagaggagattgtagtgacacttttaccagccggacattgccctggctcagtcatgttcctgtttcagggcaacaacgggactgtgttgtatacaggagatttcaggctcgcccagggcgaggcagcgagaatggagctactgcacagtggcggtcgtgtgaaagatatccagtcagtgtacctggataccacattttgcgacccgcgattctatcaaatccccagccgcgaagagtgtctgagtggggtcctggagttggtgaggtcttggatcacaaggtctccataccatgtcgtttggctgaactgcaaagccgcttacggctacgaatacttatttactaatctaagcgaagaactgggggtgcaagtgcacgtgaacaagctggatatgtttaggaacatgcctgagatcctccaccatctgactactgaccgcaacacccaaattcacgcatgtagacacccaaaagcggaggagtattttcagtggtccaaactgccttgcggcattaccagccggaaccgcatcccgctgcatatcatctctataaaacccagcactatgtggtttggggaacggagcagaaagaccaatgttatcgttcgaaccggtgagtcatcttatcgcgcatgcttttctttccactcatcttattctgagataaaagactttttgtcgtacctgtgtccggtgaacgcgtacccaaacgttatccctgtggggacaactatggacaaagtggtcgaaattttgaagccgttgtgtaggtcatcacaatccacggaacccaaatataagccactcggtaaactgaagcgtgcgaggaccgtgcacagggactccgaagaggaagatgactacttattcgacgaccccttgcccatacccctgcggcacaaggtgccctatcccgagacctttcatcctgaggtattctcaatgactgccgtctcggaaaaacagccagagaagctgcgtcagacccccggttgctgccgtgccgagtgcatgcagtcctccagattcaccaacttcgttgactgtgaagaatccaactccgaatctgaagaggaagtgggcatccccgcatccctgcagggagatctcggaagtgtgctccacttgcagaaagctgatggagatgtgccccaatgggaagtattttttaaaaggaatgacgaaataactgacgagtccctggaaaactttccttcttccacagtggctggcggttctcaaagcccgaaacttttcagcgacagcgatggcgagagcacccatatcagtagccaaaattcttcccagtccactcacattacggagcagggaagccagggatgggattctcaatctgacacagtgctgttgtcaagtcaggagcgaaattccggagacattacatcgctggataaagccgattaccgccctacaatcaaggaaaatattcctgcatccctgatggaacagaacgtgatctgtccgaaagacacatattccgacctcaagtcccgcgacaaagacgtgaccattgtgcccagcactggggaacctacgaccctcagttcagagacacacataccagaggagaagtctcttcttaatttgagtactaatgctgactctcagtctagcagtgactttgaagttcctagtacccctgaagcggaacttcccaaacgggaacatctccagtacctgtacgaaaaactggctaccggggagtctatcgccgtgaagaaaagaaaatgctcgctgctggatacttag

SEQ ID NO: 28395 - DNA, 1305 bp, synthetic construct
  misc_feature 1..1305: note = Description of Artificial Sequence: Synthetic coding sequence
  source 1..1305: mol_type = other DNA
atgtcctcctttgaaggccagatggctgagtatcctaccatcagtatcgataggtttgatcgcgagaacctacgcgcaagggcctactttttaagccattgtcataaggaccacatgaaagggttgcgggctcctacgttaaagcgaagattggagtgttcactgaaggtctacctgtattgctctccagtgaccaaggaactcctgttaacctcaccaaagtacaggttttggaaaaaaagaataatttcaatcgagattgagacgcctacccagatctctctggttgacgaggcctctggggagaaagaggagatcgttgttactttgctgcctgccggacactgtcccggatctgtgatgttcttgttccagggcaacaatgggacagttctgtatacaggcgattttcgactggcccagggagaagcagccaggatggagttgcttcacagtggaggtcgcgtgaaggatatccaatcagtttatctcgataccaccttctgtgaccccaggttctaccagatccccagtagagaagagtgcctgtcaggcgtgctcgaactggtcagaagttggatcacaagatctccataccacgtagtgtggctaaattgcaaggccgcatacggatacgaatacctgttcaccaatctgagcgaagagctcggtgtgcaagttcatgtaaacaagctggacatgttcagaaacatgccagagatactccatcacctgaccaccgataggaatacacagatccacgcttgcaggcatccaaaggccgaggagtactttcagtggtccaaactgccctgtggcatcacttcaagaaacagaattcctctccacatcatctcaattaaaccatctaccatgtggtttggagaaaggtcaaggaagaccaacgtaatcgtgcggactggcgagtcctcttacagagcttgcttttcatttcatagtagttatagtgagatcaaggactttctgtcctacctctgccctgtaaacgcttacccaaatgtaataccagttggcacaacaatggacaaagtggtcgagattttaaagcctctgtgtcggagctcacagtcaaccgagccaaagtataagcctttgggaaaacttaaaagggcccgtacggtgcaccgcgattccggatcgcattctgtgacacaggctcgcatgagatggtgtcatcacgacagtctgtaccccttaacccccggtattaagagatctagctgtctgtccctcctgacctcctggatcaccggagcataccgacatgcacagctgatgatttag

SEQ ID NO: 28396 - DNA, 1719 bp, synthetic construct
  misc_feature 1..1719: note = Description of Artificial Sequence: Synthetic coding sequence
  source 1..1719: mol_type = other DNA
atgtttctgttccaggggaataacgggaccgtgttgtataccggagatttccgattggctcaaggcgaggcggctcgcatggagctcctgcactccgggggtcgggtgaaagacattcaaagcgtgtacctggacactaccttttgtgacccacgattctaccagattccctccagggaagagtgtctgtccggggtgctcgagctcgtgcgctcctggatcaccaggagtccataccatgtcgtctggctgaactgcaaggccgcttacgggtacgaatatctgttcaccaatttaagtgaggaactcggcgttcaggtacacgtcaacaaactggacatgtttagaaatatgcccgaaattctccaccatttgactaccgacagaaatactcagatccatgcctgtcgtcaccccaaggccgaagaatactttcagtggagtaagctgccatgtggaattacatccaggaatcgtataccattacatatcatttcaattaagcctagcactatgtggttcggggaacgcagtcgaaagaccaatgtgatagtgcgcactggagagtcatcatatagggcttgcttctccttccactcatcttacagtgagataaaggactttttatcctacctttgcccagtgaacgcctatccaaacgtgatacctgtcggcacaacaatggacaaagtggtcgagatactgaagccactctgccgttcctcacagagcactgagcctaagtataagcccctaggcaagctaaagagggcaagaaccgtccatagagactctgaggaagaagacgattatcttttcgacgaccccttacccattccccttaggcacaaagtgccttatccagagactttccaccctgaggtgttttcgatgaccgctgtgtctgaaaaacagccagagaagttgcggcagaccccaggctgttgccgggcagaatgcatgcaatcctctcgtttcacgaattttgtagactgcgaggagtccaactcagaaagcgaggaagaagttggaattcctgcttccctccagggagatcttggatccgtcctgcacctccaaaaagcagacggcgacgtgcctcagtgggaggtgtttttcaagcgcaatgatgagatcaccgacgagagcctggaaaatttccccagttcaacagtggctggaggctcgcagtctcccaagctgttctccgactctgatggcgagtccacacacatcagcagtcagaactcctcccagagcactcacatcacagagcaaggctctcagggttgggactcccagagcgacacagttctgcttagttctcaggaaagaaactcaggggatatcacaagccttgataaggccgactatagaccaacgattaaggagaacatcccagcaagtctcatggagcaaaatgtaatctgtcctaaagacacctacagcgacctgaagtctagggacaaagacgtgactatcgtccccagtaccggcgaaccaacaactctgagtagcgagacccacatacccgaagaaaagtctctgctgaatctctcaacgaatgccgactcgcaatccagctcagattttgaagtacccagcaccccagaagccgaactgcccaagagagaacatttacagtatctgtacgagaaactggcgactggagagagtattgccgtgaagaagcggaagtgctccttgcttgacacctag

SEQ ID NO: 28397 - DNA, 354 bp, synthetic construct
  misc_feature 1..354: note = Description of Artificial Sequence: Synthetic coding sequence
  source 1..354: mol_type = other DNA
atggagctactacattctggaggcagggtgaaagacattcagagcgtgtatctggatacgacattctgcgaccccagattttatcagatcccttcccgggaggagtgcctgagtggagttcttgaactggtgcggtcatggattacacggtcaccatatcacgtggtctggctgaactgcaaagccgcttacggctatgagtatttgtttacaaacctatctgaagagttaggggtgcaggtccacgtcaataagctggacatgttcagaaacatgcctgagattctacaccaccttaccaccgatcgcaacacgcagattcacgcctgcagacacccgaaggcggaagagtag

SEQ ID NO: 28398 - DNA, 1719 bp, synthetic construct
  misc_feature 1..1719: note = Description of Artificial Sequence: Synthetic coding sequence
  source 1..1719: mol_type = other DNA
atgtttctcttccaaggcaataacggcaccgtgctgtacacaggtgattttcgcctggcccaaggagaggctgctagaatggagctcctgcatagcggaggtcgcgtcaaggatatacagtccgtctacttagacaccactttttgcgatccaagattctatcagatccctagtagggaggagtgcctctcgggagtccttgagttagtccgctcctggattacaagatcgccttaccacgttgtgtggttaaattgcaaggcagcttacggctatgaatatctgtttacaaatctgagcgaggaactcggggtccaggtgcatgtaaataagttggatatgtttcggaacatgccggagattctgcaccacctgaccacagaccgcaatactcagatccacgcatgtcggcaccctaaggccgaagagtacttccagtggtcaaaactgccctgcggcatcacttcccggaatcggatccctctgcatattatatccataaagcccagcaccatgtggttcggagagcgctctcgtaagactaatgtgatcgtccgaacaggagagtcctcctaccgagcttgtttttcctttcattcctcttattctgaaataaaagatttcctgtcctatttgtgtcccgttaatgcctatccaaatgtgattccagtcgggaccacaatggataaagtggtagaaattctgaagcctttatgcaggtcttcgcaaagcacagaacccaaatataagccactgggtaagctgaaacgggcacgcacagttcatcgggacagcgaggaggaggatgactacctgttcgacgatcctctgcccatcccccttaggcacaaagtgccatacccagagacgttccacccggaggtcttctcaatgacggcagtgagcgagaaacagccggagaaactgcggcagacgcctgggtgttgtcgggcagagtgcatgcaaagttcccgcttcacaaattttgtggattgtgaggagagcaactccgagagcgaagaggaagtggggataccagcgagtctgcaaggggacctgggcagtgtgttacatctgcaaaaggcggatggcgatgtgccccagtgggaggtgttcttcaagcgcaatgatgagatcactgatgagagtctggagaactttccaagctcaaccgttgctggaggtagccagtcacctaagctcttctccgattctgatggggagagcacacacatctcttcgcagaattccagccagtcgactcatatcactgaacaaggttctcagggctgggatagtcagtccgataccgttctcttaagtagccaagaaagaaattcaggagacattacatccctagataaggctgactatcgaccgacaatcaaagagaatatccccgcatccttgatggaacagaacgtgatctgccctaaggacacttacagcgaccttaagtctcgcgacaaggatgtgactattgttccttctactggagagccaacgactctttcgtccgaaacacacatccctgaggagaaaagcctgcttaacctatctaccaacgccgatagccagtcctccagcgattttgaagtgccaagcacccccgaggcagaactgcctaagcgggaacatctgcagtacctttacgaaaaactggcgactggagaatcaattgcagtaaagaaaaggaagtgctccctgttagacacttag

SEQ ID NO: 28399 - DNA, 174 bp, synthetic construct
  misc_feature 1..174: note = Description of Artificial Sequence: Synthetic coding sequence
  source 1..174: mol_type = other DNA
atgaaacaccaggagcgattcctgttccagggaaacaacggaaccgtgttgtacacgggagacttccggttggcccagggcgaagctgcccgaatggagttgcttcacagtggtggccgagtcaaggacattcagagtgtgtatcttgacacaaccttttgtgatccgaggtag

SEQ ID NO: 28400 - DNA, 807 bp, synthetic construct
  misc_feature 1..807: note = Description of Artificial Sequence: Synthetic coding sequence
  source 1..807: mol_type = other DNA
atggaagtgactggtgatgcaggggtgcccgaatcaggcgaaattaggacactgaaaccatgcttactgaggcgaaactattccagagagcagcatggggttgccgctagttgcctggaggatttgcggtcaaaagcctgcgacatcctcgccattgacaagtccctgacaccggtgacgctggtactggccgaagatggcactattgtggatgatgacgattacttcctgtgcttgcccagcaataccaaattcgtggccctggctagcaacgaaaagtgggcctataacaacagtgatggtggcactgcctggatttcccaggaaagttttgacgtcgacgagaccgattcaggagcagggttaaagtggaaaaacgtcgcgaggcagttaaaagaggatttaagttcgatcattctgctcagcgaggaggatcttcagatgctggtggatgcaccctgctcagaccttgcccaggagcttaggcaaagttgtgccacagtccagaggctccaacatacgctccaacaggtcctcgaccaacgcgaagaagtgaggcagtccaagcaactgctgcaactgtatctccaggctcttgaaaaggagggctctctcctgagcaagcaggaggagtcaaaggccgcattcggggaggaggtagacgcagtcgacactgggataagtcgggaaacctcctccgacgtggcactagcgtctcacattctgacagccctgcgcgaaaagcaagcacctgagctgtccctgagctcacaagacctggaagtaggaggaaaccagggccattag

SEQ ID NO: 28401 - DNA, 996 bp, synthetic construct
  misc_feature 1..996: note = Description of Artificial Sequence: Synthetic coding sequence
  source 1..996: mol_type = other DNA
atggaggtgactggggatgccggtgtgccagagagtggggaaatccgcacgttgaagccttgtctgctacggcgaaactacagcagagagcaacacggtgtggcagcatcatgtctagaggacctgagaagcaaagcttgtgacatcctggctatcgataaaagtctcactcccgtaacactggtactggccgaggatggaactatagtggacgacgatgactatttcctctgcctgcccagcaacaccaagttcgtggccctcgccagcaatgaaaagtgggcctataacaattctgacgggggtactgcgtggatctcccaggagtcctttgacgttgatgagacagactcgggcgctggccttaaatggaaaaacgtggctcgccaactgaaggaagatctgagtagcatcatactcctgtccgaggaggatttgcagatgctcgtggatgccccttgcagcgatctggcccaagaactcagacagtcctgcgcgactgtccagaggctccaacacacccttcaacaggttctggatcagcgagaggaggttcggcaatccaaacagttgctgcaactctacctgcaggccctggagaaagagggcagcctgctttcaaaacaggaagagtctaaggctgccttcggcgaagaggttgatgccgtagacaccggcatatcacgggagacatccagtgacgtggctcttgcttcccacatactgacggctctacgagagaaacaggcccctgaactgtctctctcgtctcaagacctggagttggtgacaaaagaggaccccaaggctctggctgtagctcttaactgggatattaaaaagaccgaaacagtgcaggaggcctgtgagagggagctggccctgaggctgcagcagacgcaaagcctgcatagtctgcgaagcatatctgcgtctaaggcctctcctcccggtgatcttcagaaccctaagagggctcgccaagaccccacatag

SEQ ID NO: 28402 - DNA, 510 bp, synthetic construct
  misc_feature 1..510: note = Description of Artificial Sequence: Synthetic coding sequence
  source 1..510: mol_type = other DNA
atggcagctgaatctctgcccttctccttcgggacactgagttcctgggaattagaggcctggtacgaagacttgcaggaagtgctgtccagcgacgagaacggcggaacctatgtgagtcctcccggtaacgaggaggaggagagtaaaatattcaccactcttgaccccgcttctctggcttggctgacagaggaggaacccgagccagccgaggtgacatcaacctcccagagcccacacagtccagactcgagtcagtcctcactggctcaggaggaagaggaggaggaccagggcagaacccgcaagaggaagcaatctggccatagccccgcacgcgcagggaagcagcgtatgaaagagaaggagcaggaaaacgagcgaaaggtcgcacagctggctgaggagaatgagcgcctaaagcaggagattgaaaggctgaccagagaggtggaggcaactcgcagggccctcatcgaccgcatggtgaacctacatcaggcgtag

SEQ ID NO: 28403 - DNA, 510 bp, synthetic construct
  misc_feature 1..510: note = Description of Artificial Sequence: Synthetic coding sequence
  source 1..510: mol_type = other DNA
atggctgccgaatcactgcccttctcattcggaactctgagtagctgggaactggaagcctggtacgaggacttgcaggaggtcctgtcttcagacgaaaatggcggtacctatgtcagtccccctggaaacgaggaggaagagtccaagatcttcacaacattggacccagcaagtctcgcttggctgacagaggaggagcccgagcccgctgaggttacatccacttcgcagtctccccactcccctgacagcagccaatctagcttagctcaggaagaggaggaagaagatcaggggcgtacaaggaaacgcaagcagagcggccattctcctgccagggcaggaaagcaacgaatgaaggaaaaagaacaagaaaacgaaaggaaggtggcgcagcttgcagaggaaaacgagcgattaaagcaagagatcgagcgactgaccagagaagtggaggctacaaggcgggcactgattgatcgaatggtgaacttgcaccaggcctag

SEQ ID NO: 28404 - DNA, 438 bp, synthetic construct
  misc_feature 1..438: note = Description of Artificial Sequence: Synthetic coding sequence
  source 1..438: mol_type = other DNA
atggaactcgtgcctgctactccacactacccggcagatgtgctgtttcagacagacccaaccgccgagatggcggctgaatcattaccttttagctttggcacactgagtagttgggagttggaagcatggtatgaggacctgcaagaggtactcagctctgacgaaaacgggggtacttacgtgagcccacctggcaatgaagaggaagagtccaaaatctttacaactctggaccccgcatcgctggcttggttgactgaggaagaacctgaacccgcagaagtgaccagtactagccaaagcccacactctcccgactcctcgcagtctagtctggcacaggaagaggaagaggaggaccagggtagaaccagaaaaaggaagcagtcaggacacagccctgcaagggccggaaagcagagaatgaaagaatag

SEQ ID NO: 28405 - DNA, 579 bp, synthetic construct
  misc_feature 1..579: note = Description of Artificial Sequence: Synthetic coding sequence
  source 1..579: mol_type = other DNA
atggaattggtgccagccacgcctcactatcctgccgacgtgttatttcaaaccgaccctactgctgaaatggctgctgaaagtttacccttttcgttcggcaccctctcttcatgggaacttgaagcctggtacgaggacctgcaagaagttctctcttctgatgagaatggtggaacttacgtgtctcctcccggtaatgaggaagaggagtccaagatcttcactacccttgaccccgcttctttggcctggctgaccgaggaggaaccagagcccgctgaagtgacatctacctcacagagcccccattccccagactcctctcagtcatctctggcccaggaagaagaggaagaggatcagggcaggacccgcaagaggaaacagtctggacactccccagctcgcgcaggtaaacagaggatgaaggagaaggaacaagagaacgagcggaaggtcgcccagctggctgaagagaacgaacgcttaaaacaggaaatagagcgcctgactcgggaagttgaggctacccggcgtgctctgattgaccgtatggttaatctgcaccaagcctag

SEQ ID NO: 28406 - DNA, 579 bp, synthetic construct
  misc_feature 1..579: note = Description of Artificial Sequence: Synthetic coding sequence
  source 1..579: mol_type = other DNA
atggagctagtgcctgcaaccccacactatcccgctgatgtccttttccagaccgatcctacagccgagatggcagcagaatcccttccatttagtttcggcacactttcatcctgggaattggaggcttggtacgaagatttacaggaggtcctgtcttctgatgagaatggcggaacttacgtctcacctccaggtaatgaggaagaggagtctaagatttttacaactctggaccctgcaagcctcgcatggctgaccgaggaagaaccagagccagcagaggtcacatcaacaagccagtctccccacagcccagactcctctcagtcctcgctcgcccaagaagaagaggaggaggatcagggacgcaccagaaaaagaaagcagtcgggacactctccagctcgcgctggcaagcagaggatgaaggagaaagagcaagaaaacgagcgaaaggtggcccagctagctgaagaaaatgaacgcctaaagcaggaaattgaacgcctgacaagggaagtggaagctacgcggcgtgccttgattgaccggatggtcaacctccaccaggcttag

SEQ ID NO: 28407 - DNA, 864 bp, synthetic construct
  misc_feature 1..864: note = Description of Artificial Sequence: Synthetic coding sequence
  source 1..864: mol_type = other DNA
atggcctccctggaggtgagcagatctccaaggcgcagccgccgtgagctcgaagtgaggtctccacgacagaacaaatatagcgtgctgctaccgacatataacgagcgggaaaatctgcccctaatagtttggctgctcgtgaaatccttctctgaatccggcattaattatgaaattattataatagacgacggatctccagacgggacaagagatgtcgctgagcagctagagaaaatttacggctctgataggattttgttaaggccaagagagaagaagctgggtcttggaacagcctacattcatggcatgaagcacgctacaggcaattacattatcattatggacgccgaccttagtcatcacccaaagttcatcccggaattcatccgtaaacagaaagaaggcaacttcgatatcgtgtctggcaccagatataagggcaatggtggcgtctacggctgggaccttaaaagaaagatcatcagtgacggcgtcctcccttgttgccctggctggtctctcctaggatccagtgatcccgctatcctggccagttgggactactcccggggtgccaatttccttacccagatcctgctgcgtcctggagcttctgatctcacaggtagctttagattgtaccgaaaggaggtactggagaaacttattgaaaaatgtgtctcaaagggctacgttttccagatggagatgattgttagggcaagacagctgaactacacaatcggtgaggtgccaatctcttttgtggacagagtgtatggagaatcaaagcttgggggtaacgaaatcgtctcctttcttaaaggactgttgactttatttgcaacaacatag

SEQ ID NO: 28408 - DNA, 768 bp, synthetic construct
  misc_feature 1..768: note = Description of Artificial Sequence: Synthetic coding sequence
  source 1..768: mol_type = other DNA
atggcctccttagaggtgtccagatcgccacgacggtcccgccgtgagctggaagtacgctcccccagacaaaataaatatagtgtcttactgccgacctataacgagcgggaaaacttgcctcttatcgtttggctgctggtgaagagtttctctgaatctggcattaattacgagattataataatcgatgacgggagtcctgacgggacccgtgatgtggccgagcagctcgagaagatttacggatctgataggatactcctgcgccctagagagaaaaagttggggttgggcactgcctacatacacggtatgaagcatgcgaccgggaactacattatcattatggatgcggacctctcacaccaccccaagttcattccagagttcatctccgacggcgtccttccttgttgtccaggctggtctctgttgggcagttccgaccctgctattctagcctcctgggattactcaaggggcgcaaactttctgacacagatacttctacgtcccggagcgtccgacctcaccggaagtttccggttataccggaaggaggttctggagaagctgattgaaaaatgtgtttccaagggctacgtttttcagatggagatgattgtgcgggcaagacagttgaattacactataggcgaagtgcctatttcattcgtggaccgcgtttacggggagagtaagctgggcggtaacgaaattgtctcatttctgaagggcctgctgacactcttcgcaaccacttag

SEQ ID NO: 28409 - DNA, 888 bp, synthetic construct
  misc_feature 1..888: note = Description of Artificial Sequence: Synthetic coding sequence
  source 1..888: mol_type = other DNA
taggcaagtctggaagtctccaggtctcctcgaaggtcacgcagagagttagaggtgcgatccccacgacagaacaaatattcagtgctgctgcctacctacaacgagagagaaaacttgccacttatagtttggctgttggtgaaatcctttagcgagtcaggcattaactatgagatcatcatcatcgatgacgggtctcctgatgggactcgggacgttgctgagcaactggagaagatctacggtagcgataggatcctcctgaggccaagggaaaagaaactggggcttggcactgcttatatccatggtatgaagcacgctacgggcaattatattattataatggacgccgatttgagccaccaccctaagttcattcctgaatttatcaggaaacagaaggaagggaatttcgacatcgtgtccggaacccgctataaggggaacggcggagtctacgggtgggatctgaaaagaaagatcatttccgacggtgtcttgccttgctgtccgggatggtcattgctggggtcaagtgaccccgcaattctggctagctgggattataggtgtgagcctcctaggctggctagccggggtgcaaacttcttgacccaaatcctgttgaggcccggagcaagtgatctcacagggtccttcaggttatacaggaaagaggtcctcgaaaagctcatcgagaagtgcgtttctaaagggtacgtctttcagatggagatgatcgtgcgggctagacaactgaattatacaatcggagaagtacccatttcgtttgtggaccgcgtgtatggggaatcgaagctgggtggaaacgagatcgtgtcattccttaagggtcttctgacactgtttgccacaacttag

SEQ ID NO: 28410 - DNA, 783 bp, synthetic construct
  misc_feature 1..783: note = Description of Artificial Sequence: Synthetic coding sequence
  source 1..783: mol_type = other DNA
atggcctcactggaggtctcccggtcaccaagacggtcccggagagaactcgaagttcggagtcctaggcagaacaagtattccgtgcttttgcccacatacaacgaacgagaaaacttgcccctgattgtatggttgcttgtgaagagcttcagtgagtcagggataaattacgaaataatcattattgatgacgggtcccctgatgggacccgcgacgtcgccgagcaactggagaaaatttatggatcagatagaatcctgttacgcccaagagagaaaaagttgggcctggggaccgcctacatacatgggatgaaacatgccacaggaaattacattatcataatggatgccgacctttctcaccatcctaaatttattcccgaatttatccgaaagcaaaaagaaggaaacttcgacattgtatctggaacgcgctataagggcaacggtggtgtttacggatgggatctgaaaagaaagatcataagccgcggagccaacttcctgacccaaattctgctgagacctggagcttctgacttgaccggcagcttccgtttataccggaaggaagtgctggagaagctgatcgaaaaatgtgtttctaagggatacgtgtttcagatggagatgattgtgcgcgcacggcagctgaattacaccatcggggaagtgccaatctcttttgtagaccgggtatacggggagtcaaaattgggaggaaacgagatcgtcagctttctgaaaggattgctcacgctgttcgccacaacttag

SEQ ID NO: 28411 - DNA, 666 bp, synthetic construct
  misc_feature 1..666: note = Description of Artificial Sequence: Synthetic coding sequence
  source 1..666: mol_type = other DNA
atggccagcctggaggtgtccagatcaccacgcaggtccaggcgggagctggaggtgcggtcccccaggcaaaataaatattcagtgctgctgcccacatataacgagcgcgagaaccttccattgattgtttggctgctcgtgaaatcattcagcgaatccggcattaactacgaaatcataatcattgatgatggtagccccgacggcactcgggacgtggctgagcagctggagaaaatctatggcagcgaccgcatcctgctgcgacctcgcgagaaaaagctcgggctgggcacagcgtacattcatggcatgaagcatgctaccggcaattacataattatcatggacgctgacttgtcccatcacccgaagtttattcctgaattcatcagcgacggagtcctcccatgttgccccggatggagtttgctcggcagctcggaccctgctatcctggcgtcgtgggattatagccggggagctaatttccttacccagatacttctgaggccaggggcttctgacttaacaggctcctttcgcctctatagaaaagaggtcctagaaaagctcattgaaaagtgtgtgtccaagggttatgtgtttcaaatggaaatgatagtgagggcacgccagctcaattatacaataggcgaatag

SEQ ID NO: 28412 - DNA, 888 bp, synthetic construct
  misc_feature 1..888: note = Description of Artificial Sequence: Synthetic coding sequence
  source 1..888: mol_type = other DNA
atggccagtctggaagtttccaggagtcccagaagatctaggcgagagctcgaggtgaggagtccaagacagaacaagtattccgtccttttgccaacctacaacgagagggagaatctgcccctgatcgtatggttactagtgaaaagcttctccgagagtggcatcaactatgagattattattatagatgatggcagtcctgacgggactagggatgtggccgagcagttggagaagatctacgggtcagataggatcttgttgcgacccagagagaagaagctaggcctaggtactgcatatatccatggcatgaagcatgcaacaggcaattacattatcataatggatgcagacctgtcccaccaccccaaatttatccccgagttcatacgtaaacaaaaggagggcaacttcgacatagtgtccggtaccagatataaaggaaacgggggagtatacggatgggatctcaagaggaagattatctctgacggcgttctcccgtgttgtcccggatggagtctgctcggatcaagtgatcctgcgattctggcctcatgggactataggtgtgaacctccccgacttgcaagcaggggtgccaatttcttgacccagatactactgcgcccaggagctagcgacttgactggctctttcaggctctaccgtaaagaagtgctggaaaagctgatagagaagtgcgtctcaaagggatacgtgttccagatggagatgatagtcagggctaggcaactaaactataccatcggtgaggtgcccatctcttttgtggacagggtctatggcgagagtaagctcgggggtaacgagatcgtttcttttctgaagggcctgctgaccctattcgccaccacatag

SEQ ID NO: 28413 - DNA, 1332 bp, synthetic construct
  misc_feature 1..1332: note = Description of Artificial Sequence: Synthetic coding sequence
  source 1..1332: mol_type = other DNA
atgagaaggcaggtcatggcagccctggtagtgagtggcgcagccgagcaaggaggacgtgacggaccaggcagaggacgagccccacgcggaagggtcgccaatcagatcccgcctgagatcttgaagaaccctcagcttcaggctgcgatcagagttctacctagtaattacaatttcgaaatccccaagacaatctggcggattcagcaggctcaggctaaaaaagttgcactccagatgcccgagggattactcctgtttgcctgtactatcgtggacatactggagcgcttcacggaagctgaagttatggtaatgggagacgtgacctatggggcatgttgcgtggacgattttactgctcgcgcactgggggctgatttcttggttcactacgggcactcgtgcctgatcccaatggatacgtcagctcaggattttagagttttatatgtcttcgttgacattaggattgataccacccaccttctcgacagcttaaggctgacattcccccctgcaacagctctggcactggtaagcactattcagtttgtctcgaccctgcaggcagccgcacaggagctaaaagctgaatacagggtaagcgtgccccagtgtaaaccattgtccccaggagaaattctcggctgcacatcacctcgattgagcaaagaggtggaagccgtagtctacttaggtgatggcaggttccatctcgagtccgtgatgatcgctaacccaaatgttcctgcttacagatatgacccatattccaaggtcttgtcccgggagcactacgaccaccaacggatgcaggctgccaggcaagaggccattgctaccgccaggtcagccaagagttgggggcttatcctgggcactttgggccgtcaggggtcccctaagatcctggagcatctggagagccggttgcgcgctcttggcctgtctttcgttcggttgctgctgagcgaaatattcccatctaagctgtctctattaccagaggtagacgtctgggtccaggtcgcgtgcccacggctgagcatagactgggggaccgcttttcctaagccactgttgaccccctatgaggccgcagtggccctccgagatatctcctggcaacagccttacccaatggacttctatgcaggttcttccctgggtccttggaccgtcaatcacgggcaggaccgaaggccccatgcacctggaagacccgcaaggggaaaagtgcaggaagggagcgcaaggccaccaagtgctgtggcgtgtgaagactgcagctgcagagatgaaaaagtggctccactggccccatag

SEQ ID NO: 28414 - DNA, 1146 bp, synthetic construct
  misc_feature 1..1146: note = Description of Artificial Sequence: Synthetic coding sequence
  source 1..1146: mol_type = other DNA
atgattgacacgctgcgcccagtgcccttcgccagcgagatggccatctctaaaactgtcgcgtggctgaatgagcagctcgaactgggaaatgagaggctgttactaatggattgtcgccctcaggagctttacgagtcaagtcatattgaatcggctattaacgtggccatccctggcattatgcttcgccgactgcaaaaaggtaacttaccagttcgcgctctctttaccagaggtgaggaccgggacaggttcacgcggaggtgtggaaccgatacggtcgtcctgtatgatgagagcagtagcgattggaacgagaacacagggggtgagagtgtacttggtctgctgctcaaaaaattgaaggacgaagggtgtagagccttttacctggagggcggatttagcaagtttcaggccgagttttccctacattgtgagacgaacctcgacggatcatgtagtagtagttccccacctttaccagtgctggggctgggcggtctccgaatttctagcgatagtagctccgacatcgaatctgacctggatcgagacccgaactccgccactgactccgacggctccccactcagcaatagtcagccaagcttcccggtggagattctgccattcttgtacctcggttgcgccaaagacagcaccaaccttgatgttctggaagaattcggaattaagtacatcctcaatgtgacccccaacctgccaaacctgtttgagaacgccggagaatttaaatacaagcaaataccaatttctgatcattggtctcaaaacctgtcgcaattcttcccagaagccattagctttatagacgaagcacgaggcaagaactgcggagtgcttgtgcactgtcttgcgggaatcagtcggtctgtaaccgtgaccgtcgcatacttgatgcagaaattgaacctgagcatgaacgacgcctatgatatcgtcaagatgaaaaaatcaaatatctcacctaattttaattttatgggacagctgctcgactttgaaagaactcttggcctctcctctccttgtgataaccgggttcctgcccaacagttgtacttcaccacccccagtaatcagaacgtttaccaagtggactcgctccaatccacgtag

SEQ ID NO: 28415 - DNA, 708 bp, synthetic construct
  misc_feature 1..708: note = Description of Artificial Sequence: Synthetic coding sequence
  source 1..708: mol_type = other DNA
atgatcgacactcttcgtcccgttccttttgctagcgagatggctatttccaagaccgttgcttggctcaacgagcagcttgagctcggtaacgaacgcctgctcctgatggactgtcgtcctcaggagctttatgaaagtagccatattgagtccgctataaacgtggctattccaggcatcatgttaagaagactccagaagggaaacctgcccgttcgggctctgtttacaagaggggaagaccgcgataggttcacccgacgttgcggcacagatacagtggtactgtatgacgaatcctccagcgactggaacgagaacaccggcggagaatccgtgttaggactgcttctgaagaagcttaaagacgaaggctgtcgcgcattttacctggaagacgaagcaaggggcaagaattgtggggtgctagtccattgtctggcgggtatctcacgttctgtgaccgtgaccgtggcatatctgatgcagaagctgaatttatctatgaacgatgcctacgacatagtgaagatgaaaaagagcaacataagccctaatttcaatttcatggggcagctcctagatttcgagcgtacactgggactgtcgtcgccttgcgataaccgcgtgcctgcccaacagctgtactttactacgccctctaaccaaaacgtgtaccaagtggatagcttgcagtctacctag

SEQ ID NO: 28416 - DNA, 354 bp, synthetic construct
  misc_feature 1..354: note = Description of Artificial Sequence: Synthetic coding sequence
  source 1..354: mol_type = other DNA
atgatcgatacacttagacccgtcccttttgcgagcgagatggcaatttccaagaccgtagcttggctgaatgaacagctggagcttgggaacgagagactcctcctgatggactgccgcccacaggagctgtatgaatctagccacatagaaagcgcaatcaatgtagctatccctgggatcatgctgagacgattgcagaagggcaatctccccgtgcgcgcactgttcacaaggggggaggaccgagatagatttactcgtcgatgtggcaccgacacagtggtgttgtatgacgaaagctcttccgactggaacgagaatactggcggagagtctgtactggggctatag

SEQ ID NO: 28417 - DNA, 1545 bp, synthetic construct
  misc_feature 1..1545: note = Description of Artificial Sequence: Synthetic coding sequence
  source 1..1545: mol_type = other DNA
atggcagatgcagaggtcattatcctgccaaaaaagcataaaaagaaaaaggagcgtaaatccctcccagaagaggacgtggctgagatccaacatgctgaggaattcttaatcaaaccagagagcaaggtggccaagctggacacctcccagtggccactcctgctaaaaaatttcgacaaactgaatgtacggaccacgcactacacccctttggcctgcgggtcgaaccccctgaagagggagataggagactatataaggaccggctttatcaatctggataagccatcaaacccatcctctcatgaggttgtggcctggatcaggcgcatcttgcgcgtggagaagactggccatagcggcacattggaccctaaggtgaccggctgtctgatagtgtgcattgagagagctacccgactagtcaagagccagcagtcggccggaaaagagtacgttggtatcgttcgtctccataatgccatagaggggggaacacagcttagcagggccctggagaccctgaccggagccctgttccagcgcccaccccttatagctgccgtgaagcgacagctgagagtgcgcaccatctacgagagcaaaatgattgagtatgatcctgagcgaagacttggcatcttctgggtatcatgcgaggcgggaacatatatccggacactatgcgttcacttgggtctgcttctcggtgtggggggacagatgcaggagctgcgccgagtgcgctctggggtcatgtccgagaaagatcacatggtcacaatgcacgacgtgctggatgctcagtggctttacgataaccataaagatgagtcctatctgcgaagggtggtgtatcctctcgagaagctcctgacgtcacataagaggcttgtgatgaaggactccgcggtgaacgctatctgttacggggctaagatcatgctccctggagtgcttcgatacgaggacggcattgaggtcaaccaagaaatcgtcgtgattaccacaaaaggtgaagccatctgcatggcaattgcgctcatgaccaccgctgtcataagcacgtgcgatcacgggattgtggccaagatcaagagggtcattatggaaagggacacctaccctaggaagtggggcctgggtcctaaggcctctcagaagaagcttatgataaaacagggactgctggacaagcacggtaagcctacggacagcacgcctgccacctggaaacaggaatacgtggactactctgaatctgcaaaaaaagaggtggtggcagaagtggtaaaggccccacaggttgtggcagaggctgctaagactgccaaacgaaagcgcgaaagcgagtcggaaagcgacgaaacgcccccagcagcgccacagttgatcaagaaagaaaaaaaaaagagcaagaaggataaaaaagcaaaggcgggtcttgaaagcggggcagagccgggagacggggatagtgatacgacaaagaaaaaaaagaagaaaaaaaaggcaaaggaggtggagttggtgagcgagtag

SEQ ID NO: 28418 - DNA, 7245 bp, synthetic construct
  misc_feature 1..7245: note = Description of Artificial Sequence: Synthetic coding sequence
  source 1..7245: mol_type = other DNA
atggcggaaaacgttgtggagcctggacccccttccgcaaagagaccaaaattgagtagtccagcactgagtgccagtgcgtctgacgggacagactttggctccttgttcgatttagaacatgacctgcctgatgaactgatcaactcgacggagctgggactaacgaatggcggagatatcaatcaactgcagacatccctgggcatggtccaggatgctgcttcaaagcataaacagctgtcagagctgttgagatcgggctctagcccaaacctaaatatgggggtgggtggcccagggcaggttatggcctcgcaggctcagcagtcatctcctggcctgggactgatcaacagtatggtgaagagcccaatgacacaggccggactaacatcccctaatatgggcatggggacctctggaccaaaccaggggcctacgcagagcacagggatgatgaacagtcccgtgaaccaaccagccatgggaatgaataccggcatgaacgcaggtatgaacccaggaatgcttgcagccggaaacggacagggtatcatgccaaaccaagtcatgaacggatccattggcgctggaagaggacgacagaacatgcagtaccccaaccccggaatggggagcgcaggaaacttgctgaccgagccactacagcagggctcaccgcagatgggcggtcagacagggttgcgaggccctcagcctctgaagatgggaatgatgaacaatccaaacccttatgggagcccgtacactcaaaacccgggtcaacagatcggggcttccggtttgggtcttcagattcagaccaaaactgtcctctcaaataacctgtcaccttttgccatggacaaaaaagctgttcctgggggtggtatgcctaatatgggccagcagccagctccccaggtccagcagcctggactcgtcactccagttgcccagggtatggggtcaggcgctcacacggcagacccagaaaagcggaaattaatccagcagcaactggtcctgcttctgcatgcgcataaatgtcagaggagagagcaggccaatggcgaggtcaggcagtgcaatttacctcactgccgtaccatgaagaacgtgctgaatcacatgacgcattgccagtccgggaagtcatgccaggtggcccactgtgcttcatctcgacagatcatatcccattggaagaactgtacgcgacacgattgtcccgtttgcctgccactgaaaaatgctggcgataaacgaaaccagcagcccatcttaacgggcgcacctgttggactcggcaatccttcctcactgggtgttggtcagcagagcgccccaaatttgtctaccgtgagccagattgaccccagctcgattgagagggcgtatgccgctctaggcctgccttaccaagtgaaccaaatgcctacacagccacaggtccaggcaaaaaaccagcagaaccagcagccaggacagtctcctcagggcatgcgccctatgtccaacatgtcagccagccccatgggagtgaatggaggagtgggggtccagactccatcccttctgtctgattcaatgctacacagtgctattaattcccagaacccaatgatgagtgaaaacgcatcagtgccaagcctgggcccaatgccgactgctgcacagccatccacaaccggcatacgtaaacagtggcatgaagacattactcaggatttgcgcaatcacctggtccacaagctcgtccaggctatattcccgacaccggacccggcagcacttaaggaccgccgaatggaaaatctggtggcctacgctcggaaagtggagggtgacatgtatgaatccgctaataatcgagcagaatactatcatctccttgccgagaaaatttacaaaatccaaaaagaactagaagaaaaaagaaggactagactgcagaaacaaaacatgctccccaatgctgccggtatggtcccagtgagcatgaatcctggcccaaatatgggacagccacagccaggaatgacttctaacgggccattacctgatcccagcatgatccgaggtagcgtccctaaccagatgatgccaagaataacacctcaatcaggcctgaatcaattcggtcaaatgtctatggcccagccacctattgtgccacggcagacaccccctctgcagcatcacgggcaactcgctcagcctggtgccctgaaccctcccatgggctacggccctagaatgcagcagccaagcaatcagggccaattcctgccacaaacacaattcccaagccagggtatgaacgtcacgaacatccctctggcaccttccagtggacaggcgccagtgtcacaagcacagatgtcaagcagcagctgccctgttaacagccctatcatgccaccaggctcccaaggttcacatatacactgcccacagcttccacaacctgcactccaccaaaactcaccctcacccgtgccctcacggacccccactccccatcatactccgcctagcatcggggctcagcaaccacccgcaacgacaatccccgcacccgtccctaccccaccagcaatgcctcctgggcctcagagtcaggccctgcatccaccgccacgccagacacctacacctcccaccacacagcttccccagcaggtccagccctcactaccggctgcccctagtgcagatcagccccagcaacagcccagatctcaacagtctacagcggcttccgtccctaccccaacagctcccttgctcccaccacagcctgccacccccctttcccagcccgcagtgagcatagagggccaggtgagcaacccccctagcacctcaagcacagaagttaacagccaggcaatcgcagagaaacagccgagtcaagaggtaaaaatggaggcaaaaatggaagtcgatcagcccgaacccgctgacactcagcccgaggacatctcagaaagcaaagttgaggactgtaagatggagagcacggagacagaggaacggagtacagagctgaaaacagaaattaaagaagaggaggaccagccttctacgtccgccactcaatcgtccccagcaccgggacagtcaaaaaaaaagatctttaagccagaagaactgcgccaggccttaatgcccacactggaggccctgtaccgccaggatcccgagagcctgcctttccggcagcccgtggatcctcagcttctcggcattcccgattattttgatatcgtcaagtcgcctatggatttaagcacaataaagcgcaaactggataccggacagtaccaggaaccctggcagtatgtggacgacatttggctgatgtttaacaacgcctggctctacaatcggaagacaagcagagtctacaaatattgcagcaagttgagtgaggtatttgagcaagagattgaccctgtgatgcaatctctgggttattgctgcgggaggaagttagagttctctccacagactctgtgttgttacgggaaacagctctgtacgatccccagggacgcaacctactacagctaccagaacaggtatcacttctgcgaaaagtgctttaacgagattcagggcgagagtgtctctctgggcgacgatccctcccagcctcagaccacaatcaacaaggagcagttcagcaagagaaagaatgatacactggaccctgaactcttcgtggagtgcactgaatgtggaagaaaaatgcaccagatatgcgtcctgcatcatgaaattatttggccagctggcttcgtttgtgacggctgtctgaaaaagtctgcgagaacacggaaagaaaacaagttctccgcgaaacggttgccctcgacaaggcttggcacttttctcgaaaatagagtcaacgactttcttcggagacagaaccatcctgagagcggtgaggtaacagtgagagtcgtacacgccagcgataagaccgtcgaagtcaaacctggaatgaaagctagatttgttgattctggggagatggctgagtcttttccctacaggacgaaggctctttttgccttcgaggaaatcgatggcgtggacctctgcttcttcggcatgcacgttcaggagtacgggagcgactgccctcccccaaaccagcggcgagtctacattagctatctggatagcgtacatttctttagaccgaagtgtcttcggactgctgtgtatcacgaaatactgataggctaccttgagtacgtgaagaagttaggctacaccacaggacatatttgggcctgtcctccttctgagggcgatgactacatctttcactgtcacccacctgaccagaaaatcccaaaacccaagcgcctccaggagtggtataaaaagatgctggataaagccgtcagcgaaaggatcgtccatgactataaagatattttcaaacaggcaaccgaggaccggctgacctcagctaaggagctgccttactttgagggcgatttttggccgaacgtactcgaagagagcattaaagagctggagcaagaagaagaagaacgcaaacgcgaagagaatacctctaacgagagtactgacgttactaaaggtgacagtaaaaatgctaaaaaaaaaaataacaaaaaaacctcaaaaaacaagagctccctatcgcgtggtaacaaaaaaaaacccggaatgccgaacgtgtcaaatgatctgtctcagaagctgtatgctacgatggaaaagcacaaagaagtgtttttcgttattcgattaatcgctggccctgccgctaactccttgcctccaatagtggacccagatccacttattccttgtgatctcatggatggaagagatgcctttctgactctggctcgcgacaagcacttggagttctccagccttagacgggcacagtggtccacaatgtgtatgttagtcgagctgcacacacagtcccaggatagattcgtctatacttgcaacgagtgcaaacatcatgtcgagactagatggcattgcacggtctgtgaggactatgatctgtgtattacatgttacaacaccaaaaaccacgaccacaagatggagaagctgggattgggcctggacgatgagtccaataaccagcaggcagccgcaacccaatcgcccggtgactctcgacgactctcaatccaaaggtgcatacaatctttggtgcacgcctgtcagtgtcgcaatgccaactgcagcctgccgagttgtcagaaaatgaagcgggtggttcaacacacaaagggctgcaaacggaaaactaacggaggatgcccgatatgtaagcagctcatcgccttgtgttgctaccacgctaagcactgtcaggagaacaagtgtcctgttcccttctgcctgaatatcaaacagaagttgaggcagcagcaactgcagcatcgcttgcaacaagctcagatgctaaggcgacgcatggcatcaatgcaaaggaccggtgttgtcggccagcagcaggggctgccatcccctaccccagcaactcccacgacgcctactgggcagcagcccacaacccctcagacaccacagcctactagccagccacagcccacgcctcctaactccatgcctccttatctgccccgtacacaggctgcaggtcctgtgagtcaaggaaaggccgctggccaggtaaccccccctacccctcctcagaccgcccagccaccgctccccggacctcctccagccgctgtcgagatggccatgcagatccagcgggctgccgaaactcaacgccagatggcccacgtgcagatattccaacgcccaatacagcaccaaatgccccctatgaccccgatggcccctatggggatgaacccaccccctatgacacgcggaccttccgggcacctggaacccggaatggggcctaccggcatgcaacagcagccaccatggtctcagggcggtctccctcagccccaacagctgcagagcgggatgccgcgacctgccatgatgtctgtagcgcagcacgggcagcccctgaacatggcaccgcaaccgggtctcgggcaggtcggtatcagccccctgaagccgggaaccgtgtcgcagcaagccctccagaacctgttgaggactctcagatccccaagtagccccctccagcaacaacaggtcttatcaatactgcatgcaaatcctcagctgctggccgcattcatcaaacagcgggcagcaaagtatgctaactctaatccccagcccatccccggtcagcccggtatgccccaggggcaaccaggacttcaacccccaacgatgccaggccaacagggcgtgcatagcaaccccgctatgcagaatatgaaccccatgcaagccggtgtgcaacgtgccggtctcccccagcagcagccacaacagcaactgcaacccccaatgggaggaatgtctccgcaggctcaacagatgaacatgaatcacaatactatgccatcccagttcagagatatcctccgaagacagcagatgatgcaacagcagcagcagcaaggagccggacccggaatcgggcctggtatggcaaatcataatcagttccaacagccacagggggtgggctatccccctcagcagcagcaacggatgcagcatcacatgcagcaaatgcagcagggtaacatgggtcagataggtcagttgcctcaggcccttggcgctgaggccggagccagcctccaggcgtaccaacaaaggctgttgcaacagcagatgggtagtcccgttcagccaaatcccatgtcccctcagcagcacatgctccccaaccaggcccagtccccccacctgcaaggtcaacagatcccaaacagtctctctaaccaagtgcgctctccccaacccgtgcctagcccaaggcctcagtctcagccgccacacagcagccccagtccgagaatgcagccacagccgagcccgcaccatgtgtccccccagacgtcgagcccgcacccgggtctggtggcagcccaggccaaccccatggagcaggggcacttcgcctcccctgatcagaattccatgctgagccagctagcctctaacccaggaatggctaatcttcacggagcttctgcaaccgacttaggcctctctaccgataatagcgacttgaacagcaatctgagccagtctactctggatattcactat

SEQ ID NO: 28419 - DNA, 1314 bp, synthetic construct
  misc_feature 1..1314: note = Description of Artificial Sequence: Synthetic coding sequence
  source 1..1314: mol_type = other DNA
atggcattggccggtgcacctgccggtggcccttgcgcccctgcgctggaagccctacttggagcaggcgctcttcgcctgttagattccagccagatcgttattatatctgctgcccaggatgcgagtgccccaccagcgccaaccgggcctgccgctcctgcagccggaccctgcgaccccgacttgcttctgttcgctacaccgcaagccccacggccaacgccgagcgcccctagacctgcactgggtcgtccacccgtaaaaaggagattagacctagagacagaccaccaatacctggctgaaagctccggacctgcccgaggtcgaggtcggcatcccggtaaaggggtcaaaagtccaggcgagaagtcaagatatgaaacttccctcaatctcaccactaagcggttcctggagctgttgtcccattctgcagacggcgtggtggatcttaactgggccgcagaggtcttgaaagttcagaagaggagaatctatgacataacaaatgtgcttgagggaattcaactgatcgcaaagaagtcaaaaaatcatattcagtggcttggctcacacaccactgtcggtgtaggcggtaggctggagggcctgactcaggatctccggcagctccaggaatctgaacagcagcttgaccacctgatgaacatttgtaccactcagcttcggctgctgtcggaggatacagactctcagcgccttgcatacgtgacttgtcaagatctccgatccatagccgacccagctgagcagatggtcatggtaatcaaggcacccccagaaacacagctgcaagcagtcgattccagcgagaattttcagatcagtttaaagtcaaaacagggcccaatcgatgtgttcctgtgccccgaagagactgttggagggatcagcccagggaaaactccttcccaggaagtaaccagtgaagaggaaaatagggcaacggattccgccacaatcgtgtcaccccctccaagttcccccccttcctccctcacaaccgatccttcacagagtctgttgagcctcgagcaggaacccctgttgagtaggatgggatctctgcgagcgccagtggacgaagaccgattgtctccattagtggcagcggattctcttctggagcatgtacgagaagatttctcaggtcttctccccgaagagtttatcagtctgtccccaccacacgaagcactcgattatcattttggacttgaggaaggtgagggtatccgtgatttattcgactgcgacttcggggatctgaccccccttgacttttag

SEQ ID NO: 28420 - DNA, 1242 bp, synthetic construct
  misc_feature 1..1242: note = Description of Artificial Sequence: Synthetic coding sequence
  source 1..1242: mol_type = other DNA
atggcagaggcgggaccacaggcccctcccccacctggaacccccagcaggcacgagaagtccctaggactgcttactaccaagtttgtgagccttctccaagaggcaaaagacggagtgctcgacctgaagctggccgcagacacactcgccgtgcgccagaaacgccgtatttatgatattactaatgtgttagagggcatcggcctgatagagaagaaaagcaaaaatagcattcaatggaagggggttggaccagggtgtaacacccgtgagattgccgataagctcatcgagctgaaagccgaaattgaagagttacaacagcgggaacaggagctggaccagcataaggtttgggtgcaacaaagtattcgcaatgtgacggaagacgtgcagaactcttgcctagcttatgtaactcatgaagacatctgtcgctgtttcgcgggtgatacactgctcgccatcagagccccatctgggaccagccttgaggtgccaattccagaagggctgaatgggcagaaaaaatatcagatccacctgaaatctgtctcaggacctatcgaggtgctgcttgttaataaggaggcctggagttctccccctgtggccgtgcctgtgcccccaccagaagatctgctgcagtccccctcagccgtctctaccccaccgcctttgccaaagcccgctcttgcccagtcacaagaagcttcaaggcctaatagcccacagttaactccaactgccgtccctgggagtgcggaggtccaggggatggcaggcccagcagctgagattacggtttctggcggaccgggaactgactctaaagatagcggtgagttgtcaagcctgcctcttggccctaccacacttgacaccaggcctctccagtcctcagccctgcttgacagcagctctagctcttcctcctcaagtagttcgagtagtaatagcaactcttcatcgtcatctggaccaaacccgagtacaagtttcgaacccatcaaagctgacccgacaggtgtgctcgagttgcctaaggaattaagtgagatattcgatccaaccagggagtgtatgagttcggaactcctagaggagcttatgtcatccgaagtgttcgctccactcctgcgactttcacctccccctggggatcacgattatatctacaatctagatgaatccgagggggtgtgtgatttattcgatgtacctgtacttaatctgtag

SEQ ID NO: 28421 - DNA, 1164 bp, synthetic construct
  misc_feature 1..1164: note = Description of Artificial Sequence: Synthetic coding sequence
  source 1..1164: mol_type = other DNA
atgacaggaaagctggccgagaagttacctgtcacaatgagttcactgctgaaccagctcccagataacctctaccctgaagagatccctagcgcactcaacctgttctcagggtcctccgacagtgtcgtccactacaatcagatggcgactgagaacgttatggacatcggcttaaccaatgagaagccaaatccagaactgtcctactccggtagcttccagcctgcaccagggaataagactgtaacttatttgggaaagtttgccttcgactccccgagcaattggtgccaggacaacatcataagccttatgtccgccggtattcttggagtgccacccgctagcggcgcacttagcacacaaacatcgactgcatctatggtgcaacctccgcagggtgacgtggaggccatgtacccagctctgcccccttactcaaactgcggagacctgtacagcgagccagtttctttccacgacccacagggcaaccccggactggcatactcccctcaggattaccaatcagcaaagcccgcacttgacagcaacctctttcccatgatcccggactataacctgtatcaccaccccaatgatatggggtctatacccgagcacaagccttttcagggaatggatccgatccgggttaaccccccaccaattactccattggaaacaataaaagcgttcaaagacaagcaaatacatcctgggttcggtagcttgcctcagcccccactgactcttaaaccaatcagacctcgtaagtaccccaaccgcccatccaagacaccactgcacgagcggcctcacgcatgcccagcggagggatgtgaccgtcggttctccaggtccgatgagctgacgcggcatttgcgtatccacaccggacacaaaccattccaatgccgaatttgcatgaggtccttttctcgatccgaccatctcacaacccatatcagaacccacaccggcgagaagccatttgcttgtgaattttgcgggcgaaagttcgccagatccgacgagcgcaagaggcacgccaaaattcatctcaaacagaaggagaagaaagcagagaagggtggtgcgccaagcgcctcctcagcaccccctgtttccttagctcctgtggtgaccacgtgcgcctag

SEQ ID NO: 28422 - DNA, 687 bp, synthetic construct
  misc_feature 1..687: note = Description of Artificial Sequence: Synthetic coding sequence
  source 1..687: mol_type = other DNA
atggacatcggacttaccaacgaaaagcctaaccccgaacttagttattcaggaagtttccagccagccccagggaataagactgtcactatgatccccgattacaacttgtaccaccatccaaacgacatgggcagcattccagaacacaagccctttcagggaatggatcctatccgcgtgaaccctccaccaatcacacctcttgaaacgatcaaggctttcaaagataagcagattcatcccggatttgggtctcttccacagcccccactgaccttgaaacctattaggcccaggaagtaccccaatcgtccctccaagactcccctgcacgagcgtccccacgcttgcccagctgagggctgcgatagacggttctcccgctcagatgagctgactcgccatctgcgcattcatacagggcataaacccttccagtgtaggatttgcatgcgcagcttctccaggtctgatcatctgaccacgcacatcaggacccacaccggggagaaaccatttgcctgcgagttctgcgggaggaaattcgcccgatcagacgaacgtaagaggcatgcaaaaatacacctgaagcaaaaggagaagaaggcggagaaaggcggtgctccctccgcttctagcgctcctcctgtgagtttggcacccgttgttacaacctgtgcctag

SEQ ID NO: 28423 - DNA, 1050 bp, synthetic construct
  misc_feature 1..1050: note = Description of Artificial Sequence: Synthetic coding sequence
  source 1..1050: mol_type = other DNA
atggagccctgtgctgcctggtccccccgtggaggcagggaaaacgttatggacatcggtctgactaatgaaaagccaaaccctgagctttcgtattctggatcgtttcaacctgcacccggtaacaaaactgtcacctacttgggaaagtttgcattcgactctccctcaaactggtgccaggacaatataatcagtctcatgtccgcagggatcctcggcgtgcctcctgccagtggagccctttccacccagacctctactgcgagtatggtgcagccccctcagggcgacgtcgaggctatgtatccagccctgcccccttattcgaattgtggggacttgtactctgaacctgttagcttccacgacccccagggaaacccaggtttggcctactccccccaggattaccagagcgctaagcctgcccttgactcgaatctgttcccaatgatcccagactataatctttaccaccaccccaacgatatgggcagcataccagagcataaacccttccagggcatggatcctataagggtgaacccgcctccaatcacacccttggagacaatcaaggccttcaaggacaaacaaatccatccaggcttcggctctctgccgcagccccctctgactctgaaacccatcaggccccgtaaataccctaatcgcccatcgaaaactcctctgcacgagcggccacacgcttgtcccgctgagggctgcgaccgcagattcagtcggtcggatgagctcactaggcacctgagaattcatacaggtcacaaacctttccagtgcaggatttgcatgcgaagcttcagtaggtccgaccatcttaccacacatattcggacacacacaggcgaaaaaccttttgcctgcgaattctgtgggaggaagttcgccaggtccgatgaacggaaacgccacgccaagatccacctgaagcagaaggagaagaaagccgagaagggtggtgccccaagtgctagctctgcaccccctgtcagcctggcccctgtggtgaccacatgtgcctag

SEQ ID NO: 28424 - DNA, 3696 bp, synthetic construct
  misc_feature 1..3696: note = Description of Artificial Sequence: Synthetic coding sequence
  source 1..3696: mol_type = other DNA
atggcttcagtatggaagcggctccaacgggttggaaaacacgccagcaaattccaattcgtggcctcataccaggaacttatggttgagtgtacaaaaaaatggcagccggataagctggttgtcgtttggaccaggaggtctcggaggaaaagtagcaaggcccacagttggcaacccggtattaagaatccctaccgtggcgtggtcgtgtggcctgtgcctgagaacatcgaaattacggtgactttgtttaaggatccgcacgctgaggaattcgaggacaaagaatggacctttgtgatcgagaatgaaagccctagcggtcggagaaaagctttggccacctcatccattaacatgaagcagtatgcgtccccgatgcccacacagaccgatgtgaagctgaagtttaagcccctctctaaaaaggtcgtatctgctgctcttcagttcagtttgagctgcatctttttgagagagggcaaggctaccgacgaggatatgcagtccttagcctcccttatgtccatgaagcaggcggatatcggaaacctggatgattttgaggaggacaatgaggacgacgatgaaaatcgcgtgaaccaggaggagaaggctgcaaaaatcacagaaatagtgaaccaattaaacgctttatcttcactagatgaggatcaggacgactgcatcaaacaggcaaacatgagaagcgctaagagtgctagctcctcagaggagttgattaacaaattaaactttctggacgaagctgagaaggacctcgcaacagtcaactctaaccccttcgatgaccctgacgccgcagagctgaaccctttcggggatcctgatagcgaggaacccatcacagaaactgcctccccgaggaagactgaggacagcttctataacaatagttacaatcctttcaaggaggtccagaccccacagtatctaaaccccttcgacgagcctgaggctttcgtgaccatcaaggatagtccccctcaatccaccaaaaggaagaatattcgccctgtggatatgtccaaatatctgtacgcagattctagcaaaacggaggaggaagaattagacgaaagtaaccctttctatgaacctaaatccacccctcccccaaataacttggtgaatcctgtacaggaactggagactgaacgcagggtgaaaaggaaggctcccgctccccctgtgctctcccccaagacgggggtgctgaacgagaacaccgtgagtgccggtaaggatctgtctacctcgcccaagccctctcccataccctcccctgtcttggggagaaaaccaaatgcgtcacagagcttgcttgtttggtgtaaagaggtaacaaagaattatcgaggggtcaaaataaccaattttacgacctcctggcggaacggactcagtttttgtgcaattctgcaccattttaggccagatctcattgactataagagcttaaaccctcaggacatcaaagaaaataataagaaggcctacgacggctttgcctcaattgggatttctaggctgctcgagcccagcgacatggtgctccttgccatccccgataaattaaccgttatgacatacctgtaccaaatcagggctcattttagcggccaagaactgaacgtcgtgcaaattgaagaaaattcttctaagagcacatataaggtaggaaattacgagacagatacaaacagctctgtggatcaagaaaaattctacgccgagctatcagacctgaagcgggagcccgaactgcagcagcctatttcgggcgcagtggactttcttagccaggatgattccgttttcgttaatgatagcggggtaggagagtctgagagtgaacatcagactccagacgatcacctttcaccaagtaccgccagcccatattgcagacggactaaaagcgacaccgaaccacaaaagagccagcaatcctccgggagaaccagtgggagcgatgaccctggcatctgtagtaatactgattctacgcaggcacaagtgcttctcggcaagaagcgattgttgaaggccgagactctagaactcagtgatttatacgtcagcgacaagaaaaaagacatgagtccccctttcatttgtgaagagacggacgaacaaaagctgcagaccctggatattggaagcaatctcgaaaaggaaaaactcgaaaatagccgcagccttgagtgtcgtagcgatcctgaatcacccatcaagaagactagtctgtcacctactagcaagctcgggtactcttacagccgcgatttggatctggctaagaagaaacatgcctcactgcgccaaacagaaagcgaccccgacgccgacaggactactctgaatcacgccgatcattcaagcaagattgtacagcataggctgctgagccggcaggaagaacttaaggaaagggccagagtcttgctggagcaggctagaagggatgctgcccttaaggctgggaataagcacaatacgaacacggcgaccccattctgtaacaggcaactgagcgatcagcaggacgaggaaagaaggaggcagctccgggagcgagcacgccagctgatcgcagaggcacgctcaggcgtgaagatgagcgaactccctagctatggggaaatggccgctgaaaaattgaaagagagatctaaagcctccggggatgagaacgacaatattgaaattgatacaaacgaagagatccctgaaggcttcgtggtaggcggtggcgatgaactcacaaacctggagaacgatctggacacccctgagcagaacagcaaattggtggacctgaaactcaagaagctgctggaagtgcagccccaggttgccaatagcccctcaagtgctgcccagaaggccgtgacagagagctccgaacaggatatgaaatccggcacggaggatctgagaactgagaggcttcagaagactacagaaaggttccggaatcctgtggtgttctctaaggattccaccgtccgcaaaactcagctccagagcttttcacagtacatcgaaaacagaccggaaatgaagcgtcagcggagtatccaagaggacaccaagaaggggaacgaagagaaggcggctattaccgaaacacaaaggaaaccctctgaggatgaggtgctgaataaggggtttaaggataccagccagtatgttgtgggcgaactggctgcgctggaaaacgagcagaagcagatagacactagggcggcactggtggagaaacggctccgctatttgatggacaccggcaggaatacagaggaagaagaagctatgatgcaagaatggttcatgcttgtgaataaaaaaaatgccctgatccgtcgtatgaaccagctgagtctgttagaaaaagaacatgacctcgagcgaaggtatgagctgttaaacagagagctgagggccatgttggcaatagaggattggcagaagaccgaggctcagaagcgccgagagcaacttctgctggacgaattggtggccttggtcaataaacgcgatgccctggtgagggacctcgacgcacaggaaaaacaggctgaagaggaggacgaacatcttgagagaacgcttgaacaaaataagggaaaaatggccaagaaggaggaaaagtgtgttctccagtag

SEQ ID NO: 28425 - DNA, 3591 bp, synthetic construct
  misc_feature 1..3591: note = Description of Artificial Sequence: Synthetic coding sequence
  source 1..3591: mol_type = other DNA
atggcttccgtctggaaaaggctgcagcgggtcgggaagcatgcgtctaagttccagttcgtagcgagctaccaggagctcatggttgaatgcacgaaaaagtggcaacccgataaactggtggtggtatggacgaggaggtccaggcgcaagtcatctaaggcccactcgtggcagccgggtattaaaaacccctataggggggtggtggtgtggccggtgccagagaatatcgaaataacggtgaccctgtttaaagacccacatgcagaagagtttgaagataaggaatggacctttgtgattgaaaacgaatctccttcaggcagacggaaggcccttgcaaccagctccattaatatgaagcagtacgccagtcccatgccaacacagacagatgttaaactcaagtttaagcctctctccaaaaaagtggtgtcagctgcactgcagttcagcctgtcttgcatcttcctgcgcgaggggaaagccactgatgaggatatgcaaagcctggcctccctgatgagcatgaagcaggcagacattggaaatctcgatgatttcgaggaagacaatgaagacgatgacgaaaatagggtcaatcaggaggaaaaagccgcaaaaattaccgaactgatcaataagttgaactttctagacgaagctgaaaaggatcttgctacagtgaacagtaatccttttgacgatcctgatgccgctgaacttaatccgtttggggaccctgatagtgaagagcctattactgaaaccgcgtcgcctcggaaaacagaggacagtttctacaacaattcatataacccttttaaggaagttcagactccccagtacttgaacccttttgatgagcccgaagcctttgttaccattaaagacagcccccctcaaagcacaaaacgcaaaaacattcggcctgtcgacatgtctaaatatttgtatgccgactcgtctaaaacagaggaagaagagctggatgagtcaaacccattctacgagccaaagagcacgcccccaccaaacaatctggtgaatcctgtccaggaactggagacggagcgcagggtcaaacggaaagccccagctccgccagtgctaagccccaagaccggcgtgcttaacgagaataccgtgagcgccggaaaggacctgtccacatctcccaaaccgagccccattccctctccggtgctgggcagaaaaccaaatgcaagtcagtcactgctggtgtggtgcaaggaagtgaccaagaattacagaggagttaagatcacaaatttcactaccagctggagaaacggcctgtctttctgtgccatcctgcatcattttcgcccagacctcatcgactataagtcactgaatccacaggatattaaggaaaataataaaaaggcctacgacggcttcgcctccattggaatcagcagattactggaaccctctgacatggttctcctggcaatacccgacaaattgaccgttatgacgtatctgtaccagataagggcccacttcagcggccaagaactgaatgtggttcaaattgaggaaaactccagtaagtcgacctataaggtgggcaactacgagaccgacaccaacagttccgtggatcaggagaaattttacgccgagctgtcggatctgaagagagagccagaactgcagcagcctatatccggggctgttgactttctgtcccaagatgactctgtatttgtcaatgactcaggggttggcgagagtgagtcggagcatcagacccccgacgatcacctgagtccaagtaccgccagcccctactgtcgtagaactaaaagcgatactgaaccccaaaagagtcagcagtcctccggacgcacaagcgggtcagacgatcccggaatttgctccaacactgactccacccaggcccaggtgcttctgggtaagaagaggctgctgaaagcagaaaccctggaactgtcagacctgtacgtgagcgataaaaagaaggacatgagtcccccatttatttgcgaagagacagacgaacaaaagctgcagaccctcgacattggctccaacttggagaaggaaaagcttgagaacagccgatcgctggagtgccgaagcgacccagaatccccaatcaaaaaaaccagtctgagccccacgagcaaacttggctacagttattcaagagatttagacctggccaaaaagaaacatgcttctctgcggcagaccgaatctgaccctgacgctgatcggactacattgaatcatgccgaccacagctccaaaatcgtgcagcatcgactgctttcaagacaggaagaactgaaagagagagcacgggttctgttagagcaggctcgacgggacgctgcactgaaggcaggaaacaaacacaataccaataccgccactccattctgtaatcgtcagctgtcagatcaacaagacgaagagcgtagaagacagctgcgtgagcgggcaaggcagttaattgcagaggctaggagtggtgtcaagatgtcagaactgccttcttacggcgaaatggccgctgaaaagctaaaagaaagatccaaggcgagcggggatgaaaacgacaatattgagattgataccaacgaagaaatccctgaggggtttgtcgtggggggtggcgatgaattgactaatcttgaaaacgacctggatactcctgaacagaatagcaagctggttgatctgaagttaaaaaagctcctcgaagtgcagccccaagtggccaattctcccagtagcgcagcgcaaaaagcagtcaccgaaagctccgaacaggacatgaaaagcggcacagaggatcttaggactgagcgtctgcagaaaacgacagaaagattccgtaaccccgttgttttctctaaagatagcactgtccggaaaacacagctgcagtccttcagccagtatatagaaaataggcctgagatgaagcgacagcggtcaattcaggaggatacaaaaaaaggaaatgaagagaaggccgcaatcacagagacgcagcggaagccatcagaggatgaagtgcttaacaaagggttcaaggatacttcccagtacgtcgttggcgagctggctgccttagaaaacgagcagaaacaaattgataccagagcagccttggtagaaaaacggctccgctatttgatggatacagggaggaatacagaagaagaagaagccatgatgcaggagtggtttatgctggtgaataagaagaacgctctcatcagacgaatgaatcagctctccctcctcgaaaaggaacatgatctggagagaaggtatgagctcctcaaccgggagttacgggcaatgttggccatcgaggactggcagaaaaccgaggcacaaaaaagacgcgaacagctcttactggacgagctggtagcattagtgaacaagcgcgatgccttggtgcgcgacctcgatgctcaggagaagcaggccgaagaggaagacgaacaccttgagcgaacactcgagcagaataaaggaaagatggccaaaaaggaagagaaatgcgtactccagtag

SEQ ID NO: 28426 - DNA, 3483 bp, synthetic construct
  misc_feature 1..3483: note = Description of Artificial Sequence: Synthetic coding sequence
  source 1..3483: mol_type = other DNA
atggcttccgtctggaagaggcttcaacgcgtcgggaaacatgcctccaagtttcagtttgtggcctcctaccaagaattgatggtagaatgtacaaagaaatggcagcccgataaactggtagtggtctggaccaggcgtagtcgcaggaagtcttccaaagcccactcttggcagcccggtatcaaaaacccctacaggggagtagtggtctggcccgtgccggagaacatagagatcactgtgacgctgtttaaggatccccacgctgaagagtttgaggacaaagagtggacgttcgttattgagaatgagagtcctagtggtcgcagaaaggctctggccacctctagcatcaatatgaaacagtatgcgtcacctatgccgacccagaccgatgtcaaactgaaattcaagcccctgtctaagaaggtagtcagcgctgcactccagtttagtctcagttgtatctttctgcgtgaaggaaaagctactgacgaggacatgcaatctctagcctccctaatgagcatgaaacaggccgatattggcaacctggacgatttcgaggaagacaacgaagacgatgacgaaaatcgggtgaaccaagaagaaaaagctgcaaagatcactgagcttataaacaagcttaacttcctcgacgaagctgaaaaagatcttgcaacagtcaactctaatccgttcgatgacccagacgcagctgaactcaacccgttcggggaccccgacagcgaggaaccaattacggagacagcctccccacgaaaaactgaggatagcttctataacaatagttacaatcccttcaaagaggttcagacaccccaatatttgaatcctttcgatgaaccggaagcttttgtgacgattaaagactctcccccacagagtacaaagcgcaaaaatatacggccagtggacatgtccaaatacctgtacgctgatagttcgaaaaccgaggaagaggagttggatgaaagcaaccctttctacgagccaaagagcactccgcctcccaacaacctcgtgaaccctgtgcaggaactcgaaacagaacggagagtgaagagaaaggccccagcaccacctgtcctcagtcctaaaacgggcgtgctgaacgagaacaccgtatctgctgggaaagaccttagcacgagccccaaacccagcccaatcccatcccctgtactcggcagaaagcctaacgccagccagagtctgcttgtctggtgtaaagaggtgaccaagaattataggggtgtgaagatcacaaactttacaacatcctggaggaatggactctccttctgcgccatcctgcaccacttcagacccgacctgatcgactacaagtcccttaacccccaggatataaaagaaaataacaaaaaggcttatgacggatttgcctcaatcggtatatcgagactcttggaaccttcagatatggtcctgctcgccataccagataagctaacagtgatgacatatctgtaccagatccgggcacacttctctggtcaggaactcaacgttgttcagattgaggagaacagctctaagtccacatataaggtcggtaactacgagacagatactaacagcagtgtagatcaggagaagttctatgcggagctgtcagaccttaaaagagagcccgaactgcagcagcctattagtggggctgtagactttctgtcacaagacgattcagtgttcgtaaacgactccggggttggggagagcgagagcgagcaccagacgccagacgaccatctctcgcctagtaccgcgagcccatattgccgaaggaccaaatctgacacagagccccagaagtctcaacagtcgagtggcaggacatctggcagtgacgatccaggcatttgtagcaatacagactcgactcaggcccaggtcctattgggaaaaaaacggttgctaaaagcagaaaccctggagctatctgacttgtacgttagcgataaaaaaaaagatatgagccctcccttcatttgcgaagaaaccgatgaacaaaaacttcaaactttggatataggcagcaacctggaaaaggaaaagctggaaaacagtcgttctctcgagtgcagatctgatcccgaatctccaatcaaaaaaacaagcctgtctcccacctcgaagctcgggtatagctattctagagatctcgatctggcaaaaaagaaacacgcctctttgaggcagaccgagagtgaccccgacgctgatagaacaacgcttaatcacgccgatcactcttccaagattgtgcaacacaggctgctatcaagacaggaagaactgaaggaaagagcacgggtattgctggaacaggcacgacgcgacgcggctctcaaggccggaaacaagcacaacacgaatacggccacccccttctgtaaccgccagttgtcagaccagcaagatgaggagaggcgtcgtcagctgcgcgagcgagccaggcaactgatcgccgaggctcggtccggcgtgaaaatgtccgaacttccaagctacggagaaatggctgcagaaaagctgaaggagcgcagtaaggcctcaggggagcaaaatagcaagctagttgacttaaaactcaagaagctcctagaagtgcaaccacaagtggccaattccccttctagcgccgctcagaaggctgtaacggaatcctccgagcaagacatgaagtctggcactgaagatttgcgcacagagaggcttcaaaaaactaccgagcgtttcagaaatcccgtcgtctttagtaaggattccactgtccgcaagacacagcttcagtccttttctcagtatattgagaaccggccagagatgaagcgtcagagatctatacaggaagacactaaaaaaggaaacgaggagaaggccgcaattacagagactcagagaaagcccagcgaagatgaggtcttaaataagggtttcaaagatacttcccagtacgttgtgggcgagctcgcagcactggagaatgagcagaagcagattgacactcgagccgcacttgtggaaaagcgcctgaggtacctcatggacactggcagaaacaccgaggaagaggaagctatgatgcaggagtggttcatgcttgtgaataagaagaatgctctgatccgcagaatgaaccagctgtccctgctggaaaaagagcatgacttggagcggagatacgagttattgaatcgggagctgcgcgctatgctagccatcgaagactggcagaaaaccgaagcccagaaacgtagagagcagttgttgcttgatgaactggtggcgctagtgaacaagagagatgccctggttcgagatttggacgcccaagagaagcaggctgaggaggaggacgagcatttagagcgcacccttgagcagaataagggtaagatggccaagaaggaggagaagtgcgttctgcagtag

SEQ ID NO: 28427 - DNA, 3591 bp, synthetic construct
  misc_feature 1..3591: note = Description of Artificial Sequence: Synthetic coding sequence
  source 1..3591: mol_type = other DNA
atggctagtgtgtggaagcggctccagcgggtgggaaaacatgcctctaaatttcagtttgtggcctcttaccaggaattgatggtagagtgcactaagaaatggcagcctgacaaattagtcgtggtctggactcggagatcccgcagaaaatcctctaaggctcactcctggcaacctggcatcaaaaatccataccggggtgttgtcgtttggcctgtgcccgaaaacatagagatcaccgtcaccctgttcaaagacccacatgctgaggagttcgaggataaggagtggacttttgtgatcgaaaacgaaagcccttccgggcgaagaaaggcactggccacttcaagtatcaacatgaagcagtatgcgtcgcctatgccgacgcagactgatgtcaagctcaaatttaaaccacttagtaagaaggtggtgtcagctgcgctgcagttttcgctctcttgcatatttctgcgcgaaggtaaggccacagacgaggacatgcagagcctcgcgagcctgatgtccatgaagcaggccgacatcggaaacctcgacgacttcgaggaggacaacgaggacgatgatgagaatagagtcaatcaggaagaaaaggccgctaaaatcaccgagctaatcaacaaacttaatttcctggatgaagcagagaaggacctcgcaaccgttaactctaacccattcgacgatccagatgcggctgaactgaatccgttcggggaccctgattccgaagagcctataacagagacagccagtcctaggaaaaccgaagactctttctacaacaatagttataacccgttcaaagaggtccagactccacagtacctgaatcccttcgatgaacctgaggctttcgttaccataaaggacagtccccctcagtccacgaaacgcaagaacatcaggcccgtcgacatgagtaagtatttgtacgctgactcttctaaaaccgaagaagaggaactggatgaatccaaccctttctacgagccaaagagcacgccgccacccaacaacctcgtgaatcctgtccaggagttggagaccgagcgaagagtgaagcgcaaggctcctgcgcctcccgttttgagccctaagaccggcgtgctgaacgagaacacagtctccgccggaaaggacctgtcaacaagtccaaaaccatcccccattccttctcccgtcctcggcagaaagccaaatgcatcacaaagcctgctcgtgtggtgcaaggaagtcactaaaaattataggggcgtgaagattactaactttaccacgagctggcgaaacggactatccttttgtgctattcttcaccattttaggcctgatttaattgactataaaagtttaaaccctcaggacatcaaggagaataataagaaagcctacgatggcttcgctagcattggtatttcccgcctgctggagcctagcgatatggtcttactcgcgattcctgacaagctgaccgttatgacctacttatatcagatccgtgcacacttttctggccaggagctgaatgtggtgcagatagaagaaaactcatctaaaagtacatataaagtggggaattatgagaccgatacaaactccagcgtcgaccaagaaaagttttacgcggaactgtcagacctgaagcgcgaacccgaactgcaacagcccatctccggcgcagttgactttctgtcacaggacgattcagttttcgtgaatgactctggcgttggagagtcggaatcagagcaccagacccctgatgatcatctctctccctcgacagccagcccatactgtcggcgtaccaagtccgatacggaaccccaaaagtctcagcagagttccggccgaacaagcggctccgacgatcctggcatctgtagtaataccgactccactcaggcccaggtcctgctaggcaaaaagcggctgttgaaggccgagactctggaattatctgatttgtatgtctcggataagaagaaggacatgtctcctccctttatttgcgaggagaccgatgaacagaagctgcagaccctagacataggctctaacctcgagaaggagaagctggaaaactcaaggagtttagaatgccggagtgatcccgaaagcccgatcaagaagacaagcctgtcacccactagcaaactggggtattcgtattcaagggacttggatctggccaaaaagaagcacgctagccttagacaaactgagtcagaccccgacgccgatcgaactacactgaatcacgcggaccactcctcaaaaattgtccaacaccggctcctgagtcgccaggaagagctcaaagaacgagcacgggtgctgctagagcaagccagacgtgatgccgctctcaaagccggtaacaagcacaacaccaacacagctactcctttctgcaatagacagttgtctgatcagcaggacgaggagcgccgaaggcagctacgggagagggctaggcagctgattgccgaggcaagatctggagtgaaaatgagcgagttgccgagctacggagagatggccgcagagaaacttaaagaaagatcaaaagccagtggcgacgagaatgacaacattgagatagataccaatgaggaaatccccgaagggttcgttgtgggcggaggtgatgagttaactaatctggaaaacgacctggacacacccgagcagaatagtaaacttgtggacttgaaactgaaaaaattactcgaagtgcagcctcaggtggctaactccccctcttctgccgcacagaaggccgtaacggaatctagtgagcaggatatgaagtctggcactgaggacctacgcacagagagactgcagaaaacaactgagcgattcagaaaccccgtggtgttctctaaggattcgactgtgagaaaaacacaactgcagtcgttctcccagtatatcgaaaaccgccctgagatgaaacggcagcgtagtatccaggaagacacaaaaaagggaaatgaagagaaggccgctattaccgagactcagcggaagccaagtgaggatgaggtcctcaataaggggttcaaggatactagccaatatgtcgtcggcgagcttgccgctctcgagaatgaacagaagcaaatcgatacgcgagcggcacttgttgagaaacgattgagatacctcatggacacaggcaggaacaccgaagaggaggaagctatgatgcaagagtggttcatgctagttaacaagaaaaacgctctgatccgcagaatgaatcaactgagccttctcgagaaagaacacgacctggagagacggtacgaactgctgaaccgcgaacttagagcaatgctcgctattgaggattggcaaaaaactgaggcacaaaagagaagagagcagttacttctggacgagctggttgccctggtcaacaaaagagacgctcttgtgcgcgacttggatgctcaggaaaagcaagcggaagaagaagacgagcatctcgaacggacacttgagcagaacaaggggaagatggccaagaaggaggaaaaatgcgtgctgcagtag

SEQ ID NO: 28428 - DNA, 933 bp, synthetic construct
  misc_feature 1..933: note = Description of Artificial Sequence: Synthetic coding sequence
  source 1..933: mol_type = other DNA
atggccagcgtgtggaagcgtttgcagcgcgtgggcaagcatgccagcaaattccagtttgtggcctcataccaggaattgatggttgagtgcactaaaaagtggcagccggataagctagtggtggtttggacaagacgctcacgacgcaagtcatccaaggcacactcctggcagcctgggattaaaaacccttatcggggagtagttgtctggccagttccggagaatattgagatcactgtgacactgttcaaggatccccatgccgaggaatttgaagataaagaatggacttttgtcatcgaaaacgagagcccctccggaagacggaaagcgctggccacttcgtccattaatatgaagcagtacgctagccccatgccaacccagaccgatgtgaagcttaagttcaaaccattaagcaaaaaagttgtgagcgctgcactccagttttctctcagttgcatcttcctgagggagggcaaagcaaccgacgaggatatgcagtcacttgcaagcttgatgtcaatgaaacaggccgatattggcaacctggacgactttgaggaggataacgaggacgacgatgagaatagagtgaaccaggaagagaaggctgccaagattactgagctcattaacaaacttaattttctagacgaagcggagaaagacctcgccaccgtgaactccaatcccttcgacgatcccgacgccgcagagttgaatccctttggcgatcccgactcagaggagcctatcaccgagaccgcttcgccccgtaagaccgaggatagcttttataacaattcatacaatccttttaaagaagtgcaaactccccagtatctcaatcccttcgacgaaccagaggcatttgttaccatcaaggattcaccacctcagagtacaaaaaggaaaaatatctag

SEQ ID NO: 28429 - DNA, 234 bp, synthetic construct
  misc_feature 1..234: note = Description of Artificial Sequence: Synthetic coding sequence
  source 1..234: mol_type = other DNA
atggcatctgtttggaagaggttgcagcgagttgggaagcatgcaagtaagtttcagtttgtggctagttatcaggagctaatggtcgagtgtaccaagaaatggcagccggataagctcgtggtggtctggactcggcgaagtcgcagaaaatcatcaaaggcgcatagctggcagccaggaatcaaaaatccctaccgaggcgtggtcgtttggccagtccctgaaaattag

SEQ ID NO: 28430 - DNA, 3483 bp, synthetic construct
  misc_feature 1..3483: note = Description of Artificial Sequence: Synthetic coding sequence
  source 1..3483: mol_type = other DNA
atggccagtgtctggaagagactgcagcgggtgggcaagcacgcttccaaatttcagtttgtggcttcataccaggaacttatggttgaatgtacaaagaaatggcagcccgataagcttgtggtggtgtggaccaggaggagccggcgtaagtcctctaaagctcattcctggcaaccaggaatcaaaaatccgtacagaggagtcgttgtctggccggttccagaaaatatcgagataactgtgaccctgtttaaggatccccacgcagaggaatttgaggacaaagagtggacattcgtaattgagaatgaatctccatccggcaggcggaaggctctcgctacatccagcattaatatgaagcagtacgccagccccatgcccactcagaccgatgtgaagttaaaatttaaaccgctttccaaaaaggtagtctctgccgctctgcagttcagtctgtcctgcatcttcctgagggaagggaaggccaccgacgaggacatgcagtctcttgcgtccctgatgagcatgaagcaagcagacatagggaacctcgacgatttcgaggaggacaacgaagatgacgacgagaacagagtgaaccaagaggagaaggcagctaagattaccgagctgataaataagcttaactttctggacgaagcagaaaaggatcttgctactgtcaattctaatcccttcgacgatccagatgcggcagagctcaatccattcggcgatcccgattccgaggagcccattactgaaacagcgtctccgaggaagactgaggacagcttctataacaacagctacaacccttttaaagaggtccagacgccacagtacctgaatcccttcgacgagccagaggctttcgtgaccattaaagacagccctccccagtcgaccaagagaaaaaacattaggcccgtcgatatgtcaaagtacttgtacgctgactctagcaaaaccgaagaggaggaactggatgaatccaatcctttttacgagcccaagtccacacccccaccaaataatcttgttaatcccgtgcaagagctggaaacagaacggagggtgaagcgcaaagctcctgcgcctcccgtgctgtctcctaagaccggtgtgctcaacgagaatacagtgtccgccggaaaagatctaagcacatccccaaagccatcacccatcccatccccagtcctgggcagaaagcctaatgccagtcagtctctcctcgtgtggtgcaaggaggtcaccaagaattaccgaggagttaaaattaccaatttcactaccagctggcgaaacgggttaagcttttgcgcaatcctccaccacttccggccagatctcatcgattacaaatccttgaatcctcaggacatcaaggagaataacaagaaagcctacgacggattcgcaagtataggcatttccagactgttggaaccttcagacatggttcttctggcaatcccagacaaacttaccgtgatgacttacctgtaccagattagggcgcacttctctggccaggaactaaacgttgtgcagatcgaggaaaattcctcaaaatctacatacaaggtgggcaactatgagactgatacaaatagttcagttgaccaagaaaagttttatgctgaattaagtgaccttaagagagagcccgagctccaacagcctattagcggggctgtggacttcttgtcccaggatgattctgtctttgtgaacgattcgggagtaggcgagagcgaaagtgagcatcagacacccgatgaccacctcagtccctcgacagccagcccttactgccgccgaacaaaatctgataccgaaccacaaaaatcgcagcagagtagcggcaggacttccggtagcgatgatcccggaatctgtagcaacaccgacagtacccaggcccaggtactgttgggtaagaaacgtctattaaaggcagaaacactggaactctcagatctgtacgtgagcgacaaaaagaaagatatgagccccccttttatctgcgaagagaccgatgagcagaaacttcagacactggatatcggcagtaacctcgagaaagagaaactggaaaattcgcgttctctggagtgccggagtgaccctgagagccctattaaaaagacctcccttagcccaacctctaagctgggttatagttattcaagagacctggatcttgctaagaaaaaacatgctagcctcagacagacggaatccgatcccgacgccgatcgaacaaccttaaaccatgccgatcacagcagcaagattgtgcagcatcgcctcctgtcccgccaggaggagcttaaagagcgcgctcgcgtgctgttagagcaggcacggcgagatgccgctctgaaagctggcaataagcataatacaaatactgcaaccccattctgcaatagacagctgtcagaccaacaggacgaagagagaaggcgtcagctcagggaacgagcacgtcagctcatcgctgaagcacgctctggcgtcaagatgtctgagctcccgtcttatggagagatggccgcagagaaacttaaagagagatctaaggcttctggggaacagaactccaaacttgttgatcttaaactcaagaaactgctcgaagtgcaacctcaggtggccaacagcccatcttcggccgcacagaaggctgtgacagaatcttcagaacaagacatgaagtctggaacagaagacctgcggaccgagcggttgcaaaagaccaccgaacggtttagaaatcctgttgtattctccaaggacagtacagtcaggaagactcagctgcaaagtttcagccagtacattgagaaccgaccagagatgaaacgtcaacggagcattcaggaagacactaaaaaaggaaatgaggagaaggctgcaattactgaaacacagaggaagccaagtgaagacgaagtgctgaataaaggttttaaagatacctcccagtatgttgtcggggagctagcagccctcgaaaatgaacaaaaacaaatagatactcgcgcagctcttgtggagaagcggctaagatacttgatggatacaggcaggaacacagaagaggaggaagccatgatgcaggaatggttcatgctcgtgaataagaaaaacgccctgatacggaggatgaaccagctgtccctgctggagaaagagcatgatctagagcggagatacgagctgttgaaccgcgagctgagagccatgctcgctatcgaagattggcagaaaactgaggcacagaagaggagggaacagctcttgttggacgaactggtggctctcgtgaacaaaagagatgcactggtcagagatcttgacgcacaggaaaagcaggccgaggaggaggatgagcacctggagcgcacattggagcagaataaagggaagatggctaaaaaggaagaaaagtgcgttcttcagtag

SEQ ID NO: 28431 - DNA, 609 bp, synthetic construct
  misc_feature 1..609: note = Description of Artificial Sequence: Synthetic coding sequence
  source 1..609: mol_type = other DNA
atgaagcgacagcggtctatccaggaagacacgaaaaaaggcaatgaggaaaaggccgcaatcaccgaaacccagagaaaacccagcgaggacgaagtgcttaataaaggcttcaaagatacatctcaatatgtcgtcggggagctggctgcgttagagaacgaacaaaaacagatcgatacacgcgctgccctggtcgagaaacgcctccggtacctcatggataccgggaggaacacggaggaagaggaggcaatgatgcaggagtggttcatgctggttaataagaagaacgctctcattaggaggatgaaccaactgtcacttttagaaaaggagcacgatttggagcgacgctatgagctgttaaaccgagagttacgggcaatgctcgcgattgaagattggcagaaaactgaagcgcagaagaggcgggagcagctgcttctggacgagctcgtcgctctggtaaacaagcgcgacgccctcgtgcgggaccttgatgcccaggaaaaacaggccgaagaagaggacgagcacctggaacgtacgctcgaacagaacaagggaaaaatggcgaagaaggaagagaagtgtgttctccagtag

SEQ ID NO: 28432 - DNA, 1287 bp, synthetic construct
  misc_feature 1..1287: note = Description of Artificial Sequence: Synthetic coding sequence
  source 1..1287: mol_type = other DNA
atggacccctccgtaactctgtggcagtttctgctccagctactgcgagagcaaggcaatggccacatcatctcgtggacctctagagatgggggagagtttaaactggtcgatgcagaagaggtggctcgtctctgggggctgcgcaaaaataagacgaacatgaattacgacaagctgtcccgtgccctaagatactactatgacaaaaacattatccggaaggtgtcaggacagaaatttgtgtacaaatttgttagttacccagaagtggctggttgtagcacggaggactgtccgcctcaacccgaggtctccgtgaccagcacaatgccaaatgtcgccccagccgctatccatgcagccccaggggatacggtgagcggtaagcccggtactcctaaaggtgccggaatggccggacctggaggtctcgctcggtcatcacgtaatgaatatatgcgatctgggctgtactccacctttacaatccagagtttgcagcctcaaccgccaccacacccaagacccgctgtcgtgttgcccagcgctgcccctgcaggtgcagccgctccccctagtgggagtagaagcaccagcccttctcctctagaggcttgcctggaggcagaagaggctgggttgccactgcaggtaatcttgacaccccctgaagcccctaacttgaagtctgaggagctgaacgtagagcccggactagggagagcattgccacccgaagtcaaagtggagggccctaaagaagaactggaagtcgctggtgagaggggatttgtccccgaaacaaccaaagcggaacctgaggtccccccacaagagggggtgccggctagactgccagcagtggtcatggacacggcagggcaggcgggagggcacgcagcttcgtccccggagatctcacagcctcagaagggcagaaagcccagggacctggagctccctctcagcccctcgctgctaggcggtcctggaccagagcgaactcctggttctggctccggctcaggcttgcaggctccaggtccagccttaactccctccctgctgcccacccacactcttaccccagttcttctaacgccttccagcttgcctcctagtattcatttctggtctaccctgtcccctattgcaccacggtcaccagcaaagcttagtttccagtttccctctagcggctcggcgcaagtccatattccctctattagcgtggatggcctttcgacccctgtggttctgtccccagggcctcaaaagccctag

SEQ ID NO: 28433 - DNA, 288 bp, synthetic construct
  misc_feature 1..288: note = Description of Artificial Sequence: Synthetic coding sequence
  source 1..288: mol_type = other DNA
atggaccctagtgtcacactgtggcaatttcttctccagctcctacgtgagcagggtaatggccacatcatatcctggacatccagagatggtggcgaattcaagctggtcgacgcagaagaggttgctaggctgtggggtctgcgcaaaaataaaaccaatatgaactacgataaattgagtagggccctgcggtattactatgacaagaacatcattcgaaaagtgtctgggcagaaatttgtatataagttcgtcagctaccctgagagtcactgtgcaccgtag

SEQ ID NO: 28434 - DNA, 1287 bp, synthetic construct
  misc_feature 1..1287: note = Description of Artificial Sequence: Synthetic coding sequence
  source 1..1287: mol_type = other DNA
atggacccaagtgtgacattgtggcagttcctgttgcaattgttgcgggagcagggtaatggccacatcatctcttggacctccagagacggcggagagttcaaactcgtagatgctgaggaggtcgcaagactgtggggtcttcgaaaaaataagaccaacatgaactatgacaaacttagtcgcgctttgcgctactattatgacaagaacatcatccgcaaggttagcggacaaaaattcgtatacaaatttgtgagttacccagaggtggccggatgcagtactgaagactgccctccacagccggaggtttccgttaccagtacgatgcccaacgtggcccctgcagccatacatgccgcaccaggcgatactgtctcggggaagcctggcacacctaaaggggcagggatggctggtccaggaggactggctcggagttcacggaatgagtatatgcgcagcgggttgtactccacattcactatacagtctcttcaaccacagccgcctccacatcccaggcctgcggttgtactgcctagcgctgctccagccggtgctgcagccccaccgagtgggtcccggagcacctccccatcacctcttgaggcttgtttggaggctgaggaagctggactgcctctgcaagtaatactcacaccaccggaagcccctaatcttaagagcgaggaattgaacgttgagccgggtttgggtcgagccttgcctcccgaggtgaaggtcgagggacctaaggaggagctagaggtggcaggggagagaggctttgtgcccgagaccacgaaggctgagccagaggtcccaccgcaagagggggtaccagccagactccccgctgtggtcatggacacagctggacaggccggaggacacgctgcatcaagtcccgagatctcccagccgcagaaaggtcgtaagcccagggacctggagttgcctctgtcacctagtctgttgggcggtcccggacccgagcgcacccccggaagcggaagcgggtcaggactgcaggccccagggcctgccttgactccttccctcttgccgactcatacactcacccccgttctgctgaccccttcgagcctacccccatctatacatttctggagcactctctctcccatagcccctcgcagcccagctaagttatccttccagtttcccagcagtggatcagcgcaggtccacattccctcaatcagtgttgacggactgagcacaccagtcgtgttgtcacctggccctcagaagccttag

SEQ ID NO: 28435 - DNA, 366 bp, synthetic construct
  misc_feature 1..366: note = Description of Artificial Sequence: Synthetic coding sequence
  source 1..366: mol_type = other DNA
atggatacggcaggacaagctggcggtcacgcagcaagttctccggagatctcgcagccccagaagggcaggaagcctcgcgatctggaactacccctgtctccatccctattgggaggcccaggaccggagcggacccctgcactgttacctacacatactcttacccccgtattgttgaccccctcgtcactgccaccctccattcacttctggagcacactgagccccatcgcccctagatctccagctaagcttagtttccagttcccgtcttccggatctgcacaggtgcacatacctagcatttccgtggatggattgagcaccccagtcgtgttgtcgcctgggcctcagaaaccatag

SEQ ID NO: 28436 - DNA, 1713 bp, synthetic construct
  misc_feature 1..1713: note = Description of Artificial Sequence: Synthetic coding sequence
  source 1..1713: mol_type = other DNA
atgagcgagcagagtatttgccaggcccgtgccgctgtgatggtctatgacgacgctaataagaaatgggtgcctgctggagggtctacaggattctcaagggtgcacatataccaccatactggtaataacacctttcgcgtcgtggggaggaaaattcaagatcaccaggtcgttattaattgcgccatccccaaggggctgaagtataatcaagcgactcagacctttcaccagtggcgagatgccagacaagtgtacggattgaacttcggcagtaaggaggacgcaaatgtctttgcttccgccatgatgcacgcgctggaggtgttaaacagccaggagaccggaccaaccctcccgagacagaatagccagctgcctgctcaggtccagaatgggccaagtcaggaggagctggaaatacagcggcgacagctgcaagagcaacagcgccagaaggaactggagcgcgaacggttagagagggagagaatggaaagagaacgtctggagcgcgaacggctggaacgagagagattggaaagagaaagactcgagcaagaacagctggagagagaaagacaggagagagagagacaggagcgtttagagcgccaggagcgactggagcgccaggaaaggctggagaggcaggagcgactcgaccgtgaaaggcaggagaggcaggagagagagcgactggagaggctcgagcgagaaagacaggaaagagaaagacaggagcagctagaacgcgagcagcttgagtgggagagagaaagacggattagtagcgcagccgctccagcttctgttgaaacaccactcaatagcgtactgggcgactcatcagcctccgaacccggactgcaagccgcaagtcaaccagcagagactccctctcaacagggcatcgtgcttggccctctggcgccaccgccacccccacctctaccaccgggacctgctcaggcctccgttgcccttccaccaccccctgggccacctccccctccaccattaccctctaccggccctcctccccctccccctccaccaccgttgcccaaccaggtgccaccccctcccccaccccctcctgccccacctctgcccgcaagcggttttttcctggcgtctatgagtgaagacaataggccgctgacaggactggctgccgcaatcgctggcgcaaaattgcggaaggtcagtaggatggaggatacctcctttccatcaggcggtaacgctatcggcgtcaattccgctagttcaaagacagacactgggagaggcaatggtccgttaccattgggcggtagcggactgatggaggaaatgtcagccctgctggcccgtcgtcgcagaatcgccgagaagggcagcactattgaaaccgagcagaaggaagacaaaggggaagatagcgagcccgtaacctccaaggcatcctccaccagcaccccagaaccgacacgcaaaccttgggaacgtactaatactatgaatggaagcaaatcccctgtgattagccggcctaagtctacaccactcagccagcctagcgcgaatggcgttcagactgaggggctggactatgataggctcaaacaggacatacttgatgaaatgaggaaggaactgacgaaactgaaagaagaattgattgacgcaatccgacaggagttatccaagtcaaacaccgcatag

SEQ ID NO: 28437 - DNA, 1776 bp, synthetic construct
  misc_feature 1..1776: note = Description of Artificial Sequence: Synthetic coding sequence
  source 1..1776: mol_type = other DNA
atgtctgaacagagtatctgccaggccagagccgcagttatggtgtacgatgatgctaataaaaaatgggtacccgctggcggaagtaccggattttctcgcgtccatatctaccaccacaccggcaacaataccttccgggtcgttgggagaaagatccaagaccaccaggtggtgatcaattgtgccatcccaaaaggcttaaaatataaccaggcaacacaaacatttcaccagtggagagatgcacgacaggtgtacggtctgaattttgggtccaaggaggacgcaaacgtgttcgcttcagcaatgatgcacgccttggaagtgttgaattctcaggagacaggcccaactttgccaaggcaaaactctcagctccccgctcaagttcagaatgggccaagccaagaagaattggagattcaacggaggcagctccaggagcaacagcggcaaaaagagctggagcgggagagattggaacgggaaagaatggagagagaacgactcgagagagaaagactcgagcgagaacgcttggagcgggagcgtctggaacaggaacaactggagcgtgagcgacaggagcgggagcggcaggagagactagagcgccaggaacgcctagaacgacaggaacgactggaaaggcaggagcgcttggatagggagcggcaggaacgccaggaaagagagcggctcgagaggctcgaacgcgagcggcaggagagggagaggcaggagcagctagaaagagagcaactggagtgggaaagagaacgaaggatatcctctgctgccgctcctgcttctgtagaaacaccactgaattccgtgctgggtgactcctctgcttccgaaccaggacttcaggcagcgagccaaccagccgagacaccgtcccagcaaggcattgtgttggggcctctcgcccctccccctcctcctcctttgcccccaggacccgctcaggcctctgtcgccctgccgcctcctccaggacctcccccacccccaccacttcccagtactggtccaccacccccaccgccaccccctccgctgcctaaccaagtgccccctcctcccccaccaccccctgcccctccccttccagcgtccggcttctttttggcgtcaatgagcgaagataatcgcccactaacagggctggccgcagccatcgccggtgccaagctccggaaggtgtcacggatggaggatacctctttcccatctggcggtaatgctatcggcgttaattcggccagcagcaaaactgacaccggtagagggaacggcccactaccgctcggcggaagcggtctaatggaggaaatgtctgccctgctggccaggcgccgaagaattgccgagaaggggtccacaatcgagacagagcagaaagaggacaaaggagaggatagtgaacccgtaacctctaaagcgtcgtccacaagcacgccagagccaacgcggaagccctgggagagaacgaatacaatgaacggaagcaagtcaccagtcatcagtaggagagattcacctcgaaagaatcaaatcgtttttgacaatcggtcctatgattccctgcaccggcctaagtccactccacttagccagccctcagcaaacggagttcagaccgaggggctggactacgaccggctgaagcaggacattctggatgaaatgcgcaaggaactgactaagcttaaggaggaacttatagatgctataagacaggagctcagtaagtcaaacacggcctag

SEQ ID NO: 28438 - DNA, 1599 bp, synthetic construct
  misc_feature 1..1599: note = Description of Artificial Sequence: Synthetic coding sequence
  source 1..1599: mol_type = other DNA
agcgagcaaagcatctgccaagcccgagccgctgttatggtgtatgatgatgccaacaagaaatgggtgcctgcgggaggaagcacagggttctctagggtgcacatttaccatcacacgggcaataacacttttagggtagtggggaggaagatccaggatcatcaggtagttataaactgtgctatcccgaaggggcttaagtacaatcaggccacacagaccttccatcagtggagggacgctcggcaggtgtacggactgaacttcggttctaaggaggacgccaatgtttttgcttccgctatgatgcacgctctcgaagtgctgaattctcaggagacaggaccgaccctgcccagacagaactctcagctcccggctcaggtgcagaatggtccttcacaagaggaactcgagatccagcgacgccagttgcaggaacagcagagacagaaagaattggagcgcgagcgcctggaacgcgagcgtatggagagagagaggctggagcgggaacgtctcgaaagggagcgcctggaacgcgaacgtctggagcaggagcagttggagcgggagcggcaggaacgggagcgccaggaacgactggagagacaggaaaggctggaacggcaggagaggttggagcgacaggagcggctggacagggagcgccaggagcgacaggaaagagagcgtcttgagcgtctggaaagagagcgtcaggaacgggagagacaggagcaacttgagcgggagcagcttgagtgggagcgtgaaagaagaatctccagcgctgggatagtgttggggccactggcgccacccccaccaccacccctgccacccggtccagcccaagctagcgtcgctctgccaccaccaccagggcctccccctcctcctcctttaccgagtaccgggccaccacctccacctccccctccaccgctcccgaaccaggtccctccccctcccccacctccgccagccccaccgctacccgcatcaggcttcttcctcgccagcatgagtgaggacaaccgccctttaacagggctcgcggctgcgatcgcgggagcaaaactgagaaaagtatcacgcatggaggataccagcttcccctccggcggtaatgccattggagttaactcagcaagctccaagactgacaccggcaggggcaatggccctctgcccttagggggttcaggcttgatggaagaaatgagcgccctgctagcgagacgtcggaggatagcagagaaagggagtactatcgagacggagcaaaaagaagacaaaggtgaggacagcgagccagtcacatcaaaggcctcctcaacatccacacccgaaccgacgcgcaagccctgggagaggactaacacaatgaacggcagcaaatctccagtaattagtcggccaaaatccacacccttgtcccagccttcagcaaatggtgtgcaaacagaagggctggactacgaccgattgaagcaagatatcttggatgagatgcgaaaagaactgaccaaattgaaagaagagttgatcgacgccataagacaggagttgtccaaatccaacactgcatag

SEQ ID NO: 28439 - DNA, 1878 bp, synthetic construct
  misc_feature 1..1878: note = Description of Artificial Sequence: Synthetic coding sequence
  source 1..1878: mol_type = other DNA
atggatagaggcactctccccctggccgtcgctttgctcttagcctcgtgttcgctcagcccaacttccctcgccgaaactgtccactgcgacttgcagccggtgggccctgagagaggcgaggttacatacaccacctcccaggtctctaaaggatgcgtcgcgcaggcccctaacgctatccttgaagtgcatgtgttgttcttagaattccccaccggaccttcccaattagaactaactctccaagcatctaaacagaacgggacatggccaagggaagttctactggtgttgtcggtgaactcctctgtgtttttgcacctgcaggcgctgggcataccattgcatttggcctacaactcgtccctggttacttttcaagagcctcccggagtcaacactacagagttgccgtcatttccaaagacacagatcttagagtgggctgcggagcgcggaccaattacatctgctgccgagctaaatgatccccagtcaattctgctcaggctcgggcaagcacagggatcactctccttctgtatgcttgaggcttctcaagatatgggtcggaccttggagtggcggcctaggacccctgcgctggtgcgtgggtgtcatcttgagggcgtggctggccataaggaagcgcatatccttcgcgtgcttccgggacatagtgctgggccacggaccgtaaccgtgaaggtggaattgagctgcgccccaggagatctggatgccgtcttgattctccaaggcccaccgtatgtgtcatggctgatcgatgctaaccacaatatgcagatctggacaactggcgagtacagtttcaagatctttcccgagaagaatatccgaggttttaagctcccagatactcctcagggcctcctaggtgaagcgagaatgctgaacgcatctatagtggcctccttcgttgagctccccttggcctcaattgtttccttacacgccagtagctgcgggggacgactccaaacaagtcccgcaccgatccagacaacacccccaaaggatacctgtagccctgaacttttgatgtctctgatccagaccaagtgcgccgatgatgcaatgactcttgttctgaaaaaggagctcgtggcacacctcaagtgtactatcactgggttgacattttgggatcctagctgcgaggctgaggatcgcggagacaaattcgtgctgcgttctgcctatagctcctgcgggatgcaggtttctgcatccatgattagcaacgaagcagtagtcaatattctatcaagcagctctcctcagagaaaaaaggtgcattgtctgaacatggattcccttagcttccagctgggtctttacctgtcaccccatttcctgcaagcgagcaacaccatcgaacctggacagcagtcctttgttcaggtgcgtgtcagccctagtgttagcgagttcttgctacagctggattcctgccacctcgatttagggcctgagggcggaaccgtggagctgatccaagggagggctgccaagggaaactgcgtgagcctactgagtccctccccggaaggagatcccagattctcttttctactgcacttctacaccgttcccatcccaaaaaccggcaccctcagctgtactgtcgctcttcgtccaaaaactggaagtcaagaccaggaggttcaccggactgtcttcatgcgtctcaacattatttctccggatttgagtggctgtaccagcaaagggctcgtgctgcctgcggtgctcggcattacttttggtgccttcctgatcggagcactccttaccgcggctctgtggtacatctacagtcatactagggaatatccccgtcccccacagtag

SEQ ID NO: 28440 - DNA, 1977 bp, synthetic construct
  misc_feature 1..1977: note = Description of Artificial Sequence: Synthetic coding sequence
  source 1..1977: mol_type = other DNA
atggacaggggtactcttccactcgcagtggccctactgttagcatcgtgtagcctgtccccgacttccctggctgagaccgttcattgtgacttacaacctgtgggtccggaaaggggggaagtgacttatactacatcccaggtgagcaaaggttgtgtggctcaggctccaaacgctattctggaggtgcatgttctgtttctggagtttcctaccggacccagccagcttgaactgactctgcaagcatcaaaacagaacggaacctggcctcgtgaggtgctcctcgtcctaagcgtaaattctagcgtgttcttacacctacaagcgctggggatccctctgcacctcgcatataatagcagcctagtcacatttcaggaacctcccggtgtgaacacgacagagctccctagctttcctaagacacagattttagagtgggcagcagaaagaggacctatcaccagcgcggcagaactgaatgacccccaatcgatcctgttacgcctgggtcaagcgcagggctcactgtcgttttgtatgctcgaagcaagccaagatatgggaaggactctggagtggcgaccacggactcccgctttggtccggggatgtcacctggagggagtcgccggtcataaggaagcacacatcctgcgcgtcctgcccggtcactcggctggtcctaggactgtcaccgtaaaggtggaattgagttgtgcaccaggagacctggatgcagtgctgatcttacaggggccaccctacgtttcatggcttatagatgccaaccacaatatgcaaatctggactaccggcgagtatagctttaagatctttcccgagaagaacatccgaggattcaagctgcctgacaccccacagggactgctaggcgaggccagaatgctgaacgcaagcatcgtggcctccttcgtggagctcccactggcaagcatagtgagcttgcatgcaagttcctgtggaggccgtctgcagacaagtcctgccccaatacaaactactccacctaaagatacatgtagccccgagctgttgatgagcctgattcagactaaatgtgctgacgatgcaatgaccctggttctcaagaaagagcttgtggctcaccttaaatgcacgatcaccggattgacattctgggacccaagttgtgaggctgaagatcggggtgacaaatttgtgcttaggagcgcatactcatcttgtggaatgcaagtatcggcttccatgatctcaaacgaggccgtggtgaacattctcagttcttcatcaccacagaggaagaaagttcattgtctgaacatggatagtttatcatttcagctgggcctttatctctcaccccactttctgcaggcttctaacactatcgaaccaggacagcagagctttgttcaagttagagtgtcccctagcgtgtccgaattcctgcttcagctggattcctgccacctcgatctgggacctgagggcggtaccgtggagctgatacagggcagggccgctaaagggaactgtgtttcccttctgagcccctccccagagggcgacccccgattcagttttttgctacacttctatacagttccaatccctaaaacagggaccctgagttgtaccgtagcactccgacccaaaactggatcccaggatcaggaggtacacaggacggtctttatgcgactaaacatcatatcacctgacctttccggttgcacgtcaaagggactcgttctgcctgctgtcctcgggataacattcggtgccttcctgattggggctctgctcaccgccgctttgtggtatatctacagccacactcgctctccaagtaaacgcgagccagtcgtcgccgtagctgccccagcttccagtgagtcctcctctacgaaccatagcatcggatcgacacagagcacaccctgttccacatcttccatggcctag

SEQ ID NO: 28441 - DNA, 1977 bp, synthetic construct
  misc_feature 1..1977: note = Description of Artificial Sequence: Synthetic coding sequence
  source 1..1977: mol_type = other DNA
atggacagagggacacttcctcttgccgtggccttattactcgcctcctgctcgctgtctccgacttcactggcagagactgtgcactgcgacttacagcctgtaggacccgaacgcggagaagtgacctacactacctcacaagtgagcaagggttgcgtcgcccaagcaccaaatgcgattcttgaggttcatgtactctttctggagtttccaacgggaccttctcaactggagctcacactccaggctagtaagcagaacgggacttggcccagagaagtcttattggtcctgtccgttaactcaagcgtgtttctgcacttgcaggctttgggtatacctctccatttagcctacaatagctccctcgtaacattccaggaaccgccaggcgttaacacgactgaacttccatctttccccaaaacacagatcctcgagtgggcggctgagagagggcctattaccagcgcagcggagctgaacgatccgcagagcattctactcaggctggggcaggcacagggatctttgagcttctgtatgcttgaggcaagccaggacatgggtcgcaccctcgagtggcggcctaggacaccggctcttgtaagaggttgtcacctcgagggggtggccggtcacaaagaggcccatattttgcgggtactgccaggtcattccgccggacccagaacagtcacagttaaagtggagctttcttgcgctcctggcgatctggatgcagtgctgattctccaaggacccccttacgtgagctggcttatcgatgcgaatcacaacatgcagatctggaccactggggagtactccttcaagattttcccagaaaaaaatatcagaggattcaagctcccagatacccctcagggcctgttgggggaagccagaatgctgaatgcctctattgtggctagttttgtggagctgccactggcctccattgtttccctgcacgcctcttcctgcgggggacgtctgcagacttcaccagcgcctattcagaccaccccgcctaaagatacatgttccccggagctgctcatgtctcttatccaaaccaaatgcgctgacgacgcaatgaccctggtgcttaagaaagagttagtagctcacctcaagtgcacaattactggcctgaccttctgggatcccagttgtgaggccgaagaccgcggtgataaatttgtgttaagaagtgcttactcaagttgtggcatgcaggtgtcagcctctatgatatccaatgaagcagtggtcaatatcctttcttcatcctctcctcagaggaagaaagtccactgcctaaacatggatagtctgtccttccaactcggactgtacctttctcctcattttttacaggctagcaatactattgaacctgggcagcagagctttgtccaagttagagtgagcccttccgtgtctgaattcctgctccagctcgactcctgccatctcgacctgggaccagaagggggtactgtggaattaattcagggcagagccgcaaaaggaaactgtgtcagcctactgtccccctctcctgagggtgatccgaggtttagttttctactgcacttctatactgtcccgatccccaagacaggcactttgagctgcactgtcgctctgaggcctaagacaggaagtcaggatcaagaggtccatcgtaccgtgttcatgcgactcaacatcatcagtccggatctgtccggatgcacaagtaagggattagttcttcctgccgtgctcggcatcacctttggtgcattcctgattggtgccctgctgacagcagccctgtggtacatctacagccacacacggagccctagtaaaagggaacctgtcgtcgcggttgcagcgcctgccagcagcgaatcctcctccaccaaccacagtattggaagtacccaaagcactccttgtagcacctcatcaatggcttag

SEQ ID NO: 28442 - DNA, 1431 bp, synthetic construct
  misc_feature 1..1431: note = Description of Artificial Sequence: Synthetic coding sequence
  source 1..1431: mol_type = other DNA
atgctcgaggccagtcaggacatgggcaggacactggagtggaggcccaggacccccgcactcgtgcgaggatgtcatttggagggagtcgcaggccacaaagaggcccacatacttcgcgtcctacccggtcattcggctggcccacgcactgtcactgtcaaagtggagctcagctgtgcccctggagacctggatgcagttttgatcttgcagggacccccttacgtgtcgtggttgatcgatgctaatcacaacatgcagatctggactacaggcgaatattccttcaaaatctttcccgagaaaaatatcagaggtttcaaactgccagacacgccccagggcctgctcggggaagctcggatgttgaacgcaagcatcgttgcttcatttgtagaactccccttagccagcatcgtcagcctgcacgcctctagttgtgggggacgcctacagactagtcccgcaccaatccagaccactccaccaaaagacacatgttcccccgagctgctcatgtcgctcattcagacgaagtgtgcagacgacgccatgaccctagtgctgaagaaagagctcgtggctcatttgaagtgcaccataaccggcctgaccttctgggatccttcctgcgaggccgaagacaggggcgacaagttcgttctgaggagcgcatattcctcctgcggcatgcaagtctcggcttctatgatttctaacgaggcagtcgtgaacatactgtcttcgtctagcccccagcgcaagaaagtccactgtcttaacatggattctctgtccttccagctggggctttacctctctccacacttcctgcaggcatccaataccatagagccgggacagcaatcgtttgtgcaggtgcgggtgtccccttccgtcagcgaattcctgttacagctcgactcctgtcacctggacctcgggcctgaaggaggcacagtcgagctcattcaaggtcgcgctgccaaaggtaattgtgtgtctctgctctctccgtctcctgagggagaccccagattttcgtttctcctgcatttctataccgtaccaattccaaaaaccgggacattgtcctgcaccgtcgccctcagacccaagactggcagccaggatcaagaagtccatagaacagtcttcatgcgcctgaacatcatatcgccagatctgtctggatgcacatccaaaggcttggtcctccccgcagtgctgggcattacatttggtgcgttcctgatcggtgctctcctcacagcagctttatggtacatttactcacacacccgcagccccagtaagagggaacctgtggtcgcagtagcagccccagcttcctcagagtcatccagcaccaaccattctattgggtctacgcaaagcaccccatgtagcaccagtagtatggcttag

SEQ ID NO: 28443 - DNA, 639 bp, synthetic construct
  misc_feature 1..639: note = Description of Artificial Sequence: Synthetic coding sequence
  source 1..639: mol_type = other DNA
atggattatctgctgatgatattctcgctcctcttcgtggcatgccagggcgcacccgagactgcagtgctgggagcagaactatcagccgtcggcgaaaacggcggagagaaacctaccccttcgccgccttggcggctgcgcaggtcaaaaagatgctcctgctcatcgctgatggataaggagtgcgtttatttctgccatctagatattatctgggtgaatacccccgaacatgttgtgccctacggtcttgggtccccacgatcaaaaagggcgctcgagaaccttcttccaaccaaggcaaccgacagggaaaatcgatgtcaatgtgccagtcaaaaggacaagaagtgctggaacttctgccaagctggtaaagagctcagggccgaggatatcatggagaaggactggaacaaccataaaaagggaaaggactgcagcaagctgggtaagaagtgcatctaccagcaacttgtgcgaggcaggaaaatcaggcgaagcagcgaagaacatctacgacagacacggagcgaaacaatgcgtaactcggttaagagcagtttccacgaccccaagctgaaaggcaagccttcacgcgagcgctatgtcactcataacagagctcactggtag

SEQ ID NO: 28444 - DNA, 1329 bp, synthetic construct
  misc_feature 1..1329: note = Description of Artificial Sequence: Synthetic coding sequence
  source 1..1329: mol_type = other DNA
atgcagcccccaccaagcctgtgcggcagggctctggtcgcacttgtactggcctgtggtctgtcccgtatctggggggaggaacgcggttttccaccggacagagccactcccctgctgcaaactgcagaaatcatgactccccctactaagaccctttggcctaaaggctccaacgcttctctcgctcgatccctggcccctgccgaggtgcctaaaggcgacagaaccgccggatcccctccgagaactatatctcccccaccatgtcagggcccaattgagattaaagagacgttcaaatatatcaacaccgtggttagctgcctggtcttcgtcctcggcatcattggcaactctacactattgcggatcatatataaaaataaatgtatgaggaacggaccgaacatcctcatagcgagcctcgctcttggggacctgttgcacattgtgatagacatccctataaacgtatacaagctgctagcggaagattggcctttcggggcagaaatgtgtaagctggtcccattcatccagaaagcatctgtagggataactgtactctccctatgtgctctctccatagatagatatagggccgttgcttcctggtcccggatcaaggggattggcgtgccgaaatggaccgcagtcgagatcgtgctcatctgggtggtctcagtagtgctagcagtgccggaagctattggcttcgatattatcaccatggattataagggatcgtacctgagaatttgtctgcttcatcccgtgcagaagacagcgttcatgcagttctataagacggccaaagactggtggctgttcagcttctacttttgtctgccactcgccatcacagcttttttctatacgctgatgacgtgcgaaatgcttagaaaaaaatctgggatgcagatcgctctgaacgatcacctgaagcagcggagagaggttgcgaagacagtgttctgtctggtgctggttttcgcactgtgttggctgccactccacctaagtagaattttaaaactgacactctacaaccagaatgaccctaataggtgtgagctgctgagctttctcctcgttctcgactacattggaatcaatatggctagcctgaattcgtgcatcaaccctatagccctgtacctggtcagcaaacggttcaaaaattgcttcaaatcttgcctctgttgttggtgccaatcattcgaagaaaagcagtctctggaagagaaacagagctgcttgaagttcaaggctaatgaccatggttatgacaatttccgttcgtcgaataagtattcttccagctag

SEQ ID NO: 28445 - DNA, 1599 bp, synthetic construct
  misc_feature 1..1599: note = Description of Artificial Sequence: Synthetic coding sequence
  source 1..1599: mol_type = other DNA
atgaacaagtctacctgtttgatggccgctgagacaccctccaaaagatggcggctccattgcctcgcattttcccaaagattcgtcagggccggtcccgcatgcagctcgagagaggcctgctcttcaccaagggccggatggaatcctgccggattcagactccccggacggtggtcaccattcgtggccctgcacttagtgtgccagatacgggaggccctcaagcttcgatccggccataggaccccctccggtgcagggtccagcatgcagcctcctccttcactatgcggcagagccctcgttgcgctggtgcttgcctgcggtttgtcaaggatctggggcgaagaacggggatttcctccggatagggctaccccactcttgcagacagccgagatcatgacccccccaactaagacactgtggcctaagggatctaatgcctcactcgctagatcacttgccccagcagaagtacccaagggggacaggaccgcgggttccccacccaggaccatttcgcctcctccctgccaaggcccaattgagattaaagagacttttaagtacatcaacacagtagtgagctgtttggtgttcgtgctcggtattattggcaattccacattgctgcgcatcatctacaagaataagtgcatgagaaacggcccaaacattcttatcgcgtcccttgcgttaggcgatctcttacacatcgtcatcgacatcccgatcaatgtgtacaaactgctcgccgaggactggccatttggggctgagatgtgtaagctggtgccttttattcagaaagcctctgtgggcattactgtgctctccttatgtgccttgtctattgatcggtaccgggctgtcgctagctggagtcgcatcaaaggaataggagtacctaaatggactgcagtggagatcgtcctgatctgggtcgtctctgtagtgctagccgtgccggaagcgatcggcttcgacattattacaatggattacaagggctcttacctccggatctgtctactgcacccagtgcagaaaacggctttcatgcagttttacaagactgccaaagattggtggctgttctcattttatttctgtctgccactggcgatcaccgccttcttctacactctaatgacatgtgagatgctgcggaagaagtccggcatgcagatagcccttaatgatcacttgaaacagcgtagggaagtggcaaaaacagtcttctgcctggtgcttgtgttcgccctatgttggctccccctccacctcagcagaatccttaaactcacactatataaccagaatgatccgaacaggtgcgagctgttgagttttctgctggtactggactatatcggcatcaacatggccagtctgaattcttgcatcaatcctatcgccctttatcttgtgagtaagcggttcaagaactgcttcaaatcctgcctctgctgctggtgtcagagctttgaagagaagcagtcactggaagaaaagcaaagttgcctcaaattcaaggcaaacgatcacggttacgataatttccgaagtagtaacaagtactcctcttcgtag

SEQ ID NO: 28446 - DNA, 1311 bp, synthetic construct
  misc_feature 1..1311: note = Description of Artificial Sequence: Synthetic coding sequence
  source 1..1311: mol_type = other DNA
atgcagccaccccctagtttgtgcggcagagcccttgtcgccttagtgctcgcctgcggtctgtctcggatctggggagaagagaggggattccctccagatcgagccacccctcttctgcagaccgccgagattatgactcctccgacgaaaacactgtggcctaaaggctctaacgcctcactagccaggtccctggcccctgccgaagttccaaaaggggatcgaactgcagggtctcctcccaggacaattagcccacccccttgtcaggggcctatcgagatcaaagaaaccttcaagtacattaataccgtggtttcttgtctggtgtttgtgctcggcattatcgggaactccaccttactgcgaataatctataagaacaaatgcatgcgcaatggacctaacatcctgattgctagtctcgctctgggagacctccttcacatagttatcgatattccgattaacgtgtataagctgctcgctgaggattggccgtttggcgctgaaatgtgcaagctcgttcccttcatccagaaagcttccgttggaatcaccgttttgtcactgtgtgccctcagcatagaccgctatcgtgctgtggcctcttggtctaggattaaggggatcggagtgcccaagtggaccgccgtcgaaatagtgctgatctgggttgtgtctgttgtgctggccgtgccagaggcaattggatttgacattataacaatggactataaggggagttacttgcggatctgcctgttgcaccccgtgcagaaaaccgcctttatgcagttctacaaaaccgccaaggactggtggctcttcagcttttatttctgcctcccgctggccattaccgcttttttttatacactgatgacgtgcgagatgctacggaaaaagagtgggatgcagatcgccctgaacgatcacctgaaacagcgacgggaggtggctaagacagtattttgcctggtgctggtattcgctctgtgttggcttcctttgcatctttctagaatcctgaagctgaccttgtacaaccagaacgatccaaatagatgtgaactattaagcttcctgctggtcctggactacattgggatcaatatggcttcattgaacagttgtataaaccctattgctctgtacctggtgtccaagcggtttaagaattgtttcaaggcgggaccacacgttgggaataaacttgtaatgctattttccgttaacatagagtgtgacggaacagtgaatcaaaatccaaccatgtggccggagaggaaatccaataataattag

SEQ ID NO: 28447 - DNA, 2787 bp, synthetic construct
  misc_feature 1..2787: note = Description of Artificial Sequence: Synthetic coding sequence
  source 1..2787: mol_type = other DNA
atggcccttcgccgactgggtgctgccctcttactcctacccctgctggcagcagtcgaggagactctcatggattcaactactgccaccgccgagctgggatggatggtgcatcccccttcagggtgggaggaagtatcgggatacgatgagaatatgaacaccatacggacataccaggtgtgtaacgtgtttgagtcttcacagaacaattggctcaggaccaaattcatccgcagaaggggggctcatcgcatccatgtcgagatgaaatttagcgtccgcgactgttccagcataccatcagttcctgggtcatgtaaggagacctttaatttgtattattacgaggccgactttgacagtgccaccaagacattcccaaactggatggaaaatccgtgggtcaaagtcgacacaattgctgccgacgagtcctttagccaggtggaccttggagggagagtgatgaaaattaataccgaagtccgcagcttcgggccagtgtctcggtccggcttctatcttgccttccaggattacggtggctgtatgtcgttaattgcagtcagagtgttctacaggaagtgcccgcgaatcatccaaaatggcgctatctttcaggagacactgtctggtgccgaatccacttctctggtggctgcacgaggctcatgcattgctaatgccgaagaggtggacgttcctattaagttatattgtaacggcgatggcgagtggctcgtgccaattgggcgatgcatgtgcaaagcaggtttcgaggcagtagaaaatggtacagtgtgtagaggctgtccttctggaacgttcaaagctaaccagggtgatgaagcgtgtactcactgtcctattaacagcagaaccaccagtgagggtgcaacgaattgcgtgtgccggaacggctactatcgggctgacctggatcctttggacatgccttgtaccaccatcccaagcgcccctcaggctgtgatcagctccgtgaacgaaacctccctcatgctcgagtggactcccccacgggacagcggcggaagggaagacttggtctacaatatcatctgtaagagttgcggttctggcagaggagcttgtacccggtgcggagataatgtgcagtatgcccctagacagttgggacttacagaacctcgcatttacataagcgacctgcttgctcacacacaatatactttcgaaattcaggctgtgaacggagtaacggaccagtctccctttagtccccaatttgcctctgtgaacatcaccactaatcaagccgctcccagcgctgtttctatcatgcaccaggtgtcaagaacagtagatagtatcaccctgtcctggagtcagcctgaccagcccaacggcgtgatcctggattacgaactgcaatactacgaaaaggagctcagtgagtacaatgcaacagcaataaagtcgcccacgaataccgtcactgttcaagggctgaaagcaggcgcaatttatgtgttccaggtgcgggctcggactgtggctgggtatgggaggtattctggcaaaatgtatttccaaacaatgacggaggttacacctggtatgaaaatctacatagaccctttcacgtatgaggaccccaatgaggccgtcagggaatttgccaaagaaattgatatctcatgtgttaagattgaacaggttatcggcgcaggggagttcggtgaggtgtgtagcggtcacctgaaactcccaggtaaacgggaaatcttcgtagccatcaagacactgaaaagtggatacacagagaaacagaggcgggatttcttgtcagaggctagcatcatggggcaatttgaccatccaaacgttatccacctggagggggtcgtgaccaaatctacgcctgtgatgattatcaccgaattcatggagaatgggtcattagacagtttcctgaggcaaaacgacgggcagttcactgtcatccaactcgtcgggatgttacgcggaatcgccgctggcatgaaatatcttgctgatatgaactacgtccacagggacctggcagccaggaatatactggtgaattcaaacttagtgtgtaaggtgtccgacttcggcctgtccaggttcctagaagacgacacgtctgatcccacatataccagcgcattaggcggtaagatccctatacgctggactgctcctgaggcaatacagtacagaaagttcaccagcgcatcagacgtctggagttatggcatcgtcatgtgggaagtaatgtcatatggcgaacgtccctattgggacatgactaatcaggatgtaatcaacgccatcgaacaggactataggctgcctccgccaatggattgcccttctgcactgcatcagctcatgctagattgttggcagaaagaccgaaaccatcgacccaagttcggtcagatcgttaatacgctggacaagatgatacgtaaccctaatagcctcaaggccatggccccactgagttccgggattaatcttcctctgctggacagaaccatccccgattatacatcttttaatactgtggacgagtggctggaagcaattaagatgggtcaatacaaggaatcgttcgccaatgctggcttcacaagcttcgatgtggtgagccagatgatgatggaggatatcctgcgggtgggggtgaccctggccggacaccagaaaaagatacttaactctattcaggtcatgcgcgcacaaatgaaccagattcaatcagtggaagtctag

SEQ ID NO: 28448 - DNA, 2841 bp, synthetic construct
  misc_feature 1..2841: note = Description of Artificial Sequence: Synthetic coding sequence
  source 1..2841: mol_type = other DNA
atgtgggttcctgtgcttgccctccccgtttgtacttacgccgagaccctaatggacagcacaacagcgaccgccgaactaggttggatggttcacccaccaagcggctgggaagaggtgagtgggtacgatgagaacatgaatactatccgcacataccaagtgtgtaatgtgttcgagtcctcacagaataactggctgcgcaccaagtttattcgcaggcgcggagcacataggattcatgtcgagatgaagtttagcgtgcgagactgttcatccatacccagtgtgcctgggagttgtaaagaaactttcaacctttactactacgaggcagatttcgatagtgctaccaaaactttccctaattggatggaaaacccctgggtcaaggtggataccatcgccgcagatgaatcgttttcccaagtggatttgggaggtcgcgtgatgaaaatcaatacagaagttagaagtttcgggcctgtgagtcgctctggattctatctggcctttcaggattatgggggatgtatgtctcttatcgctgtgcgggtgttctaccgtaagtgcccgagaataatacaaaatggggctatctttcaggagaccttgtccggggcagagagcacttcactggtggcagcgaggggttcttgtatcgccaacgcagaggaggtggatgtgccaatcaaactctactgtaatggcgatggagaatggctcgtgccaattgggaggtgcatgtgcaaggcgggttttgaagcagtggagaacggcacggtatgccgcggatgtccgtccgggacattcaaggccaatcagggggacgaggcctgtacccattgccccatcaactcaagaaccactagtgagggcgcaaccaattgcgtgtgtaggaatgggtactatcgggcagacctggatcctttggacatgccttgcaccaccatcccttctgcccctcaggccgtcatttcaagtgttaatgagacttccctgatgttggagtggacccctcctagggactccggaggaagggaggatcttgtgtacaacataatctgcaagtcctgcggtagtggcagaggagcttgtacacgttgcggagataacgtccaatacgcacccaggcagttaggactgacagagccacgtatatatatctcagacctgttagcgcacacccagtacacttttgagatccaagccgtgaacggagtaacggatcagtctcccttcagcccccagttcgcctctgtgaacatcaccacaaatcaagccgctccctccgcagtgtcgattatgcatcaggtctcacgcacagtggactcaatcacattgtcctggagtcaacctgatcagcctaacggagtgatcctagactacgagcttcaatactacgagaagcaggagctgagtgagtacaatgctacagccatcaagtcacctacgaacaccgtgacggttcagggactgaaagccggagccatatacgtttttcaggtgcgggctcgaaccgtggccggttacgggaggtactcaggcaagatgtacttccaaaccatgactgaggcagagtatcagacatctatacaggagaagcttccgctgattattggaagctctgctgcaggcctggtctttttaattgccgtagtggttatcgctatcgtgtgtaataggcggggattcgagcgagccgactccgaatacacagataaactgcagcattatactagcggccatatgacccctggtatgaagatatacattgaccctttcacttacgaggatcccaatgaggcggttagagagtttgcaaaggaaatagacatttcttgcgtcaaaattgagcaagtgattggagcgggagaatttggagaagtgtgctctggccacttgaaacttccaggcaagcgcgagattttcgtggcaataaaaactcttaaaagtggatacaccgagaaacagaggcgggacttcctgtccgaggcatctattatgggccagtttgatcaccctaacgtaatacacctcgagggcgtggtgaccaaaagcaccccggtcatgataataacagagttcatggagaatggatcccttgactcctttctgagacagaacgatggtcaattcactgtgatccagctggtgggcatgctgcggggtatagcagcaggaatgaagtatcttgcagacatgaattatgtccatcgggacctggctgcccgaaatattctggtgaactccaatctggtttgtaaggtcagtgattttggtctgagtcgatttctcgaggatgatacaagcgaccccacatacacttcggctttaggcggaaaaatacccatccggtggaccgcgccagaggccatacagtaccgcaagttcacatctgcctccgatgtgtggtcatacggtatcgttatgtgggaggtcatgtcttatggcgaacgcccatactgggacatgactaaccaagacgtcattaacgcaatagaacaagactacagactgcccccacccatggactgcccctctgccctgcaccagctcatgttggactgctggcagaaagataggaaccaccgcccaaagtttgggcaaatagtgaacacattggacaaaatgattagaaatcccaattcgctaaaggcaatggctccactctcttcgggaataaatcttcccttgcttgataggaccataccggactacacctccttcaatacagtggacgaatggctggaagcaatcaagatgggccagtataaagagagcttcgctaatgcagggttcacctcattcgatgtcgtgtcacagatgatgatggaatag

SEQ ID NO: 28449 - DNA, 2961 bp, synthetic construct
  misc_feature 1..2961: note = Description of Artificial Sequence: Synthetic coding sequence
  source 1..2961: mol_type = other DNA
atggctttacgccgactcggcgcagctctgctgcttctgccgctgttggcagccgtggaagaaacgcttatggattctaccactgctactgccgagctgggctggatggttcaccccccttccggatgggaggaagtgtccggatatgatgaaaatatgaacacaattcgcacctaccaggtttgcaacgtgttcgaatcttcgcagaacaattggctgcgcacgaaattcatacgacgacgaggagcccacagaattcatgtagagatgaagttttccgtgagggactgttccagcatcccatcggtgccgggaagctgtaaggagacctttaacctgtactattatgaagccgatttcgatagtgctaccaagacattcccaaactggatggaaaacccttgggtcaaggtcgatactatcgctgccgatgagtctttcagccaggtggacctgggcggacgagtgatgaagatcaacacagaagtccgatcatttggcccagtatctagaagtggcttctacctggccttccaggattacgggggatgtatgtcacttatcgccgtccgcgtgttctacaggaaatgcccacgtatcattcaaaatggcgctattttccaggagactctgagcggggctgaatccacctcccttgtcgctgcccgaggttcttgcatcgccaatgccgaagaggttgatgtgccaataaaactctattgcaatggcgatggcgagtggctcgtgccaatcgggagatgcatgtgcaaggcaggcttcgaggccgttgagaacggcaccgtttgccgcggatgcccgtcaggaacattcaaagcgaaccaaggagacgaggcctgcacccactgcccaatcaattcccggacaacaagcgaaggtgctactaattgcgtgtgcagaaacggttactatcgggcagacctagaccctctcgatatgccctgtacaaccatacccagcgcacctcaagcagtgatttccagcgtcaacgaaacttctctgatgttggagtggacacccccacgcgattcaggcggtcgcgaggacctggtgtacaacataatatgtaaatcctgtggctctggaagaggggcatgtaccaggtgtggcgacaatgtgcaatacgctccccgacagcttggactgactgagccacggatctacatctccgacttgctggcacatacacagtacacgttcgagatccaggcggttaacggcgtcacggatcagagcccattttcccctcagttcgcatccgttaatataaccacgaatcaggccgcaccaagtgcagtatctatcatgcatcaagtctctaggaccgtagacagtatcacactaagctggtcccaacccgaccagcctaatggcgtgattctcgattatgaactccaatattatgagaaggaattgagcgaatacaatgccaccgctatcaagtcccccactaataccgtcaccgtccagggcctgaaggcgggtgcaatatacgtatttcaggtgagggcacgcactgtggccggatacgggagatatagcggcaagatgtactttcagacgatgactgaagctgaatatcagacgtctattcaagagaagctgcctctgatcattgggtcctctgccgcaggacttgtcttcctgatcgccgttgtggtcatagccattgtctgcaaccgccgtgggttcgagcgcgcagacagcgaatatactgataaactgcagcattatacatcaggccacatgacacctggaatgaaaatatatatagacccatttacatatgaagatcctaacgaggcggtccgagagttcgctaaggagatcgacatctcttgtgtcaagatcgagcaggttattggagccggagaatttggagaggtgtgttcaggccaccttaagctgccaggaaagcgggagatcttcgtcgccatcaagactctcaagagtggatatacagagaagcagcgcagggactttctgagtgaggcaagcataatgggacagtttgatcaccctaatgtgattcatctggagggcgtggtgaccaagtctacgccagtcatgattataactgaatttatggagaacggatcactcgattcctttcttagacagaacgatggacagtttaccgtcattcagctggtgggcatgctgcgtggcattgctgcaggtatgaagtacctggccgatatgaactatgtccatcgggacctggccgcacgaaatatcctggtgaacagcaatttggtgtgcaaagtgtcggattttgggttgagccggtttctggaggacgacacctctgatcccacgtacactagcgccctgggaggcaaaattccaattcgctggaccgcccctgaggcaatacagtaccgaaaatttacctccgcctctgacgtgtggtcttacgggatcgttatgtgggaggtcatgtcctatggggaacggccttattgggacatgactaatcaggacgtcatcaatgccatcgaacaggactatcggctgcccccaccaatggattgcccatctgctctccaccagctaatgttagactgctggcagaaggatcgaaatcaccggcctaaatttggtcagattgtgaatactttagataagatgatccggaaccctaactctcttaaggctatggcacctctctcaagcggcattaatctaccactcctggacagaaccattcccgattataccagcttcaataccgtcgacgaatggctggaggctattaaaatgggccagtacaaggaaagttttgctaatgcagggtttacttcttttgacgtcgtgtctcaaatgatgatggaagacatcctgagagtgggcgttactttagctggacatcaaaagaagatcctaaactccatccaggtcatgcgagcgcagatgaaccagatacagtcagtggaggtgtag

SEQ ID NO: 28450 - DNA, 2964 bp, synthetic construct
  misc_feature 1..2964: note = Description of Artificial Sequence: Synthetic coding sequence
  source 1..2964: mol_type = other DNA
atggcccttcggagactaggggctgctctcttactcctacctctgcttgccgctgtagaggagacactgatggactccaccaccgctactgccgaactggggtggatggtgcaccctccctctggatgggaagaggtgagcgggtatgacgagaatatgaataccatcaggacgtaccaggtgtgcaacgtctttgaatctagccagaataactggctgcggaccaaattcattcgcagaagaggcgctcatcggattcacgtagagatgaaatttagcgtcagagattgctcatccattccatccgtgcccggatcttgtaaggagacattcaatctgtactactatgaagctgacttcgattctgccacgaagacctttcccaattggatggagaacccatgggtcaaggtcgacactatcgcagctgacgaatcctttagccaggtagatttagggggtcgcgtgatgaaaatcaacaccgaggtcaggtcttttggccctgtatccagatcaggtttctatctggccttccaggactatggcggttgcatgagtcttattgccgtgcgcgtgttttaccgcaaatgccccagaatcatccagaacggtgccatatttcaagagaccttgagcggcgcagagagtactagcttggttgctgcccgaggatcctgtatcgccaatgctgaggaggtcgacgtccccatcaagttatattgcaacggggatggagaatggctggttcctattggccgatgtatgtgcaaagcgggtttcgaggccgtggaaaacggcacagtgtgtcgaggttgcccaagtgggacgtttaaagcgaatcagggtgacgaagcctgcactcactgtcccataaatagccggactacatcagagggcgctaccaactgtgtctgtaggaacggctactatcgggcagacctagatccattagatatgccctgcaccacgatcccaagcgcaccccaggctgtcatatcatcggtgaatgagacatcactgatgctcgaatggacacctccacgcgacagcgggggaagagaggatctcgtgtacaacatcatatgcaagagctgcgggtctggaaggggtgcctgtactcgatgcggcgacaatgtgcaatacgcccctcgccagttgggcttgactgagcctagaatttacatcagcgatcttcttgctcacacacagtacaccttcgagatccaagcggtaaatggggtcactgatcagtcccccttctccccccagttcgcttcagtaaatattaccaccaatcaggctgcaccatcagctgtgagtatcatgcaccaggtgtcaagaaccgtagattctattacattatcatggagtcagccagaccagcccaacggcgtgattctggattacgagctccagtactacgagaaggaactgtccgagtataatgcaactgctatcaagagccccacgaacaccgtaacggttcagggcctgaaagccggtgcaatatatgtctttcaggtgcgagccaggaccgtagctggatatgggagatatagcggtaagatgtactttcaaactatgactgaggctgaatatcagacctctattcaggagaagctacccttgattatcggcagtagtgcggctggactcgtttttctaatcgccgtcgtggtaatcgccattgtgtgtaataggcgcagggggttcgaacgcgctgactctgagtataccgacaagctccagcactacacttctggccacatgacaccaggaatgaagatttacattgacccattcacctatgaggatcctaacgaagcagtcagagaatttgctaaagagatagacatttcatgcgtgaagattgagcaggtgattggagccggtgaatttggcgaagtgtgtagcggccacctgaaactgcccggtaaacgagagatatttgtcgccatcaagacattgaagtcaggttacacagaaaagcagcgacgtgatttcctcagtgaggcttccataatgggccaattcgatcacccaaatgttatccacctcgaaggggtggtcactaaaagcacgcctgtgatgatcattaccgagttcatggaaaacggcagcttggattcttttctgagacagaatgacggtcaattcaccgtcatccaattggtcggaatgctccgcggtatcgccgctggaatgaaatacctggctgacatgaactatgtgcacagggatctcgccgcacggaacatcctggttaacagcaacctagtatgcaaggtgagcgacttcggcctgagccggttcctagaggacgacactagtgatccaacttacactagcgcacttggtggcaagatacctatcaggtggaccgccccagaagcaattcagtatagaaaattcacctcggccagcgacgtttggtcctacggtatcgtcatgtgggaagttatgagttacggagagcggccatattgggatatgaccaatcaggacgtgatcaatgccattgagcaggactaccgattgcctccgcctatggactgtccatccgcattacaccagctgatgctcgactgctggcaaaaggaccgcaaccatcggccaaagttcggccagatcgtaaataccctggataagatgattcgcaacccaaacagtttgaaggccatggccccactatctagcggcattaacctgcccctgctggatcgcaccatccctgactataccagcttcaacaccgtggacgaatggcttgaagctatcaagatgggacagtacaaagaaagcttcgccaatgcaggctttacgtccttcgacgtagtgagtcagatgatgatggaagacatcctacgggtcggtgtcactctggccggacaccaaaagaaaattctcaatagcattcaggtgatgagggcccagatgaaccagatacagagtgtcgaggtgtag

SEQ ID NO: 28451 - DNA, 3168 bp, synthetic construct
  misc_feature 1..3168: note = Description of Artificial Sequence: Synthetic coding sequence
  source 1..3168: mol_type = other DNA
atggcgttaaggcggcttggtgctgccctgctgttactccctttacttgcggcagtagaagagactctgatggacagcacaacagccacggccgaactcggatggatggtgcaccccccatccgggtgggaagaggtgagtggctacgacgagaatatgaacacaattcgtacctatcaggtgtgtaacgtttttgaaagttctcagaataactggctgcggacgaaatttattagacgtcgaggcgctcatcgcatccatgttgagatgaaattcagtgtcagagactgctcgtctattccttccgtgcccggatcgtgcaaggagacattcaatctgtattattacgaagccgactttgattcagctactaaaacttttcccaactggatggagaacccctgggttaaggttgatactatagctgctgacgaatctttttcccaggtcgatttgggcggtagggtaatgaagatcaacaccgaagtgcggtcgttcgggcctgtctctcgctctgggttttatctggcgtttcaggactacggaggatgcatgtctcttatagccgtgagagtattctatcgcaaatgcccccgtatcatccaaaacggagccatctttcaagagaccctatctggagctgagtcaacctctttggtcgccgctaggggctcttgcattgctaatgcggaagaagttgatgtccctataaaattatactgcaacggcgacggtgagtggctggtgcccattggccgttgtatgtgcaaagctggatttgaggctgtggagaacggcaccgtgtgtagggggtgtccatccggtacgtttaaggccaaccagggggacgaggcatgcacacattgtcccataaattccagaacaaccagtgaaggagctaccaactgtgtgtgcaggaatggttattacagagcagatctggatccactggatatgccatgtactaccattccatcagcgcctcaggctgttatttcttccgtcaatgagacctcactgatgctggaatggacacccccaagggactccggtggacgagaggacctcgtgtacaacataatctgcaaatcctgtggaagcgggcgaggcgcttgtacgagatgcggcgacaatgttcagtatgctcctcgtcaactaggcttgactgagcctagaatttatataagtgacctcttagctcatacccagtacacgttcgagatccaggctgtgaacggggtgacggaccagtcccccttctctcctcagttcgcttcggtcaacatcacaaccaaccaagctgctccttccgctgtgagcattatgcaccaagtctctagaacggtggatagcataactctctcctggtcacaaccagatcagcccaatggtgttatccttgactatgaactgcagtattatgaaaaggaattatcggagtataatgcaactgcgatcaagtcaccaaccaacacagtcaccgtccagggcttaaaggcaggagcaatctatgtgtttcaggtgcgagccagaaccgtcgccggatatggcagatactccggaaagatgtactttcagactatgacagaagctgaataccagacttcaattcaggagaagcttccattgataattggcagtagcgcagccggactggtctttcttattgccgtcgtggttattgcgatcgtgtgtaataggcgcggattcgaaagagcggattcagaatacacagacaaacttcagcattacacatcgggtcatatgacaccaggcatgaagatttatatcgacccattcacgtacgaggatccaaacgaggccgtgagggagtttgccaaagaaattgacatctcatgtgtgaagatcgagcaagttataggcgcaggagaatttggcgaggtttgttccggtcacctgaagttgccaggcaagcgggaaatctttgtggcaataaaaacgctgaagtccggctatacggagaaacagcgtcgggatttcctttcagaggcctcaattatgggccagtttgatcaccctaacgtcattcatctggagggagtggtaaccaaatcaaccccagtgatgataatcacagagtttatggagaacgggagcctcgattccttcttgagacagaacgacgggcagttcacagtcatacagctcgtgggaatgttgcgaggaatcgctgccggaatgaaatatctcgccgacatgaactatgttcatcgcgacctcgccgcacgcaacatcctggttaatagcaatctggtgtgtaaggtgagcgattttggactgtcgcgcttcctcgaggatgacacatctgacccgacctatacaagcgctcttgggggaaaaatcccaatcagatggaccgctccggaggctatccagtacaggaagtttacaagtgcaagcgatgtttggagctacggtattgtgatgtgggaggttatgagttacggcgagcggccatactgggacatgacgaaccaggacgtgatcaatgcaatagaacaggactatcgactgcccccacccatggactgccccagcgctttgcatcagcttatgctggactgttggcagaaagatcggaaccaccggcctaagttcgggcaaatcgtgaacacattggacaagatgattcgaaacccaaatagtttaaaggcaatggccccattgtccagtgggattaatctacctttgttggacaggactatccccgattacacaagttttaacaccgtggacgaatggctagaggccataaaaatgggccagtacaaagaaagttttgccaacgctggatttacttcctttgatgtggtgtcacagatgatgatggaagacattctcagggttggcgtgactttggcaggccaccaaaagaaaatcttaaacagcatccaggtcatgagggcccagatgaaccagatacagtctgtggagggccagccattagctaggcgaccaagagctaccggtagaacaaagaggtgccagcccagggacgtgactaagaagacctgcaactcaaatgacggtaagaaaaaaggtatgggcaaaaagaaaaccgaccctggccgagggcgagagattcagggtatcttctttaaggaggactcccacaaggagtctaacgattgcagctgtgggggatag

SEQ ID NO: 28452 - DNA, 1449 bp, synthetic construct
  misc_feature 1..1449: note = Description of Artificial Sequence: Synthetic coding sequence
  source 1..1449: mol_type = other DNA
atggcactacgaaggttgggagccgcactcctcctgctgccgctgctcgcagcagtcgaggagacactcatggactccaccaccgcaacagccgagttgggctggatggtgcatccacctagcgggtgggaagaagtatccggatatgacgagaatatgaacaccattaggacgtatcaggtttgcaatgtctttgagagtagtcagaataattggctgagaacgaagttcatacgtcgaaggggcgctcaccgaattcatgtcgaaatgaagttcagcgtgcgcgattgttcaagcatccctagtgtgcccggtagttgcaaagaaactttcaacctgtattattatgaggctgacttcgactctgctacaaaaacctttcctaactggatggaaaacccatgggttaaggtcgacaccattgccgctgacgagtctttcagccaggtcgacctgggcggaagggttatgaagatcaatacagaggtcaggagcttcggacccgtgagcaggtccggcttctatctcgcttttcaggactacggagggtgcatgtctctgatcgccgtgcgtgtgttttatagaaaatgccccagaattatacagaacggggctatctttcaggagaccctgagcggcgcagagagcacctctctggtggctgcgcgagggtcatgtattgccaatgctgaagaggtcgacgtgccaattaaactgtactgcaacggtgatggcgagtggctggtgcccatcggcaggtgcatgtgtaaagccggattcgaggccgtggagaacggtacagtctgccggggttgtcccagtgggacattcaaggctaatcagggagacgaggcttgtacgcattgcccgatcaattccagaacgacatcagagggagcgactaactgcgtttgcagaaatggctattaccgggcagacctcgatccactggacatgccttgtacaacaatccctagcgcgccacaggcggtcatctcgagcgtgaatgagacatctttgatgctggagtggactccccctagggactccgggggacgggaagacctcgtttataatataatctgcaaatcctgcggcagtggacgcggtgcgtgcacaaggtgcggcgacaacgtgcagtacgccccacgccagctagggttgaccgaaccacggatttacatttcagacctgctcgcacatactcagtacacctttgagatccaggctgtgaatggcgttacagaccagtcccctttctctcctcagttcgcatcggtgaacattacaaccaaccaggcagccccatccgctgtgtccattatgcaccaggtgtcccgcaccgtcgacagcattactctgagttggtcgcaaccggaccagcctaacggtgttattctagactacgagttacagtactatgaaaaaatgaaaacacagcggagctag

SEQ ID NO: 28453 - DNA, 2964 bp, synthetic construct
  misc_feature 1..2964: note = Description of Artificial Sequence: Synthetic coding sequence
  source 1..2964: mol_type = other DNA
atggagttaagagtcctgttgtgttgggcatctttggcagcagccctggaggaaactctcctgaataccaagctggaaacagctgatctaaagtgggtgacatttcctcaggtggatggacagtgggaggagctctccgggctggatgaagaacagcattccgttcggacctacgaagtatgtgatgtccagcgcgcaccgggacaggcacattggcttagaaccggttgggtgccgaggcggggagccgtccatgtgtacgcaacattgaggttcaccatgctggaatgcctctctctgcctcgggctggcagaagctgtaaggagacctttactgtcttttattatgaatccgacgccgacacagcaactgccctgacccccgcttggatggagaacccgtacatcaaagtcgacactgtcgcagctgaacatttgactcgaaaacgacccggagccgaggccaccggaaaagtgaacgtgaaaactctccggctgggcccactctccaaggccggattctacttagcgtttcaggaccagggagcgtgcatggctttactctcgcttcatctgttctataaaaaatgtgcccagcttacggtcaaccttacccgtttccccgagacagtacccagagagctggttgtgccggtcgccggaagttgcgtggtggacgccgtcccggctcccggtccctcgccgagtttatactgcagagaggacgggcagtgggcagagcaaccagtgactgggtgttcatgtgccccaggcttcgaagccgctgaaggcaacaccaagtgccgggcttgtgctcagggcacctttaaacctctctctggtgaagggagttgccagccctgtcccgctaacagccactccaataccatcggaagtgcagtctgtcaatgcagggtgggttattttagggccaggaccgaccccagaggcgcaccttgcactactcctccgtccgctccaagatctgtagttagtcgactcaacggaagttctctccacctggaatggagcgcaccactcgaatctggaggaagagaggacctcacttatgctctccggtgccgcgaatgtaggcccggtggctcctgtgcaccttgtggtggagatctcacatttgaccctgggcctcgcgatcttgtcgagccttgggtagtcgtgagaggtctgagaccagactttacatacacttttgaggtgaccgctttgaatggagtaagcagcctggcgaccggtccggtgccctttgagccggtgaacgtcactacagaccgggaggtccccccagccgtttccgatatccgcgtcactaggagctctccttcctcattgtctctcgcctgggccgtaccccgagccccttctggcgcagtccttgattacgaggtcaaataccatgagaagggggctgagggacctagctctgtgaggttcttgaaaacatccgagaacagagcagagctgaggggcctgaagcggggtgcgagttaccttgtacaagtgcgcgcacgctcagaggcaggatacggaccttttgggcaggagcaccactcccaaacacagttggatgaaagtgaaggctggcgggaacagctcgcactcatagcaggtacggcggtggtgggcgtcgtgctcgttctcgttgtaatcgtggtcgctgtgttgtgcctgcgcaagcagagcaatggccgagaagctgaatactctgacaagcacggacagtatttgataggccatgggactaaggtgtacattgacccatttacctacgaagaccctaacgaggctgtgcgggagtttgccaaggagatagatgtatcttatgttaagatagaggaagtcatcggagccggagaatttggcgaagtatgtcgcggaaggcttaaggcccctgggaagaaagaatcttgtgtggctatcaaaacattgaaaggcggttacacagaacgtcagcggagagagtttctgtccgaggcctccataatggggcagttcgaacaccctaacatcatcaggctagagggcgttgtgacaaatagcatgcccgtcatgatcctcaccgaattcatggaaaacggggctcttgactcattccttcggttgaacgacggccaatttaccgttattcagctcgtcggtatgctgcggggaatcgcaagcggtatgagatatctggcggaaatgtcttacgtacatcgggacttggctgcccgtaacatccttgtcaactcaaacttagtgtgcaaggtttcagacttcggcttgtctcgcttcctcgaagaaaacagctccgaccccacatacacctctagcctggggggtaagatacccattcgatggacagctccggaagctattgcgttcaggaagtttactagcgcttccgatgcgtggtcgtatgggatcgtcatgtgggaagtcatgtcttttggagagaggccatattgggatatgagtaatcaggatgtaattaatgcgatcgaacaggattatcggctgccaccgcctcccgactgcccaacctcccttcaccagctgatgctggactgttggcagaaagataggaacgctcgtcccagattcccccaggttgtcagtgccttggacaaaatgatccgtaatcctgcctccctcaaaattgtggcacgggagaacggaggcgctagccatccgctgcttgaccaaaggcagccacattatagcgcatttggctcggtcggcgaatggttacgtgctattaaaatgggccgttacgaagagagcttcgccgcagcagggttcgggtcttttgaattggttagtcagatctcagccgaggacctcttaaggatcggcgtgactctcgcgggtcaccagaagaagattcttgcctcagttcaacatatgaaatcccaagctaaacccggtacgccaggcggaacaggcggtcccgcaccacagtactag

SEQ ID NO: 28454 - DNA, 2808 bp, synthetic construct
  misc_feature 1..2808: note = Description of Artificial Sequence: Synthetic coding sequence
  source 1..2808: mol_type = other DNA
atggagctgagagtgctgctctgctgggcgagcctggccgctgcattggaagagacgctgcttaacacaaaactggagaccgccgatctgaagtgggtgacattccctcaggtggacggccagtgggaggaactctctggcctggacgaggaacagcacagtgtgaggacctacgaggtgtgtgacgtgcagagggctccaggccaggctcattggcttcgaaccggctgggtgcccaggagaggtgctgtgcatgtgtacgccaccctcaggtttactatgctggagtgcttgtccctgccccgagccggacgctcatgtaaggaaactttcacagtgttttactacgaatccgacgccgatactgccacggcgctgactcctgcctggatggaaaatccttacataaaggtcgacaccgtggccgctgagcacctgactcggaagcggcctggcgctgaggcaaccggtaaggtcaacgtcaaaacattacgtctcgggccactgagtaaggctggcttctatctggcattccaggaccagggcgcttgcatggctctcttaagtctgcatctgttttacaagaagtgcgcccagttaaccgtgaatttgacacgttttccagagacagttccccgagagctcgtcgtgcctgtggccggttcttgcgtcgttgatgccgtgccagcccctgggccttccccctccctgtactgccgggaggatgggcagtgggccgagcagccagtaactgggtgtagttgtgcaccgggttttgaagctgcagaagggaacacaaagtgccgggcttgtgcccagggcacctttaaaccccttagcggagagggcagctgccagccctgcccagccaactcgcattccaataccattggtagtgccgtgtgccagtgcagagtcggctatttccgggctagaactgatcctaggggagccccatgtaccactccccctagcgcccctcgctcggttgtgtctcgcttaaacgggtcatccctgcacctggagtggtccgcccctctggagtccgggggacgtgaggacctcacctacgccttacgatgccgtgaatgccggccaggtggcagctgcgccccttgtggtggagacttaacatttgatcctgggccacgagacctggtcgaaccttgggttgtggtcagggggctacgccctgacttcacatacacctttgaagtgacagcactgaacggcgtgtcgagcctcgccacaggacccgtgccattcgaacctgtaaacgtgacgaccgacagagaggttccacccgcagtgagtgacatccgcgtgacccggagctctcccagctctctgtctttggcgtgggctgttcctagggctccttcaggcgctgtcttagactatgaggtcaaatatcatgaaaagggagccgaagggcctagttccgtccggtttctgaagacttcagaaaacagggccgagctgcggggtctcaagcgcggagcctcatacctcgtgcaggttcgagctagatctgaagccggttatggcccattcggacaggagcaccatagccagactcagctggatgagagcgagggatggagggagcagttagcgctcatcgcgggtacggccgtagtgggagtggtactggtgctggtcgttatagtcgtggccgtgctttgtttgcgcaagcagtcgaatggtcgtgaggcagaatacagcgataagcacggccagtacttaatcggacacggtaccaaggtctatattgacccattcacatacgaggacccaaatgaggcagtgcgggagtttgccaaagaaattgacgtgtcctatgtgaaaatagaggaggtaatcggcgcaggtgaattcggcgaagtctgcaggggtaggcttaaggcccctggcaagaaggaatcatgtgtcgccattaaaactcttaaaggtggatacacagagagacagaggcgtgaatttttgtctgaagcaagtattatgggccaattcgagcatccaaacattataagactggaaggggtagtgaccaattccatgcctgtgatgattctgactgagtttatggaaaatggagcccttgactcctttctgaggctgaacgatggccagtttaccgtcattcagcttgtcggaatgctccggggaatagcctccggcatgcgatatctggccgagatgagctatgtgcatagagaccttgccgctagaaatatcctggtgaattcaaacctggtctgcaaggtttctgactttggtctgagccgattcctcgaggaaaacagcagcgatcccacttacacgtcatccctgggcggtaagataccaatcaggtggaccgcccctgaagctatcgccttcagaaaatttacctccgcaagcgatgcgtggtcctacggcattgtcatgtgggaagtgatgtcttttggagaaagaccttactgggacatgtccaaccaggatgtcatcaacgcgatcgagcaggactaccggctgcctcccccaccagactgcccaacatcacttcatcagcttatgttagattgctggcaaaaagatcggaacgctagacctcgttttccgcaagtggtctctgctcttgataaaatgatcagaaaccccgcttccctgaaaatcgtggcccgtgaaaatgggggagaccttctgaggatcggcgtcaccctggcaggacatcagaaaaagatattggcctctgtccagcacatgaaatcccaggcaaaacctggcacccccggtgggactgggggtcccgctccgcagtactag

SEQ ID NO: 28455 - DNA, 552 bp, synthetic construct
  misc_feature 1..552: note = Description of Artificial Sequence: Synthetic coding sequence
  source 1..552: mol_type = other DNA
atggagttcctgtgggcaccactgctgggactttgctgctccctggctgccgctgatcgccacaccgttttctggaacagttccaatccaaagttcaggaatgaggattacaccatccatgtacaactgaacgattatgtggacatcatttgtccacactacgaagatcatagtgtagccgatgctgcaatggaacagtacatcttatatctggtggagcacgaggaatatcagttgtgccaacctcaaagcaaggatcaggttagatggcagtgtaacaggcccagtgcaaagcacgggccagagaagctgagcgagaagttccaaaggtttactccttttacactgggcaaggagttcaaagagggtcattcgtattactacatttcccattcacctcaggcccacgataatccacaggaaaagagactggccgcagatgaccctgaagtgagggtgcttcacagcatagggcatagcgccgctccgcgtctctttcctctcgcatggactgtcctgctcctgccactgctgctgctccagacaccttag

SEQ ID NO: 28456 - DNA, 618 bp, synthetic construct
  misc_feature 1..618: note = Description of Artificial Sequence: Synthetic coding sequence
  source 1..618: mol_type = other DNA
atggaattcctctgggcccctctcctgggcctgtgctgcagcctggccgcagcagaccgccacactgtgttctggaattctagcaatcccaagtttagaaatgaagactacaccatccacgtgcaattgaatgactacgtggatattatatgtccccattatgaagaccacagtgtggctgatgccgctatggagcaatacatcctgtacctcgtggaacatgaggaataccagttatgccaaccacagtcgaaagaccaggttcggtggcaatgcaatcggccaagtgctaagcatggtcctgaaaaattgtcagaaaagttccagagattcacgccctttacccttggtaaagagtttaaggagggccactcctactactatatctcgaagcccatacaccagcacgaagatcggtgcctacgcctgaaagtgaccgtatccggaaaaatcacccacagtcctcaggcccatgacaatccccaagaaaagcgattggccgcagatgacccagaagtcagagttcttcattctataggccacagcgccgcacctcggttatttccactagcgtggaccgtcctcctcctgccgcttttgctcttacagactccgtag

SEQ ID NO: 28457 - DNA, 1002 bp, synthetic construct
  misc_feature 1..1002: note = Description of Artificial Sequence: Synthetic coding sequence
  source 1..1002: mol_type = other DNA
atggcagtccggagggactcagtctggaagtactgctggggagtacttatggtgctttgtcgcaccgctatctctaaaagcatcgttctggagccaatctattggaactcctcgaatagcaagtttctaccaggacaagggttagtgctctacccccaaatcggagacaaactcgatatcatttgtccaaaggtagactctaagacagtcggacagtatgagtattacaaagtgtacatggttgacaaggatcaagccgacaggtgcacaattaagaaagaaaacacccctctcttgaactgcgcaaaaccggatcaggatattaaattcacaatcaaatttcaggaattcagcccaaacctttggggactggagttccagaagaacaaggattattacataatatccacatccaatggatccctggaggggttagacaaccaagagggcggagtctgccaaactcgcgcaatgaagatactgatgaaagttggccaggacgcctctagtgccggtagtactaggaataaagatcccacccgacgccctgagttggaggctgggacaaacggtagatcaagcaccacctctcctttcgtgaagccaaatcccggaagcagcacagacggtaactccgccggtcattcaggaaataacatcctagggagcgaagttgcattatttgcgggaatcgcatccgggtgtataatcttcatcgttataatcatcactctcgttgttcttctactgaagtaccggaggaggcatcgtaaacatagcccgcagcacaccaccacccttagcttatccaccctggccaccccaaagcgaagcggtaataacaacggttctgagccttccgatataatcatccctttgcgcacagctgacagcgtgttctgccctcactatgagaaagtcagcggtgactacggtcacccagtttatatagttcaggaaatgcctccacaatctcccgctaatatttattataaggtgtag

SEQ ID NO: 28458 - DNA, 3624 bp, synthetic construct
  misc_feature 1..3624: note = Description of Artificial Sequence: Synthetic coding sequence
  source 1..3624: mol_type = other DNA
atgcttttaactttgattatcctcctccccgtagtgagcaagttctcattcgtgtccctcagtgctccacagcattggtcatgtcctgaaggaacactggcaggcaacggcaacagcacatgtgtcgggcctgccccattccttatctttagccacggcaacagcatcttcagaatagacaccgaagggaccaactacgagcagctggtcgtcgacgcaggggtgagcgtgattatggattttcactataatgaaaaacgaatttattgggtggatctcgagagacagctgctccagagggtcttcctgaatggtagtcggcaggaacgagtctgtaatatcgagaaaaatgtgtctggcatggcaattaattggattaatgaggaagtgatttggagcaatcagcaggaagggattattaccgtgactgacatgaaagggaacaacagccacattcttctgagtgccctgaagtaccctgcgaatgtagccgttgaccccgttgagcgcttcatcttttggagctccgaagttgcgggtagcttataccgggctgatctagacggcgtgggagttaaagctttgctggagacgtctgaaaaaattaccgccgtatctttggacgtgctggataagaggttgttttggattcagtacaaccgggagggcagcaacagtctgatttgtagttgcgactacgatggcggaagtgtgcatatcagcaaacatccaacacaacacaacctgtttgccatgtcactctttggtgacagaatcttttactccacgtggaagatgaaaacaatttggatcgccaacaagcataccggcaaggatatggtaagaattaatctgcactcctcctttgtgccactaggcgagctgaaagtggttcacccactggcgcagcctaaagctgaggacgatacatgggagccagagcagaagctgtgcaaactgagaaaaggtaattgttcctccacagtgtgtggccaggacctccagtcccacctttgtatgtgcgccgaaggttacgccttaagccgtgataggaagtattgtgaagatgtcaacgaatgcgctttctggaatcacggctgtacattggggtgcaagaacactcccggttcctattattgtacctgccctgttggctttgttctgttgccggatggtaagcggtgccaccagctggtgagttgccctcggaacgtctcggagtgctctcacgactgcgtgctgaccagcgaaggtcctctgtgtttttgccctgaggggagcgtgcttgagagggacggaaagacatgctccggatgtagctcccccgataacggcggttgctcacagctctgcgtgcccctgtctcctgtttcctgggaatgtgactgttttccagggtatgatctccagctggatgagaagtcgtgcgctgcctcggggcctcaaccttttttactgtttgccaattcccaggatatccgtcacatgcattttgatggaactgactacggcacactgttaagccagcaaatgggcatggtctacgccctggaccacgacccggtggaaaacaaaatctattttgcgcacacagctctcaagtggatcgagcgcgctaacatggacggctcgcaaagggaacggctgatcgaagaaggtgtggacgtgcctgaagggcttgcagtcgattggataggcaggagattctactggaccgaccggggtaaaagcctcattggtcgcagtgatctgaacggaaaacgctctaaaattattacaaaggagaatatatctcagcctagaggtattgccgtccacccaatggccaagagattgttctggacagatacggggatcaacccccgaatcgagtcctcatcactccagggtctaggcaggctggttatcgccagctcagacctgatctggcctagtggcatcactattgacttcctgacagacaagttgtattggtgtgatgctaagcagtctgttattgaaatggcaaacttggatggctctaagaggagaagattgacccagaacgatgtgggacacccatttgccgttgctgtgttcgaggattatgtctggtttagtgattgggccatgccgagtgttatgagagtgaataaaagaaccggtaaagatagggttcgcctgcaagggtccatgctcaaaccatcatccctagttgtggtacaccctctagccaagccgggagcagatccctgcttgtaccagaacggaggatgcgagcacatctgtaagaagagattggggacagcatggtgctcctgtagagagggcttcatgaaagccagcgatggtaagacttgcttagccctggacgggcaccagcttctagccggaggagaagtcgacctgaaaaaccaggttacgcccctagacatactatccaaaactcgggtgagcgaagataacataacggaatcgcaacatatgctagtggctgaaattatggtcagtgaccaggatgattgcgccccagttgggtgctcaatgtacgccaggtgcataagcgagggggaagatgccacttgccagtgcctgaaaggcttcgctggagatgggaagctgtgttctgacattgacgaatgcgagatgggtgtgcccgtttgtccacccgctagctctaagtgtattaacaccgaggggggttatgtgtgtagatgcagcgaagggtatcaaggggacggtatacactgcctggacatagacgaatgccagctaggggagcacagttgtggcgaaaatgcatcctgcacaaatacagaaggcggttacacttgcatgtgtgcaggccgattgagcgaaccaggtttgatctgccctgactcaactcccccaccccatctccgtgaggatgaccaccactattcagtgagaaatagcgattctgagtgcccgttgtcccatgatggctattgtctgcacgacggagtatgcatgtacattgaggcattagataaatatgcctgtaactgcgtcgtgggctacattggcgaacggtgccaatatagggatctgaagtggtgggaactaaggcatgccggtcatggacagcagcaaaaagtgatagttgtcgctgtgtgcgtggtggtactggtgatgctgctgctgctgagtctctggggtgcacattattaccgcacccagaaactcctctctaagaatccaaaaaatccttatgaagaaagcagtagggatgtccggtcccgccgaccggctgacaccgaggacggtatgtccagctgccctcaaccgtggttcgtcgtgataaaggagcaccaggatcttaagaatggaggacagcctgtggcaggggaggatggacaggccgcagacggttctatgcagcctactagctggcgccaagagccccaactttgtggtatgggaaccgagcagggttgttggattcctgtcagttccgacaaaggctcttgcccacaggttatggagcgcagctttcacatgccctcctacggcacccagacattagagggcggtgtggaaaaacctcactctttgctgtctgctaatccgctgtggcaacagcgagcactcgatcctcctcaccagatggagctgacccagtag

SEQ ID NO: 28459 - DNA, 3501 bp, synthetic construct
  misc_feature 1..3501: note = Description of Artificial Sequence: Synthetic coding sequence
  source 1..3501: mol_type = other DNA
atgctgttgactctcataattctgctaccggttgtgtctaaattttcctttgtcagcctgtcagctccacagcattggtcctgtccggagggaacccttgctggtaacggcaattctacatgtgtgggcccagccccatttcttatctttagccacggaaatagtatcttccgaatagacaccgagggtacgaactatgagcaactagtcgtggacgcgggtgtcagtgttatcatggactttcactataacgaaaagaggatctattgggttgacctggagcggcagctgctgcagcgcgtgtttttgaatgggtccaggcaggagcgagtttgcaatatagagaagaatgtttcggggatggccatcaattggatcaatgaagaggtgatatggtctaatcagcaagagggaattatcacagtgactgatatgaagggcaataatagtcatatcttgctgtccgccctgaaatacccggctaacgtagccgttgacccggtagaaaggttcatcttctggagctcagaagtcgccggatctttgtatagagcagatctcgacggggtcggtgtaaaagcgttgttggagactagcgagaagatcacagctgtttctctcgatgtcctggataagcgcctcttctggatacaatacaatagggagggctccaattccctcatctgcagttgcgactacgacgggggtagcgttcacatatcaaaacacccaacacaacataatctctttgctatgagtttgttcggagatcgcattttctactccacttggaaaatgaagaccatctggatagctaataagcatactggtaaagatatggttaggattaacctacacagctctttcgtaccattgggagaactgaaagtggttcaccctctcgctcagcccaaagctgaggacgacacgtgggagcctgaacaaaagctgtgtaagcttaggaaaggaaactgcagcagcacggtttgcggtcaagacttgcagagccacctctgcatgtgcgctgagggttacgccctcagccgtgatcggaaatactgcgaggatgttaacgaatgtgctttctggaatcatggatgtactctcggctgtaagaacacaccgggttcatactattgcacgtgccccgtggggttcgtgctccttccagacggtaaaaggtgccatcagctggtgtcgtgccccaggaacgttagcgaatgcagccacgattgcgttctgacttctgaaggaccactttgcttttgtcccgaggggagcgttttagaaagggatggtaagacatgcagcgggtgctccagtcccgataatgggggatgtagtcagctctgcgttcccctgtccccggtctcatgggaatgcgattgtttccccggatatgacctgcagctagatgagaaatcgtgtgcggcttctgggccacagcccttcctgttattcgctaactcacaggacataaggcacatgcatttcgatgggactgattacggtaccttactgagccaacaaatgggcatggtgtatgccctggaccacgaccctgtggagaataaaatctattttgcacacaccgcattgaagtggatcgagcgcgctaacatggatggaagtcagcgggagagactcatcgaggaaggggtggatgtgcctgaggggttggcagtcgattggatagggcgacgattctactggaccgaccgcggaaaaagcctgatcggcaggtcagacctgaatgggaaacgatctaagatcataacgaaggagaacattagccagccacggggaattgctgtgcaccccatggccaagaggcttttctggacggacacaggcatcaacccacgtattgagagcagctccctacagggactgggcagacttgtgatcgccagttccgacctcatctggccttccggaattactatcgatttcctgactgataaattgtactggtgcgacgcaaagcaatccgtaatagaaatggccaatctcgatgggtccaagaggcgcagactcacccaaaatgacgtcggccatccttttgccgttgccgtcttcgaagattacgtatggttctccgattgggcaatgccctcagtgatgagggttaataagagaactggtaaggacagggtccgcctgcaggggagcatgctcaaacccagctccctcgtcgttgtgcacccgcttgcaaagcctggggcagatccatgcttataccagaatggcggttgtgaacacatctgcaaaaagcgcctgggaacggcctggtgcagctgtcgtgagggatttatgaaggcttcagatggaaagacctgcctggccctggacggacaccagctgctcgctggcggtgaggtagacctgaagaaccaggtaactccactggatatactatcaaaaacgagagtgtcagaggataacatcacggaatcacaacacatgttagtggctgaaatcatggtgtccgatcaggacgactgcgccccagtggggtgctcaatgtatgcgagatgtatctccgaaggcgaggacgctacctgtcaatgcctgaaaggattcgctggcgacggcaagctgtgctcagacatcgacgaatgcgagatgggcgtaccagtttgtccacctgcctcttcaaagtgtatcaataccgagggaggctacgtgtgtcggtgttctgagggttaccagggtgatggtatccactgtctagattctacgcctcccccacacctgagggaggatgatcaccattactccgtgagaaactctgactcagagtgtccactttcacatgacggctactgcttacacgacggagtgtgtatgtacattgaggctctagacaagtacgcctgtaattgtgtcgtggggtacattggagagcgctgccagtatagggacttaaaatggtgggagctgcggcacgcaggccatggacagcagcagaaggtgatcgtcgtggccgtgtgcgtggtggtcctggtgatgcttctgctgttatccctctggggagcccattattatcggactcagaagctcttatcaaagaacccaaaaaatccttatgaggagtcctcacgggacgtgagaagccggaggcctgccgatacggaagatggaatgtccagttgtccacaaccttggtttgtcgtgatcaaagagcatcaggatctgaaaaatggcggacagcccgtcgctggcgaagatggccaggctgcagatggctctatgcaaccaacatcatggaggcaggagccacaactatgtggcatgggtacagaacaaggctgttggatcccggtcagttctgataaaggaagctgcccacaggtcatggagcgctcatttcatatgccaagttatggcacacagactcttgaaggtggagtcgagaagcctcactccctgctaagcgctaaccctctgtggcagcagcgagctttagacccacctcaccaaatggaactcacgcagtag

SEQ ID NO: 28460 - DNA, 3498 bp, synthetic construct
  misc_feature 1..3498: note = Description of Artificial Sequence: Synthetic coding sequence
  source 1..3498: mol_type = other DNA
atgctcctgaccctgatcatattattaccagtggtgagtaagtttagctttgtgagtctttcagcaccccagcactggtcttgccctgaggggacgcttgcaggtaatggaaattcaacttgtgttggccctgccccttttcttatatttagccatggaaattcaattttccgaattgatacggaaggcactaactacgaacagctagtcgttgatgccggtgtatccgtaatcatggattttcactataacgagaaaagaatttattgggtggacttagagcggcagctcctgcagcgcgtgttcctcaatggtagcaggcaggagcgtgtgtgcaacatagagaaaaacgtttcgggcatggctattaattggataaatgaggaggtaatctggagcaaccagcaagaagggatcatcactgtcaccgatatgaaaggcaacaattctcatattctcctttcagctctaaaatatccagctaacgtcgcagtggaccctgtcgagagattcatcttctggagttccgaagttgccggttcattgtatagggccgacctggatggcgtgggcgtcaaagcactgctcgagactagcgagaagatcacagcagtcagcttggacgtactggataaaagactcttttggatccagtataatcgggaaggtagtaacagcttaatttgttcatgtgactacgatgggggttccgttcacattagtaagcacccaacacagcataatctttttgcaatgtcactgtttggggatagaatcttttacagcacttggaaaatgaaaactatttggatcgccaacaaacatacaggaaaggacatggtgcgaattaatctgcactcctcttttgttccactgggagaactgaaagtcgtgcacccgcttgcccaaccaaaggcagaggacgatacctgggagcccgacgtcaacgaatgcgccttttggaatcacggatgtacactggggtgcaagaatacaccgggtagttattactgtacgtgccccgtgggctttgtgttgctgcccgatggtaagcggtgccatcagttggtatcctgtccacgaaatgtatctgaatgctctcatgactgtgtgttaacctctgaggggccactttgtttctgcccagaaggaagcgttctggagcgggacgggaaaacgtgttccgggtgcagtagtccggataacggtggatgcagccaattgtgcgtgcctctgagcccagtctcttgggagtgcgattgctttcctggatatgaccttcagctggatgaaaaatcttgtgctgcaagtggacctcaacccttcttactgtttgccaattctcaggacatacggcatatgcattttgacggtaccgactatggtaccctgctgagccagcagatgggaatggtctacgccctggaccacgaccctgtggagaataagatatactttgcgcatacagcactgaagtggatagagagggccaatatggacggctcacagagagaacgccttatagaggagggggtggacgtcccagagggtctcgcagtggactggattggcaggagattttattggaccgaccggggaaagagcctcattggcagaagcgatctgaatggcaagcgctccaagatcattaccaaggagaacatcagtcagccaagggggatcgccgtgcaccccatggctaaacggcttttttggacagacaccggaataaatcctaggatagaaagctccagcttgcagggcctgggcagattggtaatagctagcagcgatctgatatggccatcgggaattacgatcgatttcttgacagacaagctttattggtgtgatgccaaacagtcagtcattgaaatggctaatcttgatggtagtaagcgccgtaggctgactcaaaacgacgtagggcaccccttcgcagtagcagtcttcgaggactacgtgtggttttctgattgggccatgccatctgtcatgagggtgaataagcggactggcaaggatcgcgtacggctccaaggctccatgctcaagccttctagcctggtcgtagtccacccactagccaagcccggtgctgatccatgcctttatcagaatgggggatgtgagcacatttgcaagaaaagattggggacggcttggtgtagctgccgcgaagggtttatgaaggcctctgatggaaaaacatgtctggccctcgacgggcaccagttattggcaggtggtgaagtggatcttaaaaatcaggtaaccccccttgacatattgtccaagaccagagtatccgaggataacatcacagagtctcaacacatgctcgtggccgaaattatggtgagcgaccaagacgattgcgcacctgtaggctgctccatgtacgcccgttgcatctccgagggcgaagacgccacatgccaatgcctcaagggcttcgccggagacgggaaactgtgttcagatatcgacgagtgcgagatgggcgtacctgtgtgcccgcctgcctcttctaaatgcatcaacacggagggagggtacgtctgcagatgcagcgagggttatcagggagatggcattcattgtctggatattgacgaatgtcagttgggagagcattcatgtggcgaaaacgctagctgtacaaatactgagggcggatatacttgcatgtgcgcaggacgcctctctgagcctggactcatttgccctgactccacgcctcccccacacctgagagaagacgaccaccattactctgtcagaaattctgacagcgagtgtccgctgtcgcacgatgggtattgcctgcacgatggagtctgcatgtacatagaagccctcgacaagtacgcctgcaactgtgttgtcggatatatcggtgagcggtgtcagtacagggatctcaaatggtgggaattgagacacgccggacatggccagcagcagaaggtgatagttgtcgccgtgtgtgtcgtggttctggtgatgctgttactcttgtctctgtggggcgctcattactataggacacagaagttattgagtaaaaaccctaagaacccgtatgaggaaagctcacgggacgtcaggagtaggcgcccagctgacactgaggacgggatgtcctcttgcccgcagccttggtttgtggtgatcaaggagcaccaggacttgaagaatggcggtcagcctgtggccggagaggatggacaggctgccgacgggagtatgcaaccaaccagctggaggcaagaaccccagttgtgcggtatgggaaccgagcaaggctgctggattcccgtgagttcggataaaggctcttgtccacaggtaatggaacggtccttccatatgccaagctatggtacacagacattagagggcggagttgagaaacctcattctctactgagcgctaatccactgtggcagcaaagggcattagaccccccacatcagatggagctgacccagtag

SEQ ID NO: 28461 - DNA, 3633 bp, synthetic construct
  misc_feature 1..3633: note = Description of Artificial Sequence: Synthetic coding sequence
  source 1..3633: mol_type = other DNA
atgagacccagcgggactgctggggctgccctattagccctgctggcggcattgtgtcctgccagcagagcattagaggagaaaaaagtgtgtcagggcacatcaaacaagctgacccagctgggtacttttgaagaccattttctgagcctgcaacgcatgttcaacaactgcgaggtcgtattgggcaacctcgagataacttatgtgcagcggaattatgacttgagttttctgaaaacaattcaggaggtggccggttatgtgctcatcgcgctgaacacagtcgaacgaatccctcttgaaaatttacagatcatcagggggaacatgtactacgaaaacagctacgctctggccgtgctctctaactatgatgccaataagaccggactcaaagagctcccgatgcggaacctgcaggagatactgcatggggctgtgaggttttccaacaatcctgctctttgtaacgtggagagcatacagtggagggacatcgtgtcctctgacttcttgagtaatatgagcatggatttccagaaccatctaggtagctgccagaaatgcgacccttcgtgtcccaatggctcttgctggggggctggagaagagaactgccagaagttgacgaaaattatttgtgcccagcagtgtagcgggcgttgcagggggaaaagcccctctgattgctgtcataaccagtgtgccgcaggatgtactggcccacgagagagcgactgtctggtgtgccgcaaatttcgggacgaggctacttgcaaagacacatgtcctcccctgatgttatacaaccccacaacctaccagatggatgtcaatcctgagggaaagtatagctttggtgccacctgcgtaaaaaagtgtccacgcaattacgtggtcaccgaccatgggtcttgtgtgcgagcttgcggggctgattcttatgaaatggaagaagacggggttaggaagtgtaagaagtgtgagggcccttgcaggaaagtgtgcaacggaatcggaatcggcgaatttaaggatagtctcagcattaacgccacaaatatcaagcactttaagaactgtacctccataagtggcgacctccatatactacctgtcgctttccgtggcgattccttcacacacacccctccactggatccgcaagagctggatatactgaagaccgtcaaggaaatcacgggcttcctgcttattcaggcttggccagagaaccgcaccgatttgcatgctttcgaaaacttagagataatacggggacggaccaagcagcatggccaattctccctggccgttgtctcactgaatatcacgtctctgggcctcagaagcctgaaagagatcagcgacggagacgtcataatctctggcaataaaaacttgtgttatgccaacactattaattggaagaagctgttcggaacgagtggacagaagaccaaaattatctctaataggggcgaaaattcctgcaaagctacaggtcaggtgtgccatgccctgtgttcgcctgaggggtgctggggacctgagcctcgggattgtgtgagttgtcggaacgtatcccggggacgtgaatgtgtagataagtgtaacctgctggagggagagcccagagagttcgtggaaaattctgaatgcatccaatgccacccagaatgtctgccacaggccatgaacattacatgtacgggacggggtcccgacaattgcatccagtgcgcacactatatcgacgggcctcactgtgttaagacttgccccgcaggagtgatgggggaaaacaacaccctggtctggaagtatgctgacgccggacacgtctgtcacctttgccacccaaattgcacgtacggatgtaccgggccaggtctggaaggttgccccacaaatggtccaaagataccctccatcgcaacaggcatggtgggcgctctgcttctgctgttggtagttgccctggggattggcctgttcatgcggcgacgacacatagtcagaaagaggaccttgcgtcgactcctgcaggaaagagaactcgtagagccactgaccccttccggcgaagcgcctaatcaggcactgctgagaatcctcaaggaaacagaattcaagaaaataaaagtgctgggaagtggggcttttggcactgtttataaaggtctgtggattccggagggtgagaaagttaagattcctgtcgctatcaaagaactacgcgaggcaaccagccctaaagcaaataaggaaattctggatgaggcctatgtcatggctagcgtggacaatccacacgtgtgcagactgttagggatatgccttacgtcgaccgtccaattaattacccagctgatgcccttcggctgtctgctggactacgtgagagaacataaggacaatattggcagccagtatttactgaattggtgcgtacaaatagcaaaggggatgaactatttggaggaccgacgactagttcatcgagatttggcggcacggaacgtcttggtcaaaaccccccagcatgtcaagatcacagactttgggctagcaaaactcctcggcgctgaggaaaaggaatatcacgccgaggggggaaaagtcccaattaagtggatggccctcgagagcatcctgcataggatctacacgcatcagagtgacgtgtggtcctacggtgtgacagtttgggagctcatgacattcggctccaagccttacgatggaattcctgctagcgagatctcgagtatcctggaaaagggtgaacgcctgccacagcctccaatctgtactatcgatgtttacatgatcatggtaaagtgttggatgattgatgccgattccaggccaaaatttagagagcttatcatcgagtttagcaagatggctcgcgatcctcagagatatctggttattcagggggacgagagaatgcacctgccttcacctaccgattcaaacttttatcgtgctcttatggacgaagaagacatggacgacgtggtggatgctgacgaatatttgatcccccagcagggatttttcagttcaccctctacttcccgaacaccacttctttcctccctgtccgccacttccaacaactccacagtcgcctgcatcgatcgcaatggcctccagtcttgtccaattaaggaggattcatttctccagagatacagctctgacccaacaggggctttgactgaggattcaattgatgacacattcttgccagttcccgagtatatcaaccagtccgtacccaaaagacctgcgggtagtgtccagaatcccgtgtatcacaatcaaccccttaaccctgcaccttctcgcgatcctcactatcaagatcctcactccaccgctgtgggcaaccccgagtacttgaacactgtgcaaccaacttgcgttaactctacattcgattccccagctcactgggcccaaaaggggtcccatcagatctccctggacaatcctgattatcaacaagacttcttccccaaggaagccaagcctaacggcatctttaaaggcagcactgccgaaaatgccgagtatctgcgcgttgctcctcagtcatctgaattcatcggagcgtag

SEQ ID NO: 28462 - DNA, 1887 bp, synthetic construct
  misc_feature 1..1887: note = Description of Artificial Sequence: Synthetic coding sequence
  source 1..1887: mol_type = other DNA
atgagaccctcgggcaccgcaggcgcagccctgttagcactattggctgcgctctgcccggcatcccgggctttggaagagaagaaagtatgtcagggcactagcaataaactgacgcaactgggcacatttgaggatcactttctttccctacagcgaatgttcaacaactgcgaggtggtgctgggtaatctggagataacttacgtgcaacggaattacgacttgtcctttctgaaaaccatccaggaagttgccggatatgtcctgatagccctcaacacagtagagcggattccactggaaaacttgcagattatccgtggcaatatgtactacgagaacagctacgctttggcagtactaagtaattacgacgcaaacaaaaccggactgaaggaactacccatgaggaacctgcaggaaatcctgcatggagccgtgcggttttccaataaccctgccctgtgcaatgtcgagtctatccaatggagggacattgtgtcctctgattttctgtcgaacatgagcatggacttccagaatcacctgggtagctgtcagaaatgcgatccttcttgtcccaacggctcctgctggggggcaggcgaagagaactgccagaaactcactaaaatcatatgcgctcagcaatgtagcggcagatgtaggggcaaaagcccctccgactgttgccataaccagtgcgctgcaggatgcactgggccacgtgagagtgactgcctggtttgccggaagttccgcgacgaagctacatgcaaggatacgtgtccccctctaatgctgtacaacccaactacctaccagatggatgtaaaccccgaaggaaagtacagtttcggcgctacctgtgttaagaagtgccctagaaactacgtcgttacggaccacgggtcctgcgttagagcctgcggagcagactcttatgagatggaagaggacggcgtgagaaaatgcaaaaagtgcgagggcccatgtaggaaagtgtgcaacggcataggtatcggcgaattcaaggactccctctcaattaacgctactaacatcaaacatttcaaaaattgtacatcaattagcggcgacctgcatattctgcctgtggcgttcaggggagactcttttacccacactccacctcttgacccccaggaactcgacatactgaaaacagtgaaggagataaccggcttcttgctcatacaggcgtggcctgagaatcgcactgatctccacgcctttgagaacttagagatcatccggggtcgaactaagcaacacgggcagttctcccttgccgtggtttctctgaatattacaagtcttggtctaaggtcactcaaagagatctcagacggggatgtcataatctccggaaataagaatttatgctacgctaacacaatcaactggaaaaagctcttcgggacttctggtcaaaaaacaaagatcatatccaatagaggcgaaaacagctgtaaagccacaggccaggtttgtcacgctctttgcagtccagagggatgttggggaccagagccaagagactgtgtatcatgtcgcaatgtcagcagagggagggagtgcgtcgacaagtgtaatctgctggagggagaacctcgggagttcgtggaaaactccgagtgcatccaatgccaccccgaatgcctgcctcaggcaatgaatattacgtgcacgggacgtggtcccgataactgtattcaatgcgcccactacatcgatggtcctcattgcgtaaaaacctgccccgctggtgtcatgggtgagaataacactctggtgtggaaatacgcagatgctggccatgtatgtcacctgtgtcacccaaactgcacatacggcagttag

SEQ ID NO: 28463 - DNA, 2118 bp, synthetic construct
  misc_feature 1..2118: note = Description of Artificial Sequence: Synthetic coding sequence
  source 1..2118: mol_type = other DNA
atgcggccttctggtaccgccggagcagccctgctcgccctgttggcagccctgtgccccgcttctagggctctcgaggagaagaaagtatgccagggaacaagtaataagctgacacagttaggtactttcgaggaccatttcctttcccttcagcggatgtttaacaactgcgaagtggtgctggggaaccttgagatcacatacgtgcaacgcaattatgatctcagtttcctcaagacaatccaggaagtagctggttacgtcttaattgcgctcaacactgtcgaacggattccactggaaaatctccagattatcagaggaaacatgtattacgagaattcctacgcacttgcagtgttgtccaactacgatgcgaacaaaacaggtcttaaagagctgccgatgaggaaccttcaggagatactacacggcgcagtgaggttctcaaacaatcctgcattgtgtaacgtggaaagtatccagtggcgcgatatcgtaagctctgattttctcagcaatatgagcatggatttccagaaccacttaggcagttgccagaagtgtgacccttcttgcccaaacggttcctgctggggggctggtgaggagaactgtcagaaattgaccaaaattatttgcgcacaacagtgctccggacgctgtcggggaaaatctccctctgactgttgccacaatcagtgcgcagcgggatgcacaggccctcgtgagagtgactgtttagtgtgtcgtaaattcagagacgaggctacatgtaaagatacctgtcctccgctcatgctgtacaacccgactacttatcagatggacgtcaatccggagggtaagtactcatttggagcaacctgtgtcaagaagtgcccccgaaactatgtggtcacggaccatgggagctgtgtgcgggcatgcggtgccgacagctatgaaatggaggaagacggagtgagaaaatgtaaaaaatgtgagggtccctgtagaaaggtctgtaatggcatcggcatcggagaatttaaggacagcttgagcataaatgctaccaatatcaaacatttcaaaaactgcacatccatttctggggacctccacatcctaccagtggctttccgcggtgacagctttacccataccccaccactggatccccaggagctcgatattctaaagaccgtaaaggagattacgggcttcttactgatccaggcctggccggaaaatcggacagatttacatgcctttgagaacctcgaaattattcgaggacggactaagcagcatggacagttttcattagcagtggtgtccctgaacataacaagtctgggcctaagatctttaaaagagatctcagacggggatgtgattatttccggcaataagaacctgtgttatgctaataccattaattggaaaaaactgtttggaacctctgggcaaaagacaaagattatcagtaacaggggagagaactcctgcaaggctacagggcaggtgtgtcacgccctatgttcccccgagggctgctggggtccagagcctagggattgcgtctcttgccggaacgtcagcaggggccgagagtgtgttgataagtgtaacttacttgagggggagcctagggaattcgttgaaaattccgagtgtatccagtgtcatcccgagtgtctgccacaggctatgaatattacatgcactggcagaggacctgacaattgcatccagtgcgcccattatatcgacggacctcattgtgtgaagacatgtcctgcaggcgtcatgggagaaaataatactctggtttggaaatatgcagatgcgggacatgtgtgccacctgtgccatcctaattgtacctacggcccaggtaatgagtctctgaaggctatgctcttctgtttgtttaagctgtcctcatgtaaccagagcaacgatggctccgtatcccatcagtccgggtcacctgcagcccaagagagctgtctcggctggatcccatcactgctcccttccgagtttcagctgggttgggggggatgctcccatctgcatgcttggccctcagcatctgtcatcatcactgcttcctcctgccactag

SEQ ID NO: 28464 - DNA, 3243 bp, synthetic construct
  misc_feature 1..3243: note = Description of Artificial Sequence: Synthetic coding sequence
  source 1..3243: mol_type = other DNA
aatcgaaccgagggcgctgcccatgaaaaattcacgggaaaccctgcttggcgcagagcggtccagcagcagccttgcccagttgtggaaagtatccagtggcgagatatcgtctctagtgattttctgagtaatatgagtatggacttccagaaccacctcgggtcttgccagaagtgcgatcccagctgtccaaatggatcttgttggggcgcaggtgaagagaactgtcagaagcttaccaaaatcatttgcgcccagcaatgcagtggcagatgccgcggaaaaagcccgagtgattgctgtcataatcagtgcgcagcagggtgtacggggcctagggaatccgactgcctggtgtgtcgcaaatttagggatgaggctacctgcaaggacacttgccccccactgatgctatacaacccgacaacttaccagatggacgtgaacccggaaggaaagtactccttcggcgcaacttgcgtcaagaagtgtccaaggaactacgtggtgaccgaccacggtagctgcgttcgagcgtgcggtgctgatagctacgagatggaggaagacggtgtgcgaaagtgtaagaagtgcgagggaccatgcaggaaggtttgtaacggaatcggtatcggagaatttaaggactctctgtctatcaacgcaaccaatataaagcatttcaaaaactgtactagcatctccggagatcttcacatcctgccggtcgcattccgtggcgatagcttcacccacacgccacccctcgacccccaagagctggacattttaaaaaccgtgaaggagatcacaggcttcctactgattcaggcatggcccgagaaccgcacagacctgcatgccttcgaaaacttagagatcattagaggcaggaccaagcaacacggtcagttcagtctcgcagtggtgtccctaaatattactagcttgggtttgcgctcattgaaagagatttccgatggggatgttatcatcagcggaaataaaaatctgtgctacgcaaacaccattaattggaagaaattgtttgggaccagtggccagaagacgaagataatctcaaaccgcggagagaattcatgcaaggccacgggacaagtatgtcacgccttgtgttcccccgaaggctgttggggaccagaacccagggactgcgtctcctgcagaaacgtcagtcgcggtcgggaatgtgtggacaagtgcaacctattggaaggcgagccgagggaatttgtggaaaacagcgaatgcattcagtgccatcccgaatgtttgccgcaggcgatgaacattacctgcacgggacgtgggccagacaattgcatccagtgtgctcactacattgatggtccacattgtgtcaagacctgcccagcaggagtgatgggcgaaaacaatactcttgtgtggaagtatgctgacgccggtcacgtgtgtcatctgtgtcaccccaactgcacttacggttgcaccggaccaggcctcgagggatgccccactaatggtcctaaaattcctagcatcgctacagggatggtaggtgcacttctgttgctactggttgtggctctcggcattgggctctttatgaggcgcaggcacatcgtgcgaaagaggaccctgaggcgccttctgcaggaacgagaactcgtggagcctctcaccccatccggcgaggcgcctaaccaggccctcctgaggattcttaaagaaaccgaatttaaaaaaatcaaagtactaggcagcggtgctttcgggactgtgtataaggggctttggatcccggaaggcgaaaaagtaaagattcctgtcgcaatcaaggagctccgggaagcaacaagcccaaaggcaaacaaggagattctggatgaagcctatgtgatggcctccgtggacaacccacacgtgtgcaggctattaggcatctgcttgacatctacggtccaactgatcacccaacttatgcccttcggatgccttttggactacgtccgggagcacaaggacaatatcggctcacagtatctgctcaattggtgtgttcaaatcgcgaaaggtatgaactacctcgaggatcgcaggttggtgcaccgcgacttggcggctagaaatgtgctggtcaaaacaccacaacatgtcaaaatcaccgatttcggtctcgctaaactgctgggtgcagaggaaaaggaataccatgcagagggtggcaaggttcctattaaatggatggcactggagagcatcctgcacaggatctacacccaccaatctgatgtgtggagctacggtgttacagtttgggaactgatgactttcgggtcaaagccctacgatggcatcccggcttcagaaatctcaagtattctggagaaaggagagcgcctgccacagcccccaatatgtactatcgacgtgtatatgattatggtaaagtgctggatgattgacgccgatagcagacccaaatttagggagctcattattgaattttccaagatggctagggacccccagcggtatctggtgatccagggcgacgaaagaatgcatctgccgtctcccacagactccaacttttacagagcactcatggacgaggaggacatggacgacgtggtggatgccgacgagtatctcatcccacagcagggctttttctcctcccccagcacctcacggacacctctactgagctctttgagcgctacctcaaataactcgacagtggcatgcatcgataggaacggactgcagagctgtcctatcaaggaggacagttttttgcagcgctactcaagcgacccaactggtgccctgacggaagatagtattgatgatacattcctgccagtgccagagtacattaatcagtccgtcccaaagcgacccgcaggatcagttcagaaccccgtgtatcacaaccaaccgttaaacccagcgccttccagggacccccactatcaggatccccactcaacggccgtgggtaaccccgaatacctcaataccgtgcagcctacttgcgtcaattccacctttgactcgcccgctcactgggctcagaaaggctctcaccaaatctccctcgataatccagattaccagcaagactttttcccaaaagaagctaaaccaaatggtatttttaaaggcagcaccgcagagaatgccgaatatctccgtgtggccccacagtcctccgaatttatcggtgcttag

SEQ ID NO: 28465 - DNA, 1218 bp, synthetic construct
  misc_feature 1..1218: note = Description of Artificial Sequence: Synthetic coding sequence
  source 1..1218: mol_type = other DNA
atgagaccaagtggtacagcgggagccgctctgctcgccctgcttgcagctctctgccctgcttctcgcgctctggaggagaaaaaggtgtgccaaggcacctccaataaactcacccagttagggacttttgaagaccacttcctgtctctccagaggatgtttaataattgtgaggtggtgctcgggaatctggagatcacgtatgtccaacgcaactatgaccttagcttcctgaaaactatacaagaggtagctgggtacgtcctcattgcacttaacacggtagagcggatccctctcgagaatctgcagattatccgcggtaatatgtactatgagaatagctatgctctggctgttctctccaattatgacgccaataaaaccggattaaaggagctgcccatgcggaacctgcaagagattcttcacggggcagtgagattctccaataatcccgctttatgcaacgtggaaagtatccagtggagggatatcgtgagtagcgatttcttatccaatatgtcgatggatttccaaaaccatcttgggagctgccaaaagtgcgatccatcatgtccaaacggttcttgctggggcgcaggtgaagaaaattgccaaaagcttactaaaattatttgtgcccagcagtgctccggaagatgccgtggcaagtctccttctgattgctgtcacaaccagtgtgcagctggttgcacgggtccaagagaatctgactgtctagtctgccggaaattcagagacgaggcaacatgtaaagatacatgcccacccctgatgctctataaccccacaacatatcaaatggacgtcaatcctgagggcaagtattcatttggcgctacgtgcgtgaagaagtgccctagaaattacgtggtgacagatcacggcagttgcgtgagagcttgcggagcagattcttatgagatggaagaagatggtgtgcgtaagtgcaaaaagtgtgagggaccttgcaggaaagtgtgcaacggcattggcattggcgaatttaaagacagcctaagtatcaacgctaccaatattaaacactttaaaaattgtacctcaatatcaggggatctccacattctgccagtagcatttcggggtgactcattcacacatacccccccactggacccgcaggagctcgacattttgaagacggtcaaggagatcacaggtttgtcgtag

SEQ ID NO: 28466 - DNA, 1974 bp, synthetic construct
  misc_feature 1..1974: note = Description of Artificial Sequence: Synthetic coding sequence
  source 1..1974: mol_type = other DNA
atgagaccttcaggcactgccggtgcagcactcctagctctgctggctgccctttgtcccgcatctcgggcactcgaggaaaagaaagtctgccagggtacctctaacaaactgacacagctgggaactttcgaagaccactttctgtccctacagcggatgttcaataactgcgaggttgtgctgggcaatctggaaatcacctatgttcagcgcaactatgacctcagcttcctcaagacaatacaggaggtggcaggctacgtactaatcgcccttaacacagtcgagcgtataccgttggagaatctgcagatcatccggggaaatatgtattatgagaacagttacgctctggcagtgttgagcaattacgacgccaacaaaacagggctcaaggagttgcctatgcgtaaccttcaggagattctccacggagcggtccggtttagtaataaccctgccctctgtaatgtcgagagtatacagtggagagatatcgtcagcagcgatttcctctccaatatgtctatggattttcagaaccatctgggctcctgtcaaaaatgtgatccctcttgccctaatggaagctgttggggcgcaggagaagagaactgtcagaaactgactaaaataatttgtgcgcagcaatgctctggcagatgtaggggcaaaagccccagcgactgttgtcacaatcagtgtgcggctggctgcaccgggcctagagaatcagactgcttggtctgccgcaagttcagggatgaagccacttgcaaggacacctgtccgcctcttatgctgtacaatccaacaacttaccagatggacgtgaacccagaaggtaagtattcctttggcgctacatgtgtgaagaagtgcccacggaattatgtggtaactgatcacggtagctgcgtccgtgcatgcggcgctgattcatacgagatggaagaagatggggttcgaaagtgcaagaagtgcgaaggcccatgccgcaaggtctgtaatggcatcggcatcggcgagttcaaggactccctttccattaatgcaactaacataaagcattttaagaattgtactagcatttcaggcgatttgcacatattaccagttgcttttaggggtgattcctttactcacactcccccattggatcctcaggaactggatattcttaaaacagtgaaggagattaccggatttctgctgattcaggcctggccagagaaccgtacagacctgcacgcgttcgagaacctggagatcataagaggcagaaccaagcagcacggccagttcagcctggccgtggtgtcccttaatataactagcctgggacttcgaagcctaaaggagatctcagatggggatgtcatcatttcaggaaataagaacttgtgctacgccaacactatcaattggaaaaagcttttcggtacatctgggcagaaaactaaaattatatctaacagaggggaaaacagctgcaaggctacaggccaggtgtgtcacgccttgtgttctccggagggatgctggggcccagagccaagggactgtgtctcctgtaggaacgtgagccggggaagggaatgtgttgataagtgcaacctgctggaaggggagcccagagaattcgttgagaactccgagtgtattcagtgccacccagagtgccttcctcaagctatgaacataacttgtacagggagaggtccagacaactgtattcagtgcgcccactatatcgatggccctcattgtgttaaaacctgccccgctggagtgatgggggagaataatactttagtgtggaaatatgccgatgctgggcacgtctgtcacctctgtcaccctaactgtacatacggatgtaccggccctgggcttgaagggtgcccgacaaatggcagttatatcgtatcacacttccctcggagcttttacaagatgagcgttcactag

SEQ ID NO: 28467 - DNA, 3474 bp, synthetic construct
  misc_feature 1..3474: note = Description of Artificial Sequence: Synthetic coding sequence
  source 1..3474: mol_type = other DNA
atgttcaataactgcgaggtcgtgctggggaacctggagatcacttacgtgcaacgcaattacgacctttccttcctgaagaccattcaggaagttgctggttacgtgctcatcgcactcaatactgtggagaggatacctctcgaaaacttacaaatcattcggggaaacatgtattatgaaaactcttatgctctggctgtactgtctaactatgacgccaacaagacagggcttaaggagttgcctatgagaaatctgcaagagatactccacggagctgtacggttctcaaacaatcctgccctctgcaatgttgagtcgatccagtggagggatatcgtgtcaagcgactttctctccaacatgtcaatggacttccagaaccacttaggctcgtgtcagaagtgcgaccctagctgtcccaacgggtcatgttggggagccggagaagagaattgtcaaaaattgaccaaaatcatatgtgctcagcagtgcagcgggaggtgcagagggaagagcccctctgattgctgccacaaccagtgcgccgcaggatgtaccggccctagggagtccgactgtctggtctgtagaaaatttagggacgaggcaacgtgcaaggatacttgtccgccattgatgttgtataaccccaccacctaccagatggacgtgaatcccgagggcaagtactcatttggcgctacgtgcgtcaagaagtgtcccaggaattacgtagtcacagatcatggctcttgtgtacgggcatgcggggctgacagctatgaaatggaagaggatggtgtgcgcaagtgcaaaaagtgtgagggcccatgccgaaaggtgtgtaacggaattggtattggggagtttaaggattctctgtccataaacgccaccaatatcaaacacttcaagaactgcactagtatttctggggacctgcatatactgcccgttgcttttcgcggtgacagcttcacgcacactccacctcttgacccccaggagctcgatatcctgaaaactgtcaaggagataaccgggttcctcctgatacaagcctggcctgagaaccgaactgacctacacgcatttgagaatttggaaataataagaggaaggaccaaacagcacggtcagttttctctagctgtggtcagtctgaacatcacctctctcggcctcagatcgctgaaagagatcagtgacggggatgtgatcatttccggaaacaagaatctgtgctacgctaatacgattaattggaagaaattgttcggcacaagtggacagaaaactaaaatcatttctaacaggggagagaactcttgtaaggctacaggacaagtgtgccatgccctgtgtagcccagaggggtgctggggcccagagccgcgagactgcgtctcgtgccggaacgtgagtagaggtagggaatgcgtggataagtgtaacttactcgagggagaaccacgcgagtttgtcgaaaactcagagtgcatccaatgtcacccagaatgcctgcctcaggctatgaacatcacctgtacagggaggggtccagacaattgcatacagtgcgcacattacatcgatggacctcactgcgtgaaaacctgtcctgccggagttatgggggagaacaacaccctggtctggaaatacgcggatgctgggcacgtgtgccacctctgccatcctaattgcacctacggatgcactggtcccggactcgaaggctgtccaacaaatgggccaaagattccgagtattgccactgggatggttggcgcattactgttgctattggtcgttgcccttggaatcggtctgtttatgaggcgcagacatatcgtaagaaagcgaacactgcggaggttgttacaagaaagggaactggttgagcccctgacccccagtggcgaggctccaaaccaggcactgctcagaattcttaaggaaacggagtttaaaaaaataaaagtactaggttctggagcctttgggacggtgtacaagggcctgtggatcccagagggagaaaaagtgaagatccctgtcgccattaaagagctaagagaagccacctccccgaaggcaaacaaggaaatcctggatgaagcgtacgtgatggcctctgttgataatccacacgtctgccggctgctggggatttgtcttacatcaactgtgcagcttatcactcaattgatgcctttcggatgtctgttagattatgtgagagaacacaaagacaatattggatcccagtacctccttaattggtgcgtgcaaattgcaaaggggatgaattacctggaggaccggaggttagttcacagagacctagccgctcgtaacgtgctggttaagacaccccagcacgtcaaaattacagatttcggactggcaaaactgctcggggctgaagaaaaagagtatcacgctgaaggcggaaaggtccccatcaagtggatggccctcgagtctatcttgcacaggatctatacgcatcagagtgatgtttggtcttatggcgtgacggtgtgggaattgatgacttttggatccaaaccttatgacggcattcctgcgagtgaaattagctctattctggaaaagggagagaggttgccccaaccccctatttgcacaatcgacgtgtatatgattatggtgaaatgctggatgatcgatgccgattcgcggccaaagtttagagaacttattatcgaattctcaaagatggctcgtgacccacagcgctacctagtaatccagggagacgagcggatgcatttgcccagcccaacagacagtaacttttatcgtgctctcatggatgaggaggacatggacgacgtggtagatgccgatgaatacctgattccacagcagggcttcttttccagtcccagtaccagcaggacccctctgctgtcaagtctttctgctaccagcaataattccacagtggcttgtatagaccgcaacggcctgcaatcctgccctatcaaggaagattcttttctccaaagatatagcagtgacccaaccggtgctctcaccgaagattccattgacgacacatttctcccagtgcctgagtatataaatcagagcgtcccaaaacgacctgccggaagcgtgcagaatcccgtctaccataaccagcccctcaacccggctccgtcgagagaccctcattatcaggatccgcattccaccgcagtcggcaatccggagtacctgaataccgtgcagcccacctgtgtcaactccacttttgattcacctgcgcattgggcacagaagggtagtcaccagatttccctagataatcccgattatcagcaggacttctttccgaaggaagccaaacctaatgggatctttaagggcagtactgctgaaaacgcggaatatctaagggtggctccccaatcttccgagtttattggggcatag

SEQ ID NO: 28468 - DNA, 3276 bp, synthetic construct
  misc_feature 1..3276: note = Description of Artificial Sequence: Synthetic coding sequence
  source 1..3276: mol_type = other DNA
atgcgtccttccgggactgccggagctgcactactcgctttgttagccgcactatgcccagccagtagagctttggaggaaaagaaggtgtgccaggggactagcaacaagttgacacagttgggaacttttgaggaccacttcctcagcctgcagcggatgttcaataactgcgaagtcgtgctgggcaaccttgaaataacatacgttcaaaggaattacgacctgagctttctgaagactattcaggaagttgcaggctacgtgctaatagcccttaacactgtggagagaatccccttggagaacctgcaaatcattcgcggtaacatgtactacgaaaattcctatgcactggccgttctgagcaactacgacgcgaataagactggactcaaagagcttccaatgaggaatcttcagggacaaaagtgcgacccttcatgccctaacggctcttgctggggagctggggaagaaaattgccaaaaactgactaaaattatttgcgcgcagcaatgttccggtcggtgccgtggcaagagccccagtgattgctgccataatcagtgtgctgctggatgcacagggcctcgcgagagcgattgcctggtgtgtcggaaatttcgcgatgaggcaacctgcaaggacacatgcccacccctgatgctgtataacccaactacctaccagatggacgtgaaccccgagggcaaatactcatttggcgctacgtgcgttaagaagtgcccccgaaactacgtcgtcacagaccatggctcctgcgtgcgggcttgtggggcagattcatacgagatggaggaggacggcgtcagaaaatgcaaaaaatgtgaaggtccttgccggaaagtttgcaatgggatcggaataggcgaattcaaggactccctctcaattaacgccacgaatatcaagcactttaaaaattgcacatcaatttccggagacctgcacatcctcccggtggcttttcggggtgactcttttacacatactccccctttggatccccaggagctcgatatactgaaaaccgtgaaggaaataacgggcttccttttgatccaggcgtggccagaaaatagaaccgacctacatgcgttcgagaacctagaaataattaggggcaggactaaacagcacggtcagttctctctggcagtggtgtccctgaacattacgagcctcgggctgaggtctttaaaagaaattagtgacggggacgtgattataagcggaaataagaatctgtgctatgccaataccattaattggaaaaagttgtttggaacgtccggccagaaaacaaaaatcattagcaaccgtggagaaaacagctgtaaggccacaggacaggtgtgtcacgccctttgtagcccagaaggctgctggggacccgagcccagagactgtgtctcttgccgaaatgtaagccgcggacgggaatgcgtggataagtgcaacctactcgagggtgaaccccgagaatttgtagaaaattcagagtgcattcagtgtcatccagaatgcctgcctcaggccatgaacatcacatgcactgggagggggcctgacaactgtatacagtgtgctcactatatcgatggacctcactgtgtgaagacatgccctgctggggtgatgggtgaaaacaacaccctggtgtggaaatacgccgacgctggccacgtctgccacctgtgccaccccaattgcacctatggctgtactggacccggacttgagggctgtccaactaacgggccaaaaattccgtctatagctaccggcatggtgggcgcactactcttactactcgtcgttgccttgggcatcggactattcatgcggcgacgacatattgtgcgaaaacggactcttcgacgcctattacaggaaagagaattggttgagccgctgacccccagcggggaggcccctaatcaggccttattaagaattctgaaagaaaccgagtttaagaagatcaaggtgttgggaagtggcgctttcgggacagtgtacaagggactctggattcccgagggtgagaaggttaagattcccgtcgctattaaggaactgagagaggcaaccagccctaaggccaataaggaaatcctggacgaagcatacgtcatggcatccgtggataatccacatgtctgccggctcctcggtatttgtcttacttctactgtgcagctgatcacccagctcatgccctttggttgtctgctggactatgtgagggagcacaaggataatatcggcagccagtacctactgaattggtgtgtacagatcgccaagggtatgaactatctcgaggataggcgccttgttcaccgcgatttggccgctcggaacgtgctggtgaaaacgcctcaacacgtgaaaattacagattttggccttgcaaagctgctgggggcagaggagaaagagtatcatgcagaggggggtaaggtcccgattaagtggatggcgctcgagtctattctgcacagaatttatacccaccagtcagacgtgtggagctacggggtgacggtctgggagctgatgactttcggcagtaagccatacgatggcatcccagcgtcagaaatttcctccattttggagaagggggagcgcctcccacaacccccaatctgtactatcgatgtatacatgattatggtcaagtgttggatgattgatgccgactctcgcccaaaatttcgggaactaatcatcgagtttagcaaaatggccagggacccacagcgctacctggtgatccaaggcgacgagcgcatgcatctgccttctccaactgattctaacttctaccgggcactgatggacgaggaggacatggatgacgtggtggatgcggacgagtatcttatccctcagcaagggtttttcagttcaccaagtacctctcggacccccctgctgtcttcactctctgctacctccaacaatagcaccgtcgcttgcatagaccgcaacgggctgcagtcttgccccatcaaagaggactcattcctgcagaggtactcaagcgacccaacgggagccctcacagaagattccatagatgacacctttttgccagtcccaggcgagtggctggtatggaagcagtcctgttcatctacctcctcaactcattccgctgccgcaagcctccagtgccccagccaggtgctaccacctgccagcccggaaggagaaacagtcgctgacctgcaaacacagtag

SEQ ID NO: 28469 - DNA, 1395 bp, synthetic construct
  misc_feature 1..1395: note = Description of Artificial Sequence: Synthetic coding sequence
  source 1..1395: mol_type = other DNA
atgagttccctgacaaagattatttgcgctcagcagtgcagtggcagatgccgagggaagagtccttccgactgctgccacaatcagtgtgccgctggatgcaccggtccgagagaatctgattgcctcgtgtgcaggaagtttcgcgatgaggccacctgtaaggatacttgcccgccacttatgctttacaatcccactacttaccagatggatgtcaatccggaaggcaagtactccttcggggcaacatgcgtgaaaaaatgtccccgaaactacgttgtgacagaccacgggtcttgcgtgagagcatgtggagcagactcatacgagatggaggaagatggggtgcggaaatgtaagaaatgcgaagggccatgtcgaaaagtgtgcaatggcattgggattggtgagtttaaagattctctgtccatcaatgctacaaatataaaacacttcaaaaactgcacctcgataagtggggacctacacatcttgcctgtggccttcaggggagattcttttacacacacacctccactcgaccctcaggaattagacattctaaagactgtcaaggagattaccggattcctgctcattcaggcttggcctgagaacaggaccgacttgcacgccttcgagaatcttgaaatcatccggggacgaactaagcagcatggtcaatttagtctcgccgtggtgagcctgaacattacatccctgggcttgcggtccctaaaagagatatcagacggcgatgtgatcatctccggaaacaagaatctgtgctatgcgaacacaatcaattggaagaaactctttggcacgagcggacagaaaactaagatcatttccaaccgcggagaaaatagttgtaaagccaccgggcaggtgtgccatgcattatgctcaccagaaggttgttggggacccgagccgagagactgcgtctcgtgtaggaacgtgagcagaggccgtgagtgcgtggacaaatgtaatctattggagggtgagcccagagaattcgttgagaacagtgagtgcatacagtgccatccagagtgtctgcctcaagccatgaatattacttgtactgggagagggcctgataactgtatccagtgcgcccactacatagatggcccacactgcgtaaaaacctgtcccgctggtgtgatgggtgagaataacaccttagtgtggaagtatgccgacgcgggacatgtctgccatctgtgccaccccaattgcacctatggctgtactggccctggactggagggctgtccaacaaatggtcctaagattccctccattgcaaccggcatggtgggggctctgttactcctattggttgttgccctgggtatcggactattcatgagacgatag

SEQ ID NO: 28470 - DNA, 843 bp, synthetic construct
  misc_feature 1..843: note = Description of Artificial Sequence: Synthetic coding sequence
  source 1..843: mol_type = other DNA
atgccggctgacatcatggaaaagaactcatcgagtccagtcgccgctacaccagccagcgtaaacactactcccgataagccaaaaaccgcctctgaacacagaaaaagcagtaaacctatcatggagaaacgaaggcgcgcacgaattaatgaaagtctgagccaattgaaaacattaattttagatgcactgaaaaaggactcctcccgacatagcaaacttgagaaggccgatattctggagatgactgtgaagcatcttagaaatctccagcgagcccagatgaccgccgctctctctaccgatccctcagtgttagggaagtatcgggcaggcttctccgagtgtatgaacgaagtcacaaggttcctgagcacatgcgagggagtcaacactgaggtgagaacccgcctcctgggtcatctggcaaattgcatgacacaaatcaacgctatgacatatcctggtcagccgcaccccgcactgcaggctcccccaccgccacctcctggcccaggagggccacagcatgccccatttgctcccccacctcccctagtgcctattcccggaggagccgcaccgccaccagggggagcgccatgcaaactgggctctcaggcaggtgaagcagcaaaggtattcgggggatttcaagttgtaccggctcctgacggccagttcgccttcctgattcctaatggagcttttgcccattccgggccagttattcccgtctatacatcaaactctgggaccagtgttggtcccaacgcagtgagtccgagttcagggccatctcttacagccgacagcatgtggcgaccatggcggaattag

SEQ ID NO: 28471 - DNA, 57 bp, synthetic construct
  misc_feature 1..57: note = Description of Artificial Sequence: Synthetic coding sequence
  source 1..57: mol_type = other DNA
atggctgaaaacagcgtgctcacatccacaacagggcgtacaagcctggccgattag

SEQ ID NO: 28472 - DNA, 2745 bp, synthetic construct
  misc_feature 1..2745: note = Description of Artificial Sequence: Synthetic coding sequence
  source 1..2745: mol_type = other DNA
atggccgagaattctgtgctgacctccacaacgggcagaaccagcctggccgatagttccatctttgacagcaaggtgaccgagattagcaaagagaatttattgatcggctcgacaagctacgtagaggaggagatgccacaaatcgagacccgtgtaatcctggtgcaggaggctggcaagcaagaagagttaatcaaagctctgaagactatcaagattatggaagtgcctgtgatcaaaattaaagaatcatgccctggcaagtcggatgaaaaactgatcaaatctgtcatcaatatggacatcaaggtgggctttgtcaagatggagtcagtcgaggagttcgaggggctagacagccccgagttcgaaaacgtatttgtagttacggacttccaggacagcgtcttcaatgatttgtacaaagcagattgcagagtcattgggccacccgtggtcctaaattgtagtcagaagggggagcctctcccattcagctgtcgcccactttattgtacctccatgatgaacctggtgttgtgttttaccggttttcgcaaaaaagaggagctagtgcgcctggtgacactggtgcatcacatgggcggagtcatacggaaagattttaacagcaaagtcacacacttagttgccaactgtacgcagggcgagaaattcagagtggcagtgtccttagggacccctattatgaagccggagtggatttataaggcttgggagcgacgaaacgagcaggacttctatgcagcggtggatgacttccggaacgaattcaaggttcctccttttcaggactgtatactgtcttttctgggatttagcgacgaggagaaaactaacatggaagagatgaccgagatgcaggggggaaagtacctgccactcggagatgagcggtgcacccatctggtagtggaagaaaacattgttaaggacctcccattcgagccctccaagaagctgtatgttgttaagcaggagtggttctgggggtcgattcagatggacgccagggccggtgagaccatgtacctgtacgagaaagctaacacgcccgaattgaagaaatccgttagtatgttgtccctaaacaccccaaactctaatagaaaaaggcgacgcctgaaagagaccctggcccaactgtcacgggagacagatgtctctccctttcctccacgtaagcggccatcagctgagcactctttgagcatcgggtccctgcttgacatttctaacacaccggagtcatccattaattacggcgacactcctaaatcatgcaccaagagttccaagtcttcaacaccagtgcctagtaaacagtccgcacggtggcaggttgccaaggaattgtatcaaaccgagtccaactacgtgaacatcctggccaccatcatccaattatttcaggtgccgcttgaggaggaaggacagcggggaggacctatcctggcacctgaagagataaagactatttttggcagtattcctgacattttcgacgtgcacacgaagattaaggacgacctcgaagatcttattgtgaactgggatgagagcaagtcaattggagacatcttcctcaagtactctaaagacctggtaaaaacttacccacccttcgtcaacttcttcgagatgtctaaagaaacgattataaagtgtgagaagcaaaagcctagatttcacgcgttcctaaaaataaaccaggctaagcccgagtgtgggaggcagtctctagttgaactcctgataaggcccgtgcaacggctgccgagcgtggccctcttactgaatgacctgaagaagcacacagccgacgaaaatccggataagtcaaccctggagaaggcaattgggtctctgaaggaggtcatgacacatatcaatgaggacaaacggaagacagaagcccagaagcagatatttgatgtggtttacgaagtggatgggtgcccagccaatctgttgtcgagccatcgcagtctcgtgcagagagtcgaaacaatatccctgggcgaacacccatgtgaccgcggagaacaagtgaccctcttcctgtttaacgactgcctggaaattgccaggaaaagacataaagtgattggaacctttcgcagcccgcatggccaaaccagaccccctgccagtctcaagcacattcacttaatgcccttgagccagatcaagaaagtcttggacattcgcgagaccgaggactgtcataacgcttttgcgctgctcgtcagaccacctactgagcaggctaatgttctactctcgttccagatgacctcggacgagcttcccaaggaaaactggcttaagatgctctgtcgtcatgtggccaataccatctgcaaagccgacgctgaaaacctcatctatactgcagatcccgaatcttttgaagtaaacaccaaggatatggattctacacttagtcgcgcttctagggccattaaaaagacaagcaagaaggtgactagggcattctctttttcaaagacacccaagcgagcgctgaggcgggctctcatgacgtctcatggaagcgtggagggaagaagccccagctccaacgacaagcacgtcatgtcccgcctgagttctaccagctccctggcgggaattcctagcccatccttggtctctctgccctcgttctttgaaagaaggtcccacactctgtctaggtctacgactcatctgatatag

SEQ ID NO: 28473 - DNA, 480 bp, synthetic construct
  misc_feature 1..480: note = Description of Artificial Sequence: Synthetic coding sequence
  source 1..480: mol_type = other DNA
atggcggagaactcagttcttacatcaaccaccgggagaacaagtctggcagactcctcaatttttgattccaaggtcactgaaatctcaaaagaaaacttgttgataggcagcaccagctacgtggaggaagaaatgcctcagatcgagacccgcgtaattctcgtccaggaggctggcaagcaggaagagctgatcaaggcactgaaggacataaaggtgggctttgttaagatggagtccgtggaggaattcgagggtctggactcgcccgagttcgaaaacgtctttgtcgtgaccgacttccaggatagcgtcttcaacgatctctataaagctgattgtagagtgatcggtccacccgtcgtcctcaattgttctcagaaaggagaaccactcccgttcagctgtcgacctctatactgtacttcaatgatgaacttagtgttatgtttcactggatttaggaaaaaggagtag

SEQ ID NO: 28474 - DNA, 2649 bp, synthetic construct
  misc_feature 1..2649: note = Description of Artificial Sequence: Synthetic coding sequence
  source 1..2649: mol_type = other DNA
atggcagagaactcagtgctgactagtaccacggggagaacctctctggcggactcatctatcttcgactcgaaggtaaccgagatcagcaaggaaaatctcttgatcggcagcacttcatacgtcgaagaaatgccccagattgagacgcgtgtgattctggtccaggaagcgggtaagcaggaggagcttataaaggcgctgaaagatatcaaggttggttttgttaaaatggaatccgtcgaagaatttgaggggcttgactcccctgaattcgagaatgtatttgttgtgaccgacttccaggatagtgtattcaacgatctgtacaaggcagattgccgtgtcattggaccccctgtcgtcctgaactgctctcagaagggggaacctctccccttcagctgtagacccctatactgcacaagcatgatgaatctcgtgctctgcttcactggattcagaaagaaagaggagttggtacgcttagtgaccttagtccatcatatgggcggtgtaatcagaaaagactttaactcaaaggtaactcatctggtcgcgaactgcacccagggagaaaagttccgtgtagctgttagtttaggaactcctatcatgaagccggagtggatttacaaagcgtgggaacgcagaaatgaacaggatttttatgctgcagtagacgattttaggaatgagttcaaggtcccgccattccaagattgtatcctttctttcctaggttttagcgacgaagagaagactaatatggaagagatgactgagatgcaggggggtaagtatctgcctcttggagatgagagatgcactcacctcgtcgtagaggagaatatcgtcaaggacctgccttttgaaccaagcaaaaagctttatgtcgtcaaacaagagtggttctggggttccattcagatggacgcgagggctggggaaacgatgtacctctatgaaaaagccaatacgcctgagctgaagaagagtgtctccatgctgagtctgaatacacccaacagcaaccgtaaacgacgtaggctgaaggaaacactcgctcagctcagtagggaaaccgacgtcagcccattcccaccacgaaaaaggcccagcgccgagcactctctgtccatcggttcattgttggacataagtaacacccctgaaagttccatcaattacggcgacaccccgaaaagctgcacaaaaagttcaaaatcatcaacccccgtgccctctaagcagagcgctcgctggcaggttgcaaaagagctgtaccagactgagagcaattatgtaaatatcctggccacgatcattcagctcttccaagtacccctggaggaggaggggcagaggggaggccctattctggcgccagaggagatcaagacaatattcgggtcaattcccgatatattcgacgtgcacactaaaatcaaggacgatctcgaagatctcattgtcaactgggacgaaagtaagagcatcggagacatcttcctgaagtactctaaggacctggtgaaaacctaccccccatttgtgaacttttttgagatgtctaaggagacaataataaaatgtgaaaagcaaaagcctaggttccacgcatttcttaagatcaaccaggcaaaacctgagtgcggacgccaaagcctcgtggagctacttatccggcctgtgcagcggcttccctctgtggccctgctgctgaacgacctgaaaaagcacaccgccgatgagaatccagataaatctacactggagaaggctatcggttctttaaaggaggttatgactcatataaatgaagacaaacgaaagaccgaggctcaaaagcagattttcgatgtggtctacgaggtcgatggttgccccgctaacctcctgtcatctcacaggagcctggtccaaagggtggaaacaatatcactgggggagcatccatgcgaccgcggagagcaagtaacactcttcctgttcaatgactgcctggagatagctcgcaagcggcacaaagtcattggaacgttccggagtccacatggtcaaactagaccaccggctagcctcaagcacattcatctcatgcccctgagccagattaagaaagtcctggatatacgcgaaacggaagattgccacaatgcatttgcattgcttgtccgtccccctaccgaacaggccaatgtgctgctctccttccaaatgacatccgacgagctgcctaaggagaattggctgaagatgctttgccgacacgtggccaacactatttgcaaagcggacgcagagaacttaatctatacagccgatccggagagctttgaggtaaacacaaaagatatggacagcaccttgtctagagcctctcgagccattaagaagacatcaaaaaaggtcacacgcgcatttagcttctctaagactccaaaaagggctctccgcagggcgcttatgacttctcacggatcagtggaggggcgatcccctagtagtaatgataagcacgtgatgtccagactcagctccactagttcactggccggaataccatccccctccctggtgtctcttccaagcttctttgagcgtcggtcccacaccctttccagaagcacaacacacctcatatag

SEQ ID NO: 28475 - DNA, 321 bp, synthetic construct
  misc_feature 1..321: note = Description of Artificial Sequence: Synthetic coding sequence
  source 1..321: mol_type = other DNA
atggccgaaaactcagtgctgacatccaccacgggacgcactagcctggccgacagctccatcttcgattctaaggtgacagaaatctctaaggaaaatttactcatagggtctacatcctacgttgaggaggagatgccccagatagagactagagtgattttggtccaggaggccggaaagcaagaggagttgatcaaagcactgaaggatatcaaagtcggctttgttaaaatggaatcagtagaagaatttgaaggcctagacagtccagagttcgagaacgtgtttgtcgtgactgatttccaggattccgtgtag

SEQ ID NO: 28476 - DNA, 2784 bp, synthetic construct
  misc_feature 1..2784: note = Description of Artificial Sequence: Synthetic coding sequence
  source 1..2784: mol_type = other DNA
atggccgaaaactccgtgctgacgagcactaccggaagaacctctcttgctgatagctccatcttcgacagtaaggtaactgagatttcgaaggagaatctgctgattggctcgacaagctacgtggaagaagaaatgccacaaatcgaaaccagggtcatactagtgcaggaagctgggaaacaagaagagctcatcaaggctctcaaagacatcaaggtcggcttcgtaaaaatggagtcagtagaggaatttgagggcctggactcccccgaattcgaaaatgtgttcgtggtgaccgactttcaggacagcgtgttcaatgatctgtacaaagccgactgtagggtcattggcccaccagttgtcctgaattgcagtcagaaaggggaacccttgcctttcagctgtcgcccactgtactgtacctctatgatgaatctcgtgctttgcttcacagggttccggaaaaaagaggagctggtccgccttgtgacactggtccaccacatgggaggagtgatccggaaggactttaactcgaaggtgacacatcttgtggcaaactgcacccaaggggagaaatttcgcgtcgcggtgtctcttggaacccctatcatgaagcctgaatggatttacaaagcatgggagcgtagaaatgaacaggatttctacgctgccgtggacgactttagaaacgagttcaaggtgccccctttccaggactgcattctgagctttctaggattctctgatgaagaaaagaccaacatggaggagatgactgagatgcagggagggaagtacctgcctttgggtgacgaaaggtgcacgcatctcgtggtcgaggagaacattgttaaggaccttccattcgagccatcaaagaagctgtacgtggtgaaacaggaatggttctgggggtccattcaaatggatgcacgtgccggtgagacaatgtatttgtatgaaaaagcaaatacgcccgaacttaagaagagcgtgtctatgctctctcttaacacccccaacagtaatcgtaagagacgccgtctgaaggagacattagcccagttaagccgggagaccgacgtatcccctttcccgccacgcaagcggccatccgctgaacattccctgagcataggaagcttgttggacattagcaatactcccgagagcagcataaattatggcgacactcctaaatcttgcacaaaatcatctaagtcttccacgccagtgccatccaaacagtcagcacggtggcaggtggccaaggagctttaccagacagagagtaactacgtgaacattcttgctacgataattcaactctttcaggtaccactggaagaggagggccagcgaggcggaccaattctggctccggaggagatcaagacgatctttggcagtatccctgacatctttgacgttcacactaagatcaaggacgacttagaggacctgatcgtgaattgggacgaatctaagtccattggcgacatattccttaaatactccaaggatcttgtcaaaacataccccccattcgttaacttctttgagatgagcaaggagaccatcatcaaatgcgaaaagcagaaacctaggtttcacgcgttcttgaagattaatcaagccaagcccgagtgtggcaggcagtccctcgtggagctgctaatacgcccagttcaacgccttccgtctgttgcacttttgttgaatgatttgaaaaagcacacagccgacgaaaacccagacaagtctacgctcgagaaagccatcgggtcattgaaggaggtcatgacacacatcaatgaggataagcggaagacagaggctcagaagcaaatctttgacgtggtttatgaggttgacgggtgtcctgctaacctgctcagtagccacaggagcctcgtccagcgggtcgaaactatatctctcggggaacatccctgcgatcgcggagagcaggttacactttttctgttcaatgattgtttggagattgcaaggaaacgtcacaaagtgattggtacattcagatccccacatggccaaacacggccacccgcaagcctgaaacacattcatctgatgccgctgtcacagatcaagaaagtcctcgacattcgtgagacagaagattgtcacaacgctttcgccctgctggtgaggcctcctaccgagcaggctaacgtcttactttccttccaaatgacatccgatgagttacctaaagaaaactggctgaaaatgctgtgcagacacgtggccaacacaatttgtaaagcagatgcggagaatctgatttacacggcggatcccgagtccttcgaggtaaatacgaaggacatggactcaaccctctcacgcgcttcccgcgcaatcaaaaagacctccaagaaagtcacgcgcgcattcagttttagtaagacacctaaaagggcacttcgtagggcattgatgacctcacacgggtcagtagagggcaggtccccaagctccaatgataagcatgtcatgtcaaggttaagctccacctcaagccttgcaatcactcactccgtgagcacctccaatgtgataggattcactaagcacgtgtacgttcagaggcttaactcaacgggtggcaggtcacaatactcgtggtttcagtccgtgcgacactcagcctttcgggcttctttttctgaaatcctcgagggtaacacagatttttcaaatttcaagaaggttctatccaagagctctctgacttttgttaaaaattag

SEQ ID NO: 28477 - DNA, 2652 bp, synthetic construct
  misc_feature 1..2652: note = Description of Artificial Sequence: Synthetic coding sequence
  source 1..2652: mol_type = other DNA
atggccgagaattccgtgctcacttctaccaccggaagaacgagtttggctgattccagtatatttgattcaaaggtgaccgaaatatcaaaagagaacctgctgattggctccacctcatacgtagaggaggaaatgccccagatagagacccgtgtcatccttgtacaggaggcaggaaagcaggaagagttgatcaaagccctgaaggacattaaagtgggttttgtgaaaatggagagcgttgaagaatttgagggcctggacagtcctgaattcgagaatgtcttcgtggttacagactttcaggacagtgtgtttaatgatctctataaggccgattgccgcgttatcggccctcccgtggttttgaattgctcacagaaaggggaaccgctgcccttctcctgtcgacccctgtactgtacttcaatgatgaatttggtgctgtgtttcactggatttaggaagaaagaggagctagtgcgacttgtgaccctggttcatcatatgggcggagtgattagaaaagactttaattctaaggtgactcacctggtcgccaattgcactcaaggagagaaatttcgggttgccgtcagcctgggtactccgataatgaaacctgagtggatttataaagcgtgggagagaagaaacgaacaggacttttacgccgcagtggatgatttcaggaacgagtttaaagttccaccttttcaggactgcatattaagcttcctgggatttagtgatgaggagaagactaatatggaagagatgaccgagatgcagggtggcaaatacctgccgctcggcgacgagaggtgcacgcacctcgtcgtggaggaaaacatagtgaaagaccttccgtttgaaccaagtaagaaactgtacgtagtcaaacaagagtggttttgggggagcatccagatggatgccagagctggcgagaccatgtatttgtatgagaaggccaatacaccggagctgaagaaatcggtgagcatgctgagcctgaacacgcctaactctaatcggaaaagaaggcgattgaaggagactcttgcacaactgtctcgggagaccgacgtgagcccctttcctccccgtaaacgcccatccgccgagcattcactgtcaatcggtagtctgctggacatcagcaacacacccgaatcatccatcaactatggggataccccaaagtcttgcacaaagagctcaaagtctagcacacccgtgcccagtaaacagagtgcacggtggcaggtggcgaaggaactgtaccagaccgagtcaaattacgtgaatattctggcgaccattatccagctgttccaggtccccctagaagaggagggccagagaggaggacccatcctcgcaccggaggaaatcaagaccatctttggaagtatccccgatatttttgatgtgcacacaaagatcaaggacgatctcgaagacctcatagttaactgggacgaatctaaaagcattggcgatatttttcttaagtactctaaagacctggttaaaacatacccccctttcgtcaacttctttgaaatgtcaaaagagaccattattaaatgcgagaaacaaaaacccaggttccacgcgttcctcaaaataaaccaggcaaaacctgagtgtggtcgccaaagtcttgtcgaattgctgatccggcctgtgcagagactgccttctgtagctctcctgctgaatgacctgaaaaagcacactgcagacgagaatcctgacaagagtaccctggaaaaagccattggatcccttaaggaagtgatgacccacatcaatgaagacaagcggaagacggaggcccagaagcagattttcgacgtcgtgtacgaggtggatggatgtcccgctaacctcctgtctagccaccgttccctcgtgcagagggtggaaactattagtctcggggagcacccatgcgaccggggtgagcaggtcaccctgttcctgttcaacgactgccttgaaattgcgaggaagagacacaaggttatcggaaccttcaggtcccctcacgggcagacgagaccacccgctagcctgaagcacatacacttgatgccgctatcccaaatcaaaaaggtgctggatataagggaaaccgaggactgccataatgcttttgccctcttagtgcgacctccaacagagcaggccaatgtgctgctcagcttccagatgacgagtgatgaactacctaaggaaaattggctgaagatgctgtgccgacacgtggccaacaccatctgcaaggctgatgctgagaatttgatatacacagctgatccagagtcatttgaagtgaatacaaaagatatggactctaccttgagcagagcatcccgcgctatcaagaaaacgtccaaaaaagtgaccagggctttctccttctcaaaaaccccgaaaagggctctaaggagggcgctgatgacttctcatggatccgtggagggacgcagccccagctctaatgataagcacgttatgtcccgtctcagcagtacttcctcacttgccggaataccctcgcctagtcttgtgtctctcccaagcttcttcgaaagaaggagccacaccctgagcaggtccaccacccacctcatctag

SEQ ID NO: 28478 - DNA, 2745 bp, synthetic construct
  misc_feature 1..2745: note = Description of Artificial Sequence: Synthetic coding sequence
  source 1..2745: mol_type = other DNA
atggccgagaatagcgttctgacctctaccaccgggcgaaccagcctcgctgacagcagcatctttgactcaaaagtcacagaaatcagcaaggaaaacctgttaattggaagcacatcatatgtagaagaggagatgccccagattgagacgcgagtgatcctggtgcaagaagccggaaaacaggaggagctgattaaggcgcttaagaccattaagattatggaggtccccgtcattaaaattaaggaaagttgtcctggcaaaagtgatgagaagctcatcaaaagcgttataaatatggatattaaggtggggttcgtaaaaatggagagtgttgaagagtttgagggattagactctcccgaatttgagaacgtgttcgtggtgaccgattttcaggattccgtgttcaacgatctgtacaaagcggactgtagagtgatcggcccaccagtggtactgaactgcagccagaaaggagagccactgccattttcatgccgacctctctattgtacctccatgatgaatctggtgttatgtttcacaggttttcggaaaaaggaggaactcgtaagactggtaaccttggtacaccacatggggggagtaatcagaaaggactttaattctaaagttacacaccttgtggcaaattgcacacagggcgaaaaatttcgcgtcgctgtcagtctgggaactccaattatgaagccagaatggatctataaagcatgggagcgcaggaatgagcaggatttttacgctgccgtggacgactttaggaatgagttcaaagtgccacccttccaagactgtattctgtcgtttctgggattttctgacgaggaaaagacaaatatggaggagatgacagagatgcagggagggaaatatctccccctgggagatgagcggtgcacgcatctggtcgtcgaggaaaacatcgtgaaagatctgcccttcgagccaagtaagaaactttatgtagtgaaacaagagtggttttgggggagtatacagatggacgccagagccggagagactatgtatctgtacgagaaggcaaatacgcccgagttaaagaaaagtgtgagcatgctatctctgaacacaccaaacagcaacaggaagcggcgtagattaaaggagaccctggctcagctgtcaagagagactgatgtgtcaccctttcctcccagaaagcgtccgagcgccgaacattccctctcaataggatcgctgctcgatattagtaatacccctgaaagcagtatcaactacggcgatacgcctaaatcatgtacaaagtccagcaagtcatcgacccccgttccgtccaagcagtcagctaggtggcaggttgccaaggagctgtaccagaccgagagcaactatgtgaatatacttgctaccattattcagctgttccaggtccctctagaagaagagggccagcgcggaggacccatcctcgccccagaggaaataaaaacaatcttcggctcgatccccgatatcttcgatgtgcataccaagatcaaggacgacctagaggacctaatagtcaactgggacgagagcaagagtatcggcgatattttcctcaagtactcgaaggacctggtgaaaacgtaccccccttttgttaatttcttcgaaatgagtaaggaaacaattattaagtgtgagaagcagaaaccgaggtttcatgcctttcttaaaataaatcaagccaagcctgagtgcggaaggcagagcctggtggagcttctgatcagacctgttcaacgattgcccagcgtggctttgctgctcaacgacttgaagaagcataccgcggatgagaatccagacaagtccacactggagaaagccatcgggagtcttaaggaagtcatgacccacatcaatgaagataaacgaaaaacggaagctcaaaaacaaatcttcgatgtggtctatgaggtggatgggtgcccggctaacttgctgagcagtcatagaagcctggttcaacgcgttgagacaatctcccttggagagcatccctgcgatagaggcgaacaggtaacactattcctcttcaacgattgccttgagattgctaggaagcggcataaggtgatcggaacttttcggtctccacacggtcagacccggccaccggcaagcctgaagcacattcacctgatgccattatcacagattaaaaaagtgttagacattagagaaacagaagactgtcacaacgcattcgctctcctggtccgtccacctactgagcaggccaacgttttactctcgtttcagatgacaagcgacgagcttccaaaagagaactggttaaagatgctctgccgtcacgttgccaacacaatctgcaaggctgacgccgaaaatctgatatacacagccgatcccgaatctttcgaagtaaacacaaaggacatggatagcaccctctcacgggcttcgagagccatcaaaaagaccagcaagaaagtcacgcgcgcattctctttctcaaagacccccaaaagggccctgcgtcgagctctaatgacatcccacggttctgtcgaaggcagatcaccctctagtaatgacaaacatgtgatgtctcgcctcagctctacctcaagtcttgccggaattccctcaccatccctcgtttctctgccaagtttctttgaacgccgtagccacactttgagccgctccaccacccacctaatctag

SEQ ID NO: 28479 - DNA, 1389 bp, synthetic construct
  misc_feature 1..1389: note = Description of Artificial Sequence: Synthetic coding sequence
  source 1..1389: mol_type = other DNA
atgtcgatagctggtgtggctgcccaggagattcgagtgcccctaaagaccgggttcctccataacgggagagccatgggcaacatgagaaaaacgtactggtcctccaggtcagagtttaagaataatttcctcaacatcgacccaatcaccatggcatattctctaaacagtagtgcccaggaacgcctcatccctttgggccatgcttcgaaatctgcgcctatgaatggacactgctttgcagaaaatggtccttctcaaaagtcgagtttgccacctcttctcattcctccttccgagaacctgggtccgcacgaggaggatcaagtcgtttgtggctttaaaaaactaacagtcaatggggtctgtgctagcacacccccactgactccgataaagaattctcctagtctgttcccctgcgcaccactctgcgaacgagggagtagacctctcccccctttgccgattagcgaggctctgtctctcgatgatacagactgcgaagtcgagttcttgaccagcagtgacacagattttctcctcgaagactctacactgtctgacttcaaatacgacgtccctgggagaagatcctttagaggatgcggacagattaactatgcttactttgacacccccgctgtatccgccgctgatctttcatacgtctccgatcaaaacggaggtgtgcctgaccctaatcccccaccgcctcagactcacagaaggctgcgacgatctcacagtggcccagcaggctcctttaataagcctgcaatcagaatatccaactgctgcatacaccgggcaagtccaaacagtgacgaagacaaacctgaggtcccgcctcgcgttcctatacctcccaggccagtgaaacccgattacagaaggtggagcgcagaggtgaccagctcaacctactcggacgaagacaggccaccaaaagtgcccccaagggagcctttaagcccttctaactcacgcaccccatccccaaagtcgttgcccagttaccttaatggagtgatgcccccaactcagagtttcgcgccagatccaaagtacgtcagcagcaaggcactgcaacgccagaactctgaaggtagtgccagtaaagttccatgtatacttcccataattgagaacggaaagaaagttagttccacccattactatctcctccccgaacggccaccctacctcgacaaatacgagaagtttttccgcgaagctgaggagactaatgggggtgcccagatccagccattacctgccgactgcggcatttcatcagcaacagagaaacccgatagcaaaacaaaaatggatctggggggacatgtgaagcggaagcacctgagttatgttgtaagcccctag

SEQ ID NO: 28480 - DNA, 1713 bp, synthetic construct
  misc_feature 1..1713: note = Description of Artificial Sequence: Synthetic coding sequence
  source 1..1713: mol_type = other DNA
atggcccttaagaaatccagtccgtccctagatagtggtgattccgactccgaagaactgcccacgtttgcattcctcaaaaaggaaccaagttcaacgaagcggcgtcagccagaaagagaagagaaaatcgttgtcgtggacataagtgattgcgaagctagctgtccacccgctcctgagttgttttctcccccagtacccgagatcgctgagaccgtaactcaaacccagccagtgaggctgctgtccagcgaatccgaggatgaagaggagttcatccctctggcacaaaggctaacctgtaagtttctgacccataagcaactgtcccctgaagattcgtcctcgcccgtaaagagcgtcctggaccatcagaacaacgagggagccagttgcgactggaaaaaaccctttcccaaaattccagaagtgccactacacgacactccggaacgctccgctgctgacaataaggacctgatcctggatccgtgctgccagctcccggcatatctgtcaacttgtccagggcagagctccagcctggccgtcactaagaccaattccgatattctgcccccacagaagaaaacgaagccatctcagaaggtgcaaggaagagggtcccacggatgccggcagcagcggcaggcgagacagaaagagtcgactcttcgcaggcaggaacggaagaatgcagcgttggtgacaagaatgaaggcccaaagaccggaggagtgtttgaaacatatcatagtggtactggatccagtgctcctgcagatggagggaggcggacagttgctcggggctctgcagacaatggagtgcaggtgcgtgattgaggcacaggctgttccttgcagcgtcacctggcgtaggagggcgggtccttccgaagaccgcgaagattgggtcgaagaaccaacagttctggtcctactgagggcggaggctttcgtctccatgattgacaacgggaagcaggggtccttagacagtaccatgaagggaaaagagaccttgcagggcttcgtgacagatattaccgccaagaccgccggaaaagccctgtcacttgtgatcgttgaccaggaaaaatgctttagcgcccagaaccctccgcgtcggggtaaacagggggctaataagcagaccaaaaaacagcagcagagacaaccggaagcaagcatagggtctatggtgtctagagtggacgcagaggaggctcttgtcgacctgcagctccatactgaggcccaagcacagatagttcagtcttggaaagagcttgccgacttcacatgcgccttcaccaaagcagttgcagaagctcccttcaagaagctccgggatgagaccactttctcattctgtctggaaagtgattgggctggcggagttaaagtcgatctggctggcaggggcttggcactggtttggaggcggcagattcaacagctgaaccgagtctctctggaaatggctagcgctgtggtcaacgcctatccctccccgcaactgctggtccaggcctatcaacagtgcttcagcgataaagagagacagaatctgctggccgatattcaggtgaggcgcggtgaaggtgtgaccagtacatcaagacgtatcggaccagagctgagtagacgcatttatctgcagatgaccacactccagccacacctttcccttgattctgccgactag

SEQ ID NO: 28481 - DNA, 1752 bp, synthetic construct
  misc_feature 1..1752: note = Description of Artificial Sequence: Synthetic coding sequence
  source 1..1752: mol_type = other DNA
atggccctgaagaaatcatcaccgtcactggacagtggcgactctgactctgaagaactgccaacttttgcgtttctcaaaaaggagccttcctcaacgaagcggagacagccagagagagaagaaaaaattgtcgtagtggacattagcgactgcgaagcttcatgcccaccagctccagaactgttttctccacccgtccccgagatcgcggaaacagtgacccagacacagcctgttcggctgcttagctccgagtccgaggacgaggaagaattcattccacttgctcagaggcttacctgtaagttcctaacccataagcagcttagtcctgaagatagttcttcaccggttaagagcgtgttggaccaccagaacaacgagggtgcctcttgtgattggaaaaaaccttttcctaagattccggaggttcctttgcacgatacacccgagcgctccgccgctgataacaaagacctgatactcgacccctgttgtcagctccccgcttaccttagcacgtgtcctggccagtccagctccctggctgtgacaaagaccaactccgatatcctgcctccccagaaaaaaacgaagccctcgcagaaggttcagggacgtgggtcgcacggctgtaggcagcagagacaggcccgacagaaagagtccaccctgcgtcgacaggagaggaagaatgcagcgctggtgacaaggatgaaagcacagcgcccagaggaatgtctgaaacatattatagttgtcctggatcccgtgcttcttcagatggagggagggggacagctgttaggcgctttgcagacaatggagtgtcgctgcgtgatcgaggcacaggccgtgccgtgcagcgtgacttggcgcaggagagcaggtcctagtgaggaccgcgaggattgggtggaggaacctacagtacttgtcctcctacgcgcagaggctttcgtgtcaatgattgataatggcaagcagggttccctggatagcaccatgaagggcaaagaaactcttcaggggtttgtgacagacatcacagccaaaacagctgggaaagcactttccctcgtgatcgtggaccaagaaaagtgcttttcactggaactgctgttcttcgacttcctgccctgtacctccgcacagaatccacctcggagagggaaacagggcgcaaataagcaaactaagaagcagcagcagcggcagccggaagcttccatcggcagcatggttagtcgagtcgacgcagaggaggcccttgtggatctgcaactgcacacagaggctcaggcacagattgtgcagagctggaaagaactggctgattttacctgtgcattcacgaaagccgtggcagaggcccctttcaaaaagctccgagatgagaccacgttttcattctgcttagagtctgactgggccggtggcgtcaaggtggacctcgcgggaaggggacttgccctagtgtggaggagacagattcagcaactgaacagggtctcactcgaaatggcatccgcggtggtgaatgcttacccctccccccagctattagtgcaagcttaccagcagtgcttctctgacaaggaacgacaaaatctgctcgctgacatccaggttaggaggggcgagggagtaactagtacatctaggcgaatcggtcctgagctctcacggcgtatatatcttcagatgactaccctccaaccccacttgagcctggattccgcagattag

SEQ ID NO: 28482 - DNA, 1752 bp, synthetic construct
  misc_feature 1..1752: note = Description of Artificial Sequence: Synthetic coding sequence
  source 1..1752: mol_type = other DNA
atggccttgaagaaatcttcccccagcctggactccggcgacagcgactccgaggagctcccgactttcgcgttccttaagaaggaaccgtcaagtaccaagcgacggcagcctgaaagggaggagaaaatcgtggtggttgatatttccgactgtgaggcttcttgtccacctgcccctgagcttttcagcccgcctgtcccagagatcgccgagaccgtaacacagacccagccagtgagactactgagtagtgagtccgaagatgaggaagagtttataccactggctcagcggctcacctgcaaatttctgactcacaagcaactgtctccagaggactcatcctcgcccgtcaagagcgtgctagaccaccaaaacaacgaaggcgcatcatgcgactggaaaaagccatttccgaagattcccgaggtcccgctgcacgacaccccagagcggtcggctgctgacaacaaagatctgatactagacccctgttgtcagcttccggcttaccttagcacctgtcccggacaatccagctctctggccgtcactaaaactaatagcgacatcctaccccctcaaaagaagacgaaaccgagtcagaaagtccagggccgaggtagccacggatgtcgccagcaacgccaggctaggcagaaggagagcacacttaggcgtcaggagaggaagaacgccgctctagtcactagaatgaaagcccagcggcctgaggagtgcctgaaacacatcatcgtggtgttggaccccgttctactgcagatggaaggcggaggccagctgttaggagccttgcaaaccatggaatgccggtgtgtaatcgaagctcaggctgtgccctgctcagtaacttggagaaggcgggctggtccatctgaggatcgcgaggactgggttgaggagcccacagtgttggttttattgcgcgcagaggccttcgtcagcatgatcgataacggcaagcagggttctctggacagcactatgaagggcaaggagacgctgcagggctttgtcacagacatcactgccaagactgccggtaaagccttgtctcttgttattgtggatcaggagaagtgtttttccttggagctcctgttcttcgacttccttccatgcaccagtgctcaaaaccctccaaggcgaggtaaacagggggcaaacaagcagaccaaaaagcagcaacaaagacagccggaagcaagtattggcagtatggtgtcccgtgttgacgccgaggaagctctcgtggatctgcagctgcataccgaagcgcaggcacagatcgttcaatcgtggaaggagcttgcggatttcacttgcgcatttactaaggccgtcgctgaggccccattcaaaaagctgcgggatgagacaaccttcagtttttgcttagagtctgattgggcaggcggtgttaaagtggacctggccggaaggggtctcgccctggtctggcggagacagattcaacagttaaaccgagttagtttggagatggcctccgccgttgtgaatgcttatcctagtccccagctgctggttcaggcttatcaacagtgtttttctgacaaggagaggcaaaatctgctggctgacatccaagtgcggagaggggagggagtgacgtctaccagtcgcagaattggaccagaattgagcagacgtatctaccttcagatgactacgctgcagccccatttgagtttagattctgcagattag

SEQ ID NO: 28483 - DNA, 684 bp, synthetic construct
  misc_feature 1..684: note = Description of Artificial Sequence: Synthetic coding sequence
  source 1..684: mol_type = other DNA
atggccgatcttttgggctcgatcctgtccagcatggagaaaccacctagcctcggcgatcaagagacccgcagaaaggcacgggaacaagccgctagactaaagaaattgcaagagcaagaaaaacagcagaaggtggaattccgaaagcgtatggagaaggaggtttccgacttcatacaagattcaggacagatcaaaaaaaagtttcagccaatgaataagatagagcgatccatccttcacgacgtggtggaagtggcaggtcttaccagttttagtttcggagaggatgatgactgtaggtacgtgatgatcttcaagaaagaattcgctcctagtgacgaggagttagactcttaccgcagaggggaagaatgggatccacagaaagctgaggagaaacgcaagctgaaagagctggcccagaggcaagaagaagaggcggctcagcaaggccctgtcgtggtgtctcccgcatcagactataaagataagtactcccatctgattggcaagggcgcagctaaggacgccgctcatatgcttcaggccaacaaaacctatggctgcgtcccggtggcgaacaaaagagacacaaggagtatcgaagaggcaatgaacgaaattagggctaagaaacgcctgagacagagtggcgaggaactgcccccaacaagctag

SEQ ID NO: 28484 - DNA, 1788 bp, synthetic construct
  misc_feature 1..1788: note = Description of Artificial Sequence: Synthetic coding sequence
  source 1..1788: mol_type = other DNA
atgacaatgactttacatacgaaggcatcaggcatggcgctgctgcaccagatccagggcaacgagttggaaccgttgaatcgacctcagttgaaaatccctctggagcggccattaggcgaggtgtatctggacagttctaaaccggcagtttataattatccagagggagctgcatacgaattcaacgctgcagccgctgctaacgcccaggtgtacggccagaccggactcccttacgggccaggctcagaggccgctgcgtttgggtccaatggtctaggagggtttcccccactcaacagcgtaagtccctccccactgatgttactccatcctcctccccagctctctccttttctgcagccccatggtcagcaagtgccatattacttagagaacgaacccagcgggtataccgtgcgcgaggccggtccccctgcattctacaggcctaatagcgacaaccggaggcagggcggacgtgaaagactcgcctctacaaacgacaagggctccatggctatggagagtgctaaggagacacgttattgcgccgtctgcaacgactacgctagtgggtaccattacggggtgtggtcctgtgaaggatgtaaggcgttttttaaaagatccattcagggccacaatgactatatgtgcccggcaaccaatcaatgtaccatcgataagaatagaaggaaatcgtgccaagcatgtcgccttagaaagtgttatgaggttggaatgatgaagggcggtattcggaaggaccggagaggtggcaggatgcttaaacacaagcgtcagagggacgacggagaaggtaggggagaggtgggctcagcaggggacatgagggccgctaatctctggccaagccccctcatgattaagcggtcaaaaaaaaactcactggcgctctccttaacagcagatcagatggttagtgcattactggacgcagagcctcctatcctctatagcgagtacgatccaaccaggcctttcagtgaggcgtccatgatgggcctgctgactaatctagctgacagggagctagtgcacatgattaattgggctaagcgcgtgcccggttttgtggacttaacattacatgaccaggtgcatctcctcgagtgcgcctggctcgagatcctcatgattggactggtctggcggagcatggagcaccctgggaaattgctgtttgctccaaacttacttctcgaccggaaccaggggaaatgcgtggaaggcatggtcgagatcttcgatatgcttttagccaccagttctaggttcagaatgatgaacttgcagggtgaggagtttgtgtgtctgaagagtattatccttctgaactctggtgtgtacacctttttgtcctcaaccctgaagtcactcgaggaaaaggaccacattcatcgagttctggacaagataaccgatactttgatccatttgatggcgaaggcaggcctaaccctgcaacagcaacaccagagactcgcccagttgttgcttatcctatcacatatcagacatatgagtaacaaagggatggaacatctctactcgatgaaatgcaagaatgtggtacctctgtacgatctcttactggaaatgttagacgcccatcgcctgcatgcgccaacctctcggggtggggctagtgtggaagaaaccgatcagagtcacttagcaacagccggttcaaccagttcacatagcttgcagaaatactacatcactggcgaggctgagggatttccggcaacagtgtag

SEQ ID NO: 28485 - DNA, 549 bp, synthetic construct
  misc_feature 1..549: note = Description of Artificial Sequence: Synthetic coding sequence
  source 1..549: mol_type = other DNA
atggagtccgctaaagagactcgatactgtgcagtttgcaacgactacgcttccggctaccattacggtgtctggtcttgcgaaggttgcaaagcttttttcaaacgcagcatacagggacacaatgattacatgtgccctgccaccaaccagtgtactatcgacaaaaacaggcgaaagagctgccaagcctgcaggctgagaaagtgttatgaggtgggaatgatgaaaggaggaattcgcaaagatagacgaggcggtcgcatgctcaagcacaagttacttctgattctgtcccacataaggcacatgagtaacaaaggcatggaacacctctactcaatgaaatgtaagaacgtggtcccactatacgatctattacttgagatgctcgatgcacaccgactacacgccccaacatcgcgaggtggggcatctgtcgaagaaaccgaccagtctcatctggccaccgcagggtcgactagttcccactctctgcagaaatactacattactggggaggccgaagggttccctgcgaccgtgtag

SEQ ID NO: 28486 - DNA, 255 bp, synthetic construct
  misc_feature 1..255: note = Description of Artificial Sequence: Synthetic coding sequence
  source 1..255: mol_type = other DNA
atgacaatgacattgcacacgaaagcctcaggtatggctctgcttcaccagatacagggcaacgaactcgaacccctgaacagacctcagctgaaaatccctctggagcggccactgggagaggtgtacctggattctagcaagccagccgtttataactaccccgaaggggctgcctacgagttcaatgcggctgcagccgctaatgcccaagtgtacgggcagacagggctgccgtatgggccaggctcgtag

SEQ ID NO: 28487 - DNA, 1005 bp, synthetic construct
  misc_feature 1..1005: note = Description of Artificial Sequence: Synthetic coding sequence
  source 1..1005: mol_type = other DNA
atgactatgaccctgcacactaaagcctccggcatggcgctcctgcaccagatccagggcaatgagcttgaacctctcaacagaccgcagctgaaaattcctctggaaagacctttaggggaagtctacctggattcgagcaaaccggctgtttacaactaccccgagggcgcagcttacgagtttaatgccgctgcggctgccaacgcacaggtatacgggcagacagggttgccctatggacccggatcggaagcagcggcattcgggagcaacggcttgggcggtttcccccctctcaatagtgtgtctcccagccccttgatgttattacacccacccccacagttaagccctttcctgcagccacacggacagcaggtgccttactacctggagaacgagcctagcggatatacagttcgagaagcgggaccccctgcattttaccggaaccaggggaaatgcgtcgagggaatggtggaaatcttcgacatgctgcttgcgacctcttcccgattcagaatgatgaacttgcagggcgaagagtttgtgtgtctgaagtctatcatcctactcaattccggtgtgtacaccttcttgtcttctactcttaagtctctggaagaaaaagaccatattcacagggtgttggacaaaattacagacacactcattcacttgatggctaaggccggactcaccctccaacaacagcaccagcggttggcccagttgcttctgatactctctcatatcagacatatgagcaataaaggaatggaacacctttactctatgaaatgcaaaaatgtggtgccactgtatgacctgctactcgagatgctagatgcacaccgtctccatgccccaacatcgcgcggaggcgcaagcgtggaagaaaccgaccaatcgcatctagcgacggctggtagtaccagctcccactctctgcaaaagtattacatcacaggcgaagctgagggtttccccgctactgtgtag

SEQ ID NO: 28488 - DNA, 324 bp, synthetic construct
  misc_feature 1..324: note = Description of Artificial Sequence: Synthetic coding sequence
  source 1..324: mol_type = other DNA
cacaacgactacatgtgcccagcgaccaaccagtgtaccatcgataaaaaccgtcgcaagtcctgtcaggcatgccgcttgagaaaatgttacgaggtcgggatgatgaaggggggatttgttgatctcactctgcacgaccaggtccacttgcttgagtgcgcgtggttggagatccttatgataggtcttgtctggaggagcatggagcaccccggaaagctcttgtttgcgccaaatctcctgctggacagaaaccaaggtaaatgcgtagagggaatggtggagatttttgacatgctcctggccaccagtagccgctag

SEQ ID NO: 28489 - DNA, 1167 bp, synthetic construct
  misc_feature 1..1167: note = Description of Artificial Sequence: Synthetic coding sequence
  source 1..1167: mol_type = other DNA
tgactgaagattatttcatgccaaccatccgacaaaccagtgccccctggagagaatgcccctgaatggcgcgcaggccagcctggcagcgctcctcgtagtcactgcggcagatcggcagccggacctggccaccgtcgtccactgtgtgattttaacggcgagggacctaattccgacaaccgacgccagggtggtcgcgagcgcctggcttctacgaacgacaaaggaagcatggcaatggagtctgcgaaagagactcggtactgtgccgtgtgcaatgactatgcatcaggttaccactacggggtctggtcctgcgaggggtgtaaggctttttttaagaggtcgatccagggccataacgattatatgtgtcccgctaccaatcagtgtactatcgacaaaaatagacgaaagtcatgccaggcttgtcgtctgcggaagtgctacgaagtgggcatgatgaaaggcggaatccgcaaagaccgccgtggtggccgtatgctaaagcataaaaggcagagggatgacggggagggcaggggggaggtgggctccgccggagatatgagggcggcaaacttgtggcccagtcccctgatgatcaagcggtctaaaaagaattctcttgcattgtctctaacagccgatcagatggttagtgctctgctcgatgcggagccgccaatcctgtacagtgagtatgaccccacgcgacccttctccgaggcttccatgatgggcttgctgacaaacttggccgatcgcgagctggtgcatatgatcaattgggccaagagggtgcctggctttgtggatcttacactccacgatcaagtccatctcctcgagtgcgcctggcttgagatcctgatgatcgggctcgtctggcgatcaatggagcaccccggaaagctgctgttcgcacctaacctgcttttggaccggaatcaggggaaatgtgtagagggcatggtcgaaattttcgatatgctgcttgcgacctcgtctcgcttccgaatgatgaatttacagggggaggagttcgtgtgcctgaaaagcattattctactgaacagcggaatatctcacgtagaggccaaaaaacggattctgaacctccatccaaaaatcttcggtaacaaatggtttcctcgagtgtag

SEQ ID NO: 28490 - DNA, 813 bp, synthetic construct
  misc_feature 1..813: note = Description of Artificial Sequence: Synthetic coding sequence
  source 1..813: mol_type = other DNA
atgtgccccgctacaaaccagtgtactattgacaagaaccgacggaagtcatgccaggcatgtcggttgcgcaagtgctacgaagtcgggatgatgaaggggggaatacgtaaagaccggaggggtgggcgaatgctgaaacacaaacgtcagcgggatgatggagagggacggggtgaagtcgggagtgcgggagacatgagagccgctaacttatggccatcacccctcatgattaaacgttccaagaagaatagcctcgctctgagcctaactgccgatcaaatggttagcgccctgttggacgctgagcctccgattttgtacagcgagtacgatcccacacgtcctttcagcgaagcgtctatgatgggcctactgacaaacctggcggacagggagctggtgcacatgatcaattgggccaagcgggtacccggattcgtcgacttaactttacacgaccaggtccatcttctcgaatgtgcgtggctggagatcctgatgatcggcctggtctggaggtctatggagcatcccggaaagctcctttttgcgcctaatttactgctggactctaacaagggaatggaacacctttattcgatgaagtgcaagaacgtggttccactgtatgatttgttgctcgaaatgttagacgcgcaccgattacacgcacccacctcccgtggaggcgctagcgtggaggagacagaccaatcccatctagcaactgccggttccacgagttctcattcccttcagaaatattacatcacaggcgaagctgagggctttccagcaactgtgtag

SEQ ID NO: 28491 - DNA, 1572 bp, synthetic construct
  misc_feature 1..1572: note = Description of Artificial Sequence: Synthetic coding sequence
  source 1..1572: mol_type = other DNA
atgactatgactctgcatactaaggcgtctggcatggcactactccatcaaatccaggggaatgaacttgagccccctccactaaattctgtaagtcccagccccctgatgttgctgcatccacctccacagctgagtcccttcctccagccccacgggcagcaggtcccctattatctggagaatgaacctagtggatacactgtccgtgaagcaggccctcccgctttttatcggccaaattctgacaacaggcgccaaggcggtagggagcgtctcgcatccacgaatgacaaggggtccatggctatggaatcagccaaagagacgaggtattgcgctgtgtgcaatgattatgctagtggataccattacggtgtgtggtcgtgcgaaggatgcaaggcattttttaagagatctatccaggggcacaatgattacatgtgccctgcaaccaaccagtgtactattgataaaaatagacgcaaaagttgccaggcctgcaggctacgcaagtgttacgaggtggggatgatgaagggaggcatccgtaaagatcgcagaggtggtcgtatgttgaagcacaagcgccagcgggacgacggcgaagggaggggggaagtgggttccgccggagatatgcgcgcagctaacttgtggccttcacctcttatgattaaacgctccaagaagaattcactcgctctctcacttacggcggaccagatggtcagcgcactcctagacgcagagccaccgattctttactccgaatacgacccaacgcggccatttagcgaggcttctatgatgggcctcctgacaaacctggccgatagggaactggtacacatgatcaactgggccaaaagagtgccaggcttcgtcgaccttaccttgcatgaccaggtccaccttctggaatgcgcctggttagaaatactgatgatcggtttagtgtggaggtccatggagcatcccggaaaactcctgttcgcacccaacctcctgcttgaccgaaaccagggtaagtgcgtggaaggcatggttgagatctttgacatgctgctggccacgagcagccgattcaggatgatgaatctccagggcgaagaattcgtgtgtctcaaaagcattattctgctcaactccggcgtatacaccttcctgtcttccacattgaagtcattagaggagaaggatcacattcacagagttttagataagattacagataccctgatccacttgatggccaaggcaggactgaccctgcagcagcaacaccagagactcgctcagttattgttaattctgagccacatccggcatatgagcaacaagggcatggaacatctttactcaatgaaatgcaaaaatgtagtcccactgtacgatcttcttctagagatgttggacgcacaccgactgcacgccccaaccagcagagggggagcctccgttgaagagaccgaccagtctcacttagctacggccggttcaacaagttcacattctttacagaaatactacataaccggggaggcggagggtttcccagccacggtgtag

SEQ ID NO: 28492 - DNA, 1788 bp, synthetic construct
  misc_feature 1..1788: note = Description of Artificial Sequence: Synthetic coding sequence
  source 1..1788: mol_type = other DNA
atgacaatgacgttacacaccaaagccagtgggatggccctgctgcatcaaatccaggggaacgagctggagcctctgaacagaccacaactgaaaatcccactcgagcggccactgggcgaagtctacctggattctagtaagcctgcagtttacaattaccctgagggagcagcatacgagttcaatgccgcagctgcagctaatgctcaggtttacgggcagaccggtctcccctacggcccagggtccgaagcagcggctttcggcagtaacggcctcggaggattccccccactgaacagtgttagcccctcacccctgatgctgttgcaccctcctccccagctgagccctttcctgcaaccgcatgggcagcaggtaccttattatctggagaacgagccctccgggtacacggtccgcgaggctggaccaccggcattttacagaccaaattcggataaccgccgtcagggtgggagagagaggctggcctctacaaacgacaaaggcagcatggctatggagtccgctaaagaaacacgttattgtgccgtttgcaacgattatgcctctggctaccattacggagtgtggagttgtgagggctgcaaggcctttttcaagcggtccatccaaggtcacaatgattatatgtgcccagcgacaaatcaatgtaccattgacaaaaaccgtcgaaaatcatgccaggcttgtcggctgcgtaagtgctacgaggtgggcatgatgaagggcggaatccggaaagacaggaggggaggaaggatgctgaagcacaagaggcaacgcgatgacggagaagggagaggcgaagtcggctcagcgggagatatgcgggcagccaacctgtggccaagtcccctcatgatcaaaaggtccaagaagaattcacttgctcttagcctgacagctgaccagatggtctctgctctgcttgatgctgagcctcccattctgtactctgagtacgatcccacgcgtcccttcagtgaggcttctatgatggggctgttaaccaacctggccgaccgggagttagtgcacatgatcaactgggcaaaaagggtgccaggctttgtggatctgacactgcacgatcaggtgcatctgctagaatgcgcatggctggagattttaatgataggcctagtgtggaggagcatggaacatccaggaaagctgctgtttgcacctaaccttctcctggaccggaaccaaggcaagtgtgtggaggggatggtggaaattttcgacatgctgctcgccacctcatcacggtttcgcatgatgaacctgcaaggggaggagtttgtgtgcttaaaatccataattctcctgaactctggagtgtacacatttcttagtagcacactgaagtccctggaggaaaaggaccacatccacagagtgctggacaaaattacagatacgctcatccatttaatggccaaggccggactgaccctgcagcaacaacaccagcgtctggcccagctgctgctcatcctctcccacataaggcacatgtcaaataaaggaatggaacatctctactctatgaagtgtaaaaacgtggttcccctgtatgatctgctgctcgagatgcttgatgcgcaccgcctccatgctcccacatctcgagggggagcctctgtggaagaaacagaccagagtcacctcgctacagcgggtagcacgtccagccatagcttacagaaatactacattaccggagaagcagaagggtttcctgctacagtgtag

SEQ ID NO: 28493 - DNA, 1788 bp, synthetic construct
  misc_feature 1..1788: note = Description of Artificial Sequence: Synthetic coding sequence
  source 1..1788: mol_type = other DNA
atgactatgactctgcacacaaaggccagtggtatggccctgctccatcaaatccagggaaacgagctggagccactgaatcgacctcagctcaagatcccgctggaacgaccgcttggcgaggtgtatttggattcctctaagccagccgtttataattatcccgaaggcgctgcttacgagtttaacgcagctgccgctgcgaatgctcaggtatacggacagacgggtctgccttacgggcctggtagcgaagccgcagcctttggatctaatgggctcggcggattccccccactgaactccgtgagtcccagcccccttatgctgctgcatccgcctccccagctaagtcctttccttcagccccacgggcaacaagttccatactacctcgagaacgaaccttccggatacacagttcgcgaagccggtcctcctgccttttatagaccaaactctgataaccgcaggcaggggggaagagaacgcttagcttccactaatgacaaagggagcatggctatggaatctgctaaggagaccaggtactgtgcggtgtgcaatgattatgcttccggctaccattacggagtctggtcatgcgagggctgcaaggctttttttaagcgaagtatccagggccacaatgactatatgtgccctgcgaccaatcagtgcactatcgacaagaatcgacgaaaatcctgtcaggcctgccggttgaggaagtgctacgaagtaggtatgatgaaagggggaattcgtaaagatcgaagaggaggtcggatgctcaaacacaaaaggcagcgggacgacggcgaaggcagaggggaggtgggatccgccggagacatgcgagccgcaaacttgtggccttccccactcatgattaaacgatccaaaaagaatagcctggccctgtccctcactgctgaccaaatggtgagcgccctgttagacgctgagcccccaatcctatacagtgagtatgacccgactcgacccttttctgaagcatctatgatggggctgctgacaaacctagctgatcgggaacttgtgcatatgatcaactgggcgaagagagttccaggtttcgttgatctaacccttcacgatcaggtccacctccttgagtgtgcctggttggaaatccttatgattgggcttgtgtggaggtccatggagcatcctggcaaacttctgtttgcaccaaatctactgctcgacaggaaccagggcaagtgtgtggaggggatggtggagatctttgatatgcttttggcgacttccagcagatttcgcatgatgaacctgcaaggggaggaattcgtgtgtttgaagtctatcatactactcaactccggcgtctacaccttcctgagttccacgctcaaatcccttgaggaaaaggaccacatccatcgagtccttgataaaatcactgacactcttatacatctgatggctaaggcaggtttgaccctccagcaacagcatcaacgcctcgcacagctgttacttattctgagtcatataagacacatgagcaacaaaggcatggaacacctttacagcatgaagtgcaagaatgtcgtgccactgtatgacctgctgctagagatgttagacgcacatcggcttcacgctcccacatcacggggaggagcttcagtcgaggagacggaccagtcccacctcgcaaccgccggatctacaagttcacacagcctgcaaaagtattatattaccggggaggctgaaggcttccctgccaccgtgtag

SEQ ID NO: 28494 - DNA, 348 bp, synthetic construct
  misc_feature 1..348: note = Description of Artificial Sequence: Synthetic coding sequence
  source 1..348: mol_type = other DNA
atgactatgaccctacacaccaaggcttccgggatggctctgttacaccagattcaggggaatgagctggaacccctgaataggccacaactgaagatcccacttgagaggcccctgggagaagtgtatctcgattccagtaagcctgccgtctacaattatcccgaaggagctgcttatgagtttaacgcagccgctgccgctaatgcacaggtgtatgggcagactgggttgccttacgggccaggttccgaggcggctgcttttggctccaacgggttgggcggtttcccacctttgaattctgtctcacccagccccctgatgctgttgcacccaccgccatag

SEQ ID NO: 28495 - DNA, 1452 bp, synthetic construct
  misc_feature 1..1452: note = Description of Artificial Sequence: Synthetic coding sequence
  source 1..1452: mol_type = other DNA
atgaccatgaccctgcacaccaaagcgagcggcatggcacttctccatcaaatccaaggaaatgaattagagccccttaatcggccacagctcaagatcccactggaaaggccattgggcgaagtctacttagattcctctaagcctgccgtgtacaactatccggaaggcgcagcctacgaattcaacgctgccgctgccgctaacgcacaggtgtatggccagacagggctgccctacgggccaggaagcgaggcagctgcctttgggagtaacggcctcggtggattccctcctttgaactcagttagcccatcaccactaatgcttctgcatcctccaccccaactgagccccttcctgcagccccacggccaacaggtgccttactacttggaaaatgaacccagcggctacacggtccgagaagccggacctcctgctttctaccgacccaattctgacaacaggcggcagggtgggagggagcgtctggccagcacgaacgacaaagggagtatggctatggaaagcgctaaagagacccgctactgcgctgtgtgtaacgattacgcctccgggtaccattatggtgtatggtcttgcgaaggatgcaaggcatttttcaagagatcaatccagggtcataacgactatatgtgccctgccaccaatcagtgcaccattgacaaaaacagacgcaaatcgtgtcaggcatgtcggctgcgcaagtgttatgaagtgggcatgatgaaaggaggtttcgttgatctgacacttcacgatcaggtccacctgctggagtgcgcctggctggaaattctcatgattgggctggtctggagaagtatggaacaccccggaaagttgctttttgccccaaacctgctgctggaccggaaccaggggaagtgtgtcgaaggcatggtagaaatttttgacatgctcctggccacatcttcccggttccgtatgatgaatctgcaaggcgaggagttcgtgtgcctcaagagcattattcttctcaactccggggtgtatactttcctgtcctcaaccctgaagagtctcgaggaaaaagaccacattcaccgggttctggacaaaatcactgacaccctgattcacctcatggcgaaagcaggcctgacactccagcagcagcaccagcggctcgcacaactcctgctgatactttctcacattaggcacatgagtaacaagggaatggagcacctctatagcatgaaatgcaagaacgtcgtccccctgtacgacctcctgctggagatgctcgacgcccataggctgcacgctccaacaagcaggggtggcgcatcagtggaggaaacagaccaatctcatctggcaaccgccggatctacaagttcccacagcctccagaaatattacatcactggcgaggccgaaggcttccccgctactgtgtag

SEQ ID NO: 28496 - DNA, 933 bp, synthetic construct
  misc_feature 1..933: note = Description of Artificial Sequence: Synthetic coding sequence
  source 1..933: mol_type = other DNA
atggccatggagagtgcaaaggagacccggtattgcgcagtctgtaacgattatgccagtgggtaccactatggggtctggagctgtgaaggctgcaaagccttcttcaaaaggtctatccaaggacacaatgactatatgtgcccggcaaccaatcaatgcaccattgacaagaataggcgtaaatcttgccaggcctgtaggctgcggaaatgttacgaggtggggatgatgaaaggtggtatcaggaaagacaggagaggtggcagaatgttgaagcataaaaggcagagagacgacggggaaggtcgaggtgaagtcgggtccgcgggagatatgcgggctgcaaatctctggccgtccccgctgatgattaagcgcagcaaaaaaaattctttagctctttcgctgacagcggaccagatggtctcagcacttctggacgccgagcctccaattctgtacagtgaatacgacccgaccaggcctttctccgaggcctccatgatgggtctgctgaccaacctggctgaccgtgagctcgttcacatgattaattgggcaaagcgagtccccggtttcgttgacctaacgttacacgaccaggtgcacctgctggaatgcgcttggctagagattctgatgattggacttgtgtggcgaagcatggaacacccaggcaagctgctgttcgctccgaatttgctcctggatagaaaccaggggaaatgcgttgagggcatggtagaaatttttgacatgcttttggcaacaagctctagattccgcatgatgaacctccaaggggaagagttcgtgtgtttgaaaagcatcattctacttaattccggaatcagccacgtggaggccaaaaaaagaattttaaacttgcacccgaagattttcgggaataaatggtttcctcgggtttag

SEQ ID NO: 28497 - DNA, 1320 bp, synthetic construct
  misc_feature 1..1320: note = Description of Artificial Sequence: Synthetic coding sequence
  source 1..1320: mol_type = other DNA
atggatatcaagaattcaccatcttctttaaacagtccctctagttataactgttcacagagcatccttccactggagcatggatcaatctacatcccatcaagttatgtggactcccatcacgaataccccgcaatgacattctactcccccgcagtgatgaactatagcatcccgtcaaacgtcaccaacttagagggcggacccggtcgacagacgaccagcccgaatgtcctctggccaactcctggccacctgagtcccttagtggtgcaccgtcagcttagtcacctctacgctgaaccgcagaaaagtccctggtgtgaggccagatccttggagcacaccctccccgtcaacagagagaccctgaagcgcaaagtaagtggcaacagatgcgcgtccccggttactggtccaggaagtaagagggacgcgcacttctgcgcagtgtgtagtgattacgcctccggctaccactacggagtgtggtcctgtgagggctgtaaggctttttttaaacgctccattcagggccacaacgactacatctgccccgctacgaaccagtgcaccatagacaagaacaggcgcaagagttgccaggcgtgcaggctgagaaagtgctacgaggtaggaatggttaaatgcggaagtcgaagggagagatgtggttatcgactggtgcgccgacagcggtcggccgatgagcagctccactgcgctgggaaggctaaacgctcgggcggacatgccccacgtgtgcgcgagctgctgctggacgccctgagcccggaacagctggtgctgacattactcgaagctgagccccctcatgtgcttatttctcgaccgtcggccccttttacagaagccagcatgatgatgtctttgaccaaacttgccgacaaggaactggtgcatatgatttcttgggcgaaaaaaatacccggaatgtatcctctcgtgacagcaacgcaggatgcagattcctctcgcaagctggcacacctcttgaatgcggtcaccgatgctctggtttgggtgattgcaaagtcaggtatcagctcacagcagcagagtatgagattggcgaatcttctgatgcttctgtcccacgtgcgccacgctagtaataagggtatggaacatttattaaacatgaagtgcaagaatgtcgtgcctgtttatgatctgctgctcgagatgctgaatgcccacgtccttaggggctgcaaaagttcaatcaccgggtcagagtgtagccctgctgaggactctaagtcaaaagaggggtctcagaacccacagtctcaatag

SEQ ID NO: 28498 - DNA, 1593 bp, synthetic construct
  misc_feature 1..1593: note = Description of Artificial Sequence: Synthetic coding sequence
  source 1..1593: mol_type = other DNA
atggacataaaaaacagtccatcgtctttaaactctccttctagctataactgctcccagtcgattctcccgctggaacatgggagcatctacattcccagtagctacgttgacagccatcacgagtatcccgctatgacattttattctcccgctgttatgaattatagcatcccttccaacgtaaccaacctggaaggtggaccaggtcggcagaccacctctccaaacgttttatggcctacaccaggacacttgtctccgctagtcgtccaccgccagctgagccacctgtatgctgaacctcaaaagtccccatggtgtgaagcaagatcgctcgagcacacacttccagtgaaccgcgagacactcaaacgcaaggtgtcaggtaatagatgcgcctcacccgtgactgggccaggttccaagcgcgacgcccacttttgcgcagtttgcagtgactatgccagtggttaccactacggcgtgtggtcctgcgaagggtgtaaggctttcttcaagcgttcaattcagggccacaatgactacatttgccccgcaaccaaccaatgcacaatcgataagaatcgaagaaagagctgtcaggcttgcagattgagaaagtgttacgaagttgggatggtaaaatgcggttcacggagggagagatgtgggtacagactcgtgcgccgtcaaaggtccgcggacgagcagctgcattgcgcagggaaggctaaacggtcaggagggcatgctccaagggtgcgcgagctgttgctcgatgccctcagcccagaacagttggtgctgactttgctcgaagccgagcctccacacgtactgatatccagacctagcgctccgtttaccgaggcctcgatgatgatgagtcttaccaagctcgcggacaaggagctggttcatatgatttcatgggctaagaagattccaggatttgtcgagctgtcactgttcgatcaggtccggttgctcgagagttgttggatggaagttctgatgatggggctcatgtggagaagtatcgaccaccctggcaagctgatctttgcccctgacttggtcttggatcgtgacgaaggtaaatgtgttgaagggatactcgaaatttttgacatgctcctggctacaacgagcagatttcgtgagctgaaattgcaacataaagaatatttatgtgtgaaagctatgatcctcctgaacagctctatgtatcccttggtgactgccactcaagacgccgacagctcccgcaaactcgctcacctgttgaacgccgtgacggacgccctggtttgggtgatcgctaaatccggaattagctctcagcaacaatccatgagattagcaaacctgttaatgcttctatctcacgtaagacatgcctctaacaagggtatggagcaccttctgaacatgaagtgtaagaatgtggtgcccgtctatgacttactgctggagatgttaaacgcgcatgttctaagagggtgcaagagttcaattactggatccgagtgttcccccgctgaagattcaaaatctaaggaagggtcccagaacccacagagccagtag

SEQ ID NO: 28499 - DNA, 1488 bp, synthetic construct
  misc_feature 1..1488: note = Description of Artificial Sequence: Synthetic coding sequence
  source 1..1488: mol_type = other DNA
atggatatcaaaaacagccctagctcactgaattccccttcctcctataactgctctcagagcatcctcccactggaacacggcagcatttatatcccatcctcctatgtagactctcatcacgaataccctgctatgacattctatagccccgctgtcatgaactattcgataccctctaatgtcaccaaccttgaagggggacctgggagacagacgacatctccaaatgtgctttggccaacgcccggtcacttgagtcccctggttgtgcaccgtcaactatcccacctctacgcggaaccccaaaaaagcccctggtgcgaggcgagaagtctggagcataccttacccgtcaaccgggaaaccctgaagcggaaggtcagcggaaaccgttgtgcctcccccgtgactggccctgggtcaaaaagggatgcacatttttgcgcggtgtgctcggactatgcgtcaggttaccattatggagtctggagctgcgagggttgtaaggcttttttcaagcgtagcatccagggtcataatgattacatttgccccgctactaaccaatgtaccatcgataagaacagaagaaaatcctgtcaggcatgcagactgcggaagtgctatgaggtcggaatggtgaagtgtggctctaggagagaacgctgtggttatcgtctcgtccgcagacagcgttccgccgatgagcagctccattgcgccggaaaagctaagcgttctgggggacacgcccctcgggtgagagagctgctcctagacgcactctctcctgaacagctggtgttaacactactggaggcagagccccctcacgtcctgatcagccgcccatccgccccatttacagaagcctctatgatgatgagtttaactaaactggctgataaagaattagtccacatgatcagttgggccaaaaaaattcccggattcgtggagttgagtctgtttgaccaggtcaggctcttggagtcatgttggatggaagtgctgatgatgggtcttatgtggaggtccattgaccacccaggcaaactgatctttgcacccgatctcgtcctggaccgcgatgaaggaaagtgcgttgaagggatcctggaaatctttgacatgctcctggcgacaacaagccggttcagagaattaaagctgcagcacaaggaatatctctgcgtgaaagccatgatactcttgaactcctctatgtaccccctggtgactgctacccaagacgccgatagctcaaggaagctggctcatctcctgaacgcagtgaccgacgccttggtgtgggtgattgcgaagtcaggcatttcttctcagcagcagtctatgagacttgccaacttactgatgctgttgtctcatgtcagacacgccagggccgagaaagcaagccaaacgttaacctcctttgggatgaagatggagaccctgctccctgaggccaccatggaacaatag

SEQ ID NO: 28500 - DNA, 1446 bp, synthetic construct
  misc_feature 1..1446: note = Description of Artificial Sequence: Synthetic coding sequence
  source 1..1446: mol_type = other DNA
atggacataaagaattctccctcctctttgaacagtcccagtagttacaattgcagccagtccatactgcccctggagcatggatctatttatattccatccagttatgtggactcccatcacgagtaccccgcaatgactttttacagccctgccgtgatgaattacagcattcctagtaacgtgactaatctggaaggaggacccggtcggcagaccaccagccccaacgtcttgtggccaacacctggacacttaagccctctcgtcgtacacaggcagctaagccatctctacgccgagcctcagaaaagcccatggtgtgaggccagatccctggaacacaccctgcctgtgaatcgcgagacactgaaaagaaaggtaagtggaaataggtgtgctagtccagtgaccggaccaggcagtaaaagggatgctcacttttgcgctgtttgttctgactatgcatcaggctaccactacggcgtatggtcctgtgaagggtgcaaggccttttttaaacggagcattcagggacataacgactacatctgcccagccactaatcagtgcacaatagataaaaacagacggaagtcctgccaagcctgccgtctgagaaaatgttatgaagtgggcatggtgaaatgcggatcccgtcgagaaagatgtgggtacagactggtgagacgccagaggtctgcggacgaacagcttcattgtgctggaaaggcgaaaagaagcgggggacatgcccctagggtgcgcgagttgctgctcgacgccctgtctcctgagcagttggtgctaaccttgctagaggcggaacccccacacgtgctaatcagtcgaccgtcagctccttttaccgaagcctcaatgatgatgtccctaaccaagttagcggataaagagttggtccatatgattagttgggctaagaaaattccaggatttgtggaactttcactttttgatcaggtgagacttttggaatcttgctggatggaagtcctaatgatggggctgatgtggagaagcattgaccacccgggtaagcttattttcgcgcctgacctggttctcgatcgtgacgaaggcaagtgtgtggaaggaatcctcgaaatttttgatatgttgctggctacgacgtccagatttagggagctgaagcttcagcacaaagagtacctatgtgtcaaggcaatgattctgctgaattcctctatgtaccctctggtgactgctacacaagatgctgattcatctcggaaattggcccatctgctgaatgcagtgacggacgccctcgtttgggtgatagccaagtccgggattagttcgcagcaacaatctatgcggctcgcgaacttattgatgctgctgagccatgtcaggcacgctcgctggggcgaaaagcagttcatacacctgaagctttcatag

SEQ ID NO: 28501 - DNA, 1488 bp, synthetic construct
  misc_feature 1..1488: note = Description of Artificial Sequence: Synthetic coding sequence
  source 1..1488: mol_type = other DNA
atggatatcaagaatagtccctctagcctgaacagcccgtcctcctataattgctcccaatccattttgcccctcgaacacgggagtatctatatcccctcaagctatgtagattctcaccacgagtatccggctatgacgttttacagccctgccgtgatgaactactcaatccccagcaacgtcacaaatctggagggtggaccaggcaggcaaaccaccagcccgaacgtactgtggcccacacctggacatctctcccccctggtggtgcaccgacaattgagccacctgtatgccgaaccacaaaaatcgccttggtgcgaagcacggtccctggagcacacattacctgtgaacagagagacactgaagcggaaagtgagcggcaatcggtgcgcgtccccagtgaccggccctgggtctaagagagatgcccacttttgcgctgtgtgtagtgactacgcttcggggtatcactacggggtctggagctgtgaaggctgtaaggccttctttaagcgctctatccagggccacaacgattatatctgcccagctacaaaccagtgtactatcgacaagaaccgccgaaaatcctgccaggcctgccgcctgaggaaatgctatgaagttggaatggtgaagtgcggatccagacgcgaacggtgcggttaccggctggtaaggaggcagcggagtgccgatgagcagttgcattgcgcgggtaaggccaaaagatctggcggtcatgctcccagagtgagagaattgttgctggacgctctgagccctgagcagttggtgcttacactccttgaggcggaaccaccccatgttctgatctctcggccaagcgcccctttcactgaagccagcatgatgatgtcgctcactaagctggcagacaaagaattggtccacatgatttcctgggctaaaaagatcccaggattcgtggaactgagccttttcgaccaggtgcgattactggaatcctgttggatggaggtactgatgatgggccttatgtggcgcagcattgaccaccccggtaaattgattttcgccccagatcttgtcttagatcgagacgaagggaagtgtgtcgaagggatccttgaaatcttcgatatgcttctcgccaccactagccgattccgggaactgaagctacagcacaaagagtacctgtgcgtcaaggccatgatcctgctgaattcttcgatgtatcctctcgtgactgctactcaagacgcagactcttccagaaaacttgcacatctgctaaatgcagtcactgacgctttagtgtgggtcattgccaagtcaggaatatcttcccagcagcagagcatgagacttgcaaatctgctaatgttactatcacacgtacgtcacgctcgagctgagaaggcgtctcaaacgctcacaagcttcggcatgaaaatggaaaccttgttacctgaagctaccatggaacagtag

SEQ ID NO: 28502 - DNA, 1542 bp, synthetic construct
  misc_feature 1..1542: note = Description of Artificial Sequence: Synthetic coding sequence
  source 1..1542: mol_type = other DNA
atggatatcaagaactccccgtcctcactcaattctccctcctcttataactgttcccagtccattctccctcttgaacatggctccatttacatccctagctcgtacgtggattcgcaccatgaataccctgctatgacgttttactccccagccgtgatgaactacagtatcccctccaacgtcaccaacttggagggtggtcctggaagacaaacaacgagtcctaacgtgctctggcctactcccggacacctctcgcccctagtagttcatcgccagttatcgcacctgtatgcggagccacagaagtcaccttggtgtgaggcaagatccttggaacacacgctgcccgtgaacagggaaacacttaaaaggaaagtttctgggaatagatgtgccagcccagtgacgggtcctgggagtaaaagagatgcacatttctgcgcagtttgctctgattatgccagcggctaccattatggagtgtggagctgcgagggatgcaaggctttctttaaaaggtccattcagggacataatgattacatatgtccagctactaaccaatgtacaattgataagaaccggaggaagtcctgtcaggcatgtcgcctgaggaaatgctacgaggtggggatggtgaagtgtgggtcacgtcgggagcgatgcggatacagactggtgcggaggcagcgatccgctgacgaacagctccactgtgcaggcaaagctaaaagaagtggtggtcatgccccaagagtgcgggagttactgttggatgccttgtcccctgagcagctcgtgctgactttgctggaggcagagccacctcacgtcctaatcagtaggcccagcgccccattcaccgaggcatccatgatgatgtctctcaccaagttggctgacaaagagctggtgcacatgatatcttgggcaaagaagatccccggtttcgtggaactgtctctctttgatcaggtgcgtctcctggagagctgttggatggaggtcctgatgatgggcctgatgtggaggtcaatcgatcaccccggtaagctcatcttcgcgcctgatttggtgctggaccgcgatgagggcaaatgcgtcgaaggcattcttgagatattcgacatgctgctggccaccacctctaggttccgggagctgaaactccagcacaaggaatatctgtgtgtgaaggcaatgatactgctgaatagctctatgtatccattggtgactgcgacccaggacgctgacagcagtagaaagctggcacatttgctgaatgccgtgaccgatgctcttgtctgggtcatcgctaaatcaggaatttcctcccaacaacagagtatgcggctggccaatctgctgatgttactgtcccacgtgaggcacgccagtagcctcagcctctcctggcggctgtttatgctgagagaagcctcttgtcacggggttaggcagacgccagggggagcgcatgtatctgtaagccggtcacgctcatttgaggcctgtcaacagcccagagaatag

SEQ ID NO: 28503 - DNA, 1488 bp, synthetic construct
  misc_feature 1..1488: note = Description of Artificial Sequence: Synthetic coding sequence
  source 1..1488: mol_type = other DNA
atggacatcaagaattccccttcttctttaaattccccttccagctacaactgcagccagtccatactacccctcgagcacggctcgatttatatcccctcttcatatgtagactcgcatcacgaataccccgcaatgaccttctatagccctgccgtgatgaactatagcatcccatctaatgtcacgaacctggaggggggaccaggcaggcagaccactagccctaatgtactctggccaacgcccggtcacctttccccactcgtcgtgcaccgccagctgtcccatctgtatgccgagccccagaaatcaccctggtgcgaagctcgcagtttggaacatacgctgcccgtgaatcgagagacactaaagagaaaggtatccggaaacagatgcgccagcccagtgaccggcccaggttctaagcgggatgcccatttctgcgccgtgtgctccgattatgcttccgggtaccactatggagtctggagttgcgaaggctgtaaagcattcttcaagcgatctattcagggacataacgattatatctgcccagctacgaatcagtgcaccattgataagaacaggagaaaatcctgccaggcctgccggcttcgtaaatgctatgaagtggggatggtgaaatgtggaagtcggcgagagcgttgtggctacagactagtgcgacgccagagaagtgctgacgagcagctgcattgcgccggaaaggccaagagatcaggtgggcacgcacccagggttcgggagctgttgctggacgcactcagcccggagcaactggtcttaaccctgttagaggctgaacccccacacgtgctcatatcgagaccaagcgctccatttacggaagccagtatgatgatgagtctgactaagttggcggataaagaactggttcacatgataagctgggccaagaaaattcccggtttcgttgagttgtcactcttcgaccaggtgcgtttgcttgagtcctgctggatggaagtgctgatgatgggacttatgtggcggtcaattgaccaccctggcaagctgatttttgcccctgacttggtacttgatcgggatgaagggaagtgcgtggagggtattctggaaatctttgatatgctgcttgctaccacatcacggtttagggagcttaagctgcagcataaggaatatctctgcgtgaaggccatgattctactcaatagctccatgtatcccctggtaacagccacccaagacgctgattcttccagaaaacttgcacacctccttaacgcagtgaccgacgccttggtctgggtgattgccaagtccggtatctccagccagcagcagtcgatgcggctggcaaatcttcttatgctgctgtcccatgtacggcacgcacgtgcggagaaggcctctcagacacttactagcttcggcatgaagatggaaaccctcctgcccgaggctaccatggaacaatag

SEQ ID NO: 28504 - DNA, 1419 bp, synthetic construct
  misc_feature 1..1419: note = Description of Artificial Sequence: Synthetic coding sequence
  source 1..1419: mol_type = other DNA
atggatatcaaaaactcccctagctccctcaactcgccaagttcatataattgctcacaatctatactgccactggagcacgggtcaatctacatccccagcagttacgtcgattcccaccacgagtacccagccatgactttctattctcccgctgtgatgaactacagcatcccttccaacgtaaccaacctggaagggggtccgggtaggcagactacttcccctaacgtgttgtggcctacaccagggcacctcagccccttagtcgtgcaccgccagctttctcacctgtatgcagaaccacagaagagtccgtggtgcgaggcgagatcactcgagcacacgcttcctgttaatcgcgagacccttaagcggaaagttagcggaaacaggtgtgcttcaccagtgactggcccagggagtaagcgggatgcccacttttgtgctgtgtgcagcgattacgccagcggctaccactacggcgtttggtcctgcgaaggatgcaaggcgttcttcaaacgaagcattcagggccataacgattatatttgtcctgccaccaaccagtgcaccattgataagaatagacgcaagtcgtgccaggcctgccggctccggaaatgctacgaggtgggtatggtgaaatgtggtagcagacgtgaacgttgtggctatagattagtgcgcaggcagcgaagtgccgatgaacagctgcactgcgcgggtaaggccaaacggtcgggaggtcatgctcctcgggttcgcgaactgctgctggatgcgctatcccctgaacagctggtgctcacactgcttgaggcggagcccccacatgttctcatcagccgacctagtgccccattcacggaggctagcatgatgatgtccctgacaaaattagccgataaagaattagtacacatgatctcctgggcaaaaaagatcccaggttttgtcgaacttagtctatttgatcaggtgcgcctgctcgaatcttgttggatggaggtgctgatgatgggcctgatgtggaggagtatcgatcaccccggtaaactgatcttcgcacccgatctcgtgctcgaccgggatgagggcaagtgtgtagaaggcatcttggagatttttgatatgttgctggcgactaccagtcggttcagggagctgaagctgcagcacaaggaatacttgtgtgtcaaggctatgatccttttaaacagcagcatgtacccgctggtgacggcaacacaggatgcggattcctcacggaagctggcgcacctcctgaacgccgtcactgacgctcttgtgtgggtcattgcgaagtctgggataagcagccagcaacagtctatgaggctggccaacctgctcatgctactctctcacgtacggcacgccagatacgccccttag

SEQ ID NO: 28505 - DNA, 1446 bp, synthetic construct
  misc_feature 1..1446: note = Description of Artificial Sequence: Synthetic coding sequence
  source 1..1446: mol_type = other DNA
atggacataaagaactcgccatccagcctaaattccccaagctcatacaattgctcccaatcaatcctgccactggagcacggttcaatttacatcccgtcgagttatgttgatagtcatcatgagtaccccgctatgaccttttacagcccagcggtaatgaactatagcatcccatcaaacgtcacaaacctggaggggggacccggacgacagactacatctccaaacgttctgtggccaactccgggacacctctctccactcgtcgtccacaggcagttgtcccacctgtatgccgagccacagaagtcaccctggtgcgaagcccgttcgttggaacacaccttacctgtaaaccgggaaactcttaaacggaaagtcagcggtaaccgttgcgcttcccccgttacagggccaggaagtaagagggacgcccatttctgcgcggtctgctccgactacgcatcagggtaccactacggagtatggtcttgtgagggctgcaaagccttttttaagcgttcaatccaggggcacaatgattacatctgccccgcaaccaaccagtgtacaatcgataagaatcggaggaagtcatgccaggcttgcaggctgagaaagtgctacgaagtgggtatggttaagtgtggttctcgacgggagaggtgtggctaccgcctggtgagacggcagcgttccgccgatgaacagctgcattgtgcaggcaaagcaaaacgatcaggcggacacgcacccagggtgagagaactcttgcttgacgcactgtcccctgaacaactggttctcactctactggaggctgagcctcctcatgtcctaataagtagacccagtgctcctttcactgaggcctcaatgatgatgtctctcacgaaattggccgacaaggaattagttcatatgatctcatgggctaagaaaattccagggttcgtagagctttctctattcgaccaagtgagactcctcgagagttgttggatggaagtgctgatgatgggactcatgtggagaagtatcgaccatcccggaaagcttatatttgctcccgatcttgtcctcgacagagatgagggaaaatgcgtggagggtatcctggaaattttcgatatgctgctggccaccacaagccggttcagggagctgaagttgcaacacaaggagtacctgtgcgtcaaggccatgatcctcctaaattcgagcatgtatccactggttacagcaactcaggacgcagactctagccgaaagctggctcatttattgaatgccgtgaccgacgcgctagtttgggttattgcaaagtcaggaatctctagtcaacaacagtctatgcggctggctaacctgctgatgctcctgagccacgtgagacacgccagatggggtgagaagcagttcatccacctcaaactgtcatag

SEQ ID NO: 28506 - DNA, 1380 bp, synthetic construct
  misc_feature 1..1380: note = Description of Artificial Sequence: Synthetic coding sequence
  source 1..1380: mol_type = other DNA
atggacgggttctatgatcaacaggttccgtacatggtgaccaacagccagcggggtcgcaattgtaatgaaaagccgacaaatgtgaggaaacgtaagttcattaatagagacctggcacacgacagcgaggaattgtttcaggatctttcccagctgcaggagacttggctcgccgaggtggcatttcatgggttgccactgaagataaagaaagaaccacactccccatgcagcgaaatttcatctgcttgtagccaagagcagccctttaagttttcatatggggagaagtgcctttacaacgtatcagcctacgaccagaaacctcaagtcggcatgcggccatccaacccccctactccctccagtacccctgtctccccccttcaccacgcctcccctaatagcactcatacacccaaaccagacagggcattccctgctcacctgccgccttctcagtcaattcctgactccagttacccaatggaccatcgctttcgtagacaactaagcgaaccctgcaattcattcccccctctgcctacaatgccaagagagggtagacctatgtaccagcggcagatgtccgaaccaaacattccttttccaccgcaggggtttaaacaggaatatcatgaccccgtttatgaacataataccatggtgggatccgcagcctcccagagcttccctcccccacttatgataaaacaagaaccaagggacttcgcatacgactccgaggtacctagttgtcactcgatctatatgaggcaggagggtttcctggcgcatccttctagaacggagggctgtatgtttgaaaagggcccaaggcagttttacgacgacacatgcgtagttccagaaaagttcgatggcgacatcaagcaagagcctggtatgtatcgggaagggccaacataccagcgcagaggatcactccagctctggcagttccttgttgccctcctggatgatccaagcaatagccatttcattgcctggacaggacgcggtatggagtttaaattgattgaacccgaggaagtcgcgagaagatggggcattcagaaaaacaggccagctatgaattacgacaagctgagcaggtccctccgctattattacgagaaaggaatcatgcagaaggttgctggggagcgttacgtctacaagttcgtgtgtgaccccgaggcactgttttctatggctttcccagacaatcagagacccctgcttaagacagatatggagcgccacatcaatgaggaagacactgtgcccttgtctcactttgacgaaagtatggcttacatgccggaggggggatgttgtaatcctcacccatacaatgaaggctacgtatactag

SEQ ID NO: 28507 - DNA, 1380 bp, synthetic construct
  misc_feature 1..1380: note = Description of Artificial Sequence: Synthetic coding sequence
  source 1..1380: mol_type = other DNA
atggatggcttttacgatcagcaggtgccatatatggttaccaacagccaacgcggaaggaattgcaatgagaagccaacaaacgttagaaagaggaaatttattaatagggacctcgctcacgacagtgaggaactgtttcaggacttatcgcaactgcaagaaacgtggttggcggaggtggccttccatgggctaccacttaaaataaaaaaggaaccacattccccctgtagtgaaattagcagcgcatgtagtcaggaacagccgtttaaattttcgtacggggaaaagtgtctgtacaacgtctcggcctatgaccagaaaccacaggtgggaatgagaccatccaatcctccaaccccatcttcgactcccgtgagtccgctacaccacgcctctccgaactccacacatacgccaaagccagatagagccttcccggcacatttgccacctagccagtctatcccagactcatcatatccgatggaccatcggtttaggagacagctgagtgaaccatgtaacagttttcctcctctgccaacaatgcctcgggaagggagacctatgtaccagaggcaaatgagtgagccaaacattccatttccaccccagggctttaaacaagagtaccatgatcctgtgtacgagcataacacaatggtggggtctgccgcttcacagagctttcccccacccttgatgattaaacaggaaccgcgagattttgcctatgacagcgaagttccttcctgccatagtatctacatgcgtcaagaagggttcctggcacaccccagccgcaccgaaggatgtatgttcgaaaaaggccctcggcagttctacgacgatacatgcgtggtgccagaaaagtttgacggtgatataaagcaagagccagggatgtaccgcgagggccctacataccagaggcgaggatcactgcagctttggcagtttctggtcgcattgctcgatgacccttccaacagtcacttcatcgcatggacaggtaggggaatggaatttaaactcattgagccagaagaggtcgccagacgctgggggatccaaaaaaaccgcccagccatgaactatgacaaactgtctcggagtctaaggtactactacgagaagggaattatgcagaaagtggccggtgaacgctacgtgtacaaatttgtctgtgatcctgaggcattgttctcaatggcgttcccagataatcagcggcctctcctgaagactgatatggaaaggcacatcaatgaggaggatacagtcccgctgtctcattttgatgagagcatggcatatatgccagagggcggatgttgtaatcctcacccctacaatgaggggtatgtctattag

SEQ ID NO: 28508 - DNA, 1125 bp, synthetic construct
  misc_feature 1..1125: note = Description of Artificial Sequence: Synthetic coding sequence
  source 1..1125: mol_type = other DNA
atgttgcaagatctctccgcgtccgttttttttccgccatgttctcagcataggacgctcgctcaggttcccgataatgatgaacagttcgtccctgattaccaggcagagtcactggcatttcatggcctgcccctgaagattaagaaggagccccacagtccctgctccgaaatctcttcagcctgtagccaggagcaaccgttcaagtttagttacggtgaaaaatgcctgtataatgtgaggtttagaagacaattgtcagaaccttgcaattcatttccaccactgcccaccatgcctcgggaaggtagacccatgtatcagcgccagatgagcgaacctaatattcccttcccacctcagggattcaaacaagagtatcatgacccggtgtacgagcataacacaatggtgggcagcgctgcgagccaaagcttcccgcctccactgatgattaaacaggaacctagggacttcgcatatgactcagaggtcccgtcttgccactctatatacatgaggcaggaaggttttctggcccacccgtctagaaccgaagggtgcatgtttgagaaaggaccccgacagttttacgatgatacttgcgtggtgcccgagaaattcgacggagatataaagcaggaaccaggcatgtacagggaggggccaacatatcagagacgaggctctttgcagctctggcagttcctcgtcgccctgttagacgaccctagcaattctcactttattgcctggactgggaggggcatggagtttaaactcatagagccagaggaagtggcacgcaggtgggggattcagaagaatcgaccagcaatgaactacgataaactctcacgttccttacgctactattacgaaaaagggatcatgcagaaggttgcgggtgaacgttacgtttacaaatttgtttgcgatcctgaggcattgtttagtatggcgtttccagacaaccagaggccacttctgaagacagatatggaacggcatatcaatgaggaggacactgtgcctctgagccatttcgacgagtcgatggcctacatgcctgaagggggatgttgcaatccccacccgtacaatgaaggctatgtatactag

SEQ ID NO: 28509 - DNA, 1380 bp, synthetic construct
  misc_feature 1..1380: note = Description of Artificial Sequence: Synthetic coding sequence
  source 1..1380: mol_type = other DNA
atggatggtttctacgaccaacaggttccatacatggtgacgaatagtcagcgaggacgtaactgcaatgagaagcctaccaatgtaagaaaaagaaagtttatcaatcgcgatctagctcacgacagtgaagaactgtttcaagatctgagccagctgcaggagacgtggctggctgaggtcgccttccacggactgccccttaagattaaaaaagaaccacacagtccctgctctgaaataagcagtgcttgcagtcaggagcagccatttaagttcagctatggcgaaaaatgcctgtacaacgtgagtgcttatgatcagaaacctcaagtgggtatgagaccctcaaatcctcctacacccagttccacacccgtctcccccctgcatcacgcttctcccaatagtactcacactcctaaaccagaccgcgctttcccagctcatctgcccccatcacagagcatcccagactctagttacccaatggaccataggtttcggagacagctcagtgagccttgcaattcgttcccacctctcccaaccatgccacgtgaaggccgtccaatgtaccaaagacagatgtcagagccaaacataccctttccacctcaggggttcaagcaggagtatcatgatcctgtgtatgagcacaacaccatggtaggaagcgcagcctcccaatcattcccccctccccttatgattaaacaggagccacgggatttcgcctatgattcagaggttccttcgtgtcactctatctatatgagacaggaggggttcctggcccacccctccaggaccgaagggtgcatgtttgaaaagggcccaagacaattttacgatgatacatgcgtcgttcccgagaagttcgacggcgatatcaagcaggagcccggaatgtatagggaggggccaacctaccaaagaagagggtctttgcagctgtggcagttcctggtggctctactggacgatcccagcaactctcacttcattgcttggactggccgtggaatggagttcaaactgatcgagcccgaagaggtggctaggaggtggggtattcaaaaaaaccgaccagccatgaactacgacaagctgagccgatctcttcggtattactatgagaaaggtattatgcaaaaggtggctggggagagatatgtttacaagttcgtctgcgacccagaggcactcttttccatggcgtttccagataatcagaggccacttctgaaaactgatatggaacgtcatatcaatgaagaggatactgtccctctgtcacactttgatgagagtatggcatacatgcccgaaggtggctgctgcaatccccacccttataacgaaggatacgtgtattag

SEQ ID NO: 28510 - DNA, 1434 bp, synthetic construct
  misc_feature 1..1434: note = Description of Artificial Sequence: Synthetic coding sequence
  source 1..1434: mol_type = other DNA
atggacggtttttacgaccagcaagtgccatatatggttactaacagtcagcggggtcgcaactgcaacgaaaagcccaccaacgtgcgaaagaggaaattcatcaatcgggatctcgctcacgattccgaagagctctttcaggatctctctcagctccaggaaacttggttggccgaggctcaggtaccggacaatgatgaacaattcgtcccagattatcaggccgagtcacttgccttccatgggctgccgctcaagataaaaaaggaaccacatagcccttgttcagagatttctagcgcctgttcccaagaacaaccattcaaattttcatacggggaaaaatgtctgtataatgtaagcgcgtatgatcagaagccacaggttggcatgcgaccctcaaacccccctaccccatctagcacgcctgtcagtcctttgcaccacgcctcgcccaattccacccacacccctaaacccgatcgcgcttttccggctcatttgcccccttcccagtcaattcccgatagcagttatccaatggaccacagatttagacggcagctttctgagccttgcaacagctttcctccattgcccacgatgccaagagaagggcgaccgatgtatcagcgccagatgtcagagcctaatatacccttccccccacaaggattcaagcaggagtaccatgacccggtctatgagcacaacactatggtcgggtcagccgcttcgcagtcctttcccccaccattaatgattaaacaagagccccgagatttcgcctatgattccgaagttccaagctgtcactcaatatatatgcgccaagaaggattcctggcgcaccccagccgcaccgaggggtgcatgttcgagaaggggcctcgtcaattctatgacgatacatgcgtggttccagagaaatttgacggggacatcaaacaggagcccggaatgtacagggaggggcctacgtaccagcgacgcggaagcttgcaactatggcaatttctcgtagctctgctggacgatccaagcaactctcatttcattgcttggacagggcgaggcatggaattcaaactaattgagccagaagaggtcgcacggaggtggggtatccagaagaacaggccggcaatgaattatgataagttgagccgcagcttgcggtattactatgagaaggggatcatgcagaaggtcgcgggagaacgttacgtgtataaatttgtatgcgacccggaggcactcttcagtatggccttccctgacaaccagcggcctctgttaaagactgatatggagcgccatatcaacgaggaggacaccgtgcccctatcccattttgacgaatctatggcttatatgcctgaaggcggttgctgcaatccccacccctataatgagggatacgtgtactag

SEQ ID NO: 28511 - DNA, 1260 bp, synthetic construct
  misc_feature 1..1260: note = Description of Artificial Sequence: Synthetic coding sequence
  source 1..1260: mol_type = other DNA
atgctccaggacctcagtgcctccgtgttcttccccccttgcagtcagcacagaaccttagtggcattccatggtctgccactcaagattaagaaggaaccacacagcccttgtagcgagatctctagtgcctgcagccaggagcagccattcaagttctcatatggggagaagtgcctgtataacgtgagcgcctacgaccagaaacctcaggtgggtatgcggcctagtaaccctccaaccccgtcatccacccccgtttcacccctccatcacgcaagtcccaactcgactcacactcccaaacctgatcgcgcttttcctgcccacctgccaccgagccagtccatacctgactctagctatccaatggaccatcggttcagacgacagctgagcgaaccctgcaactcatttcctcctttgccgaccatgccacgggaaggaaggcccatgtaccagcgtcaaatgagcgaacctaacattccattccctccgcaaggcttcaaacaagagtaccatgaccccgtatatgagcacaataccatggtagggtcagctgctagtcagagctttccacctcccctcatgatcaagcaggaaccacgggactttgcttatgacagtgaggtgccatcttgccatagcatctatatgcgccaggagggatttctggcccatccctccagaacagaaggttgtatgttcgaaaagggaccgcgacagttctatgatgatacctgtgtcgtaccggaaaaatttgatggagacatcaaacaagaaccaggaatgtacagagaaggcccaacatatcagaggagagggtctctgcagctgtggcagtttctggttgctcttctcgacgacccgtccaactcccacttcattgcctggacaggcaggggcatggaatttaaacttatcgaaccagaagaagttgcccgacgttggggaattcagaaaaaccgacccgctatgaattatgacaagctttctcgttcattgcgttactactacgaaaaggggatcatgcaaaaggtcgccggagagcgctacgtatataagttcgtgtgtgatccggaagccctgttctccatggcctttcccgacaatcagaggccacttctcaagacagacatggagagacacatcaatgaagaagacaccgttcccctctcccatttcgacgagagtatggcatatatgccagagggcggatgttgcaaccctcacccatataacgaaggctacgtgtactag

SEQ ID NO: 28512 - DNA, 372 bp, synthetic construct
  misc_feature 1..372: note = Description of Artificial Sequence: Synthetic coding sequence
  source 1..372: mol_type = other DNA
atggatggcttctatgaccagcaagtcccgtatatggtgacaaatagtcagcgcggtaggaactgtaacgagaagcccacaaacgtcagaaagcgcaagttcatcaacagagatctggcgcacgattcagaggagctgttccaggatctgtcccagctgcaggagacctggctggccgaggcccaggtgccggataatgacgagcagttcgtgcctgattaccaggccgagtccctcgccttccatggcttgcccttaaaaataaagaaggagccacatagcccttgctccgagataagctcagcttgctctcaagagcaacccttcaaatttagctatggtgaaaaatgtttatataatgtgtccgcatag

SEQ ID NO: 28513 - DNA, 1434 bp, synthetic construct
  misc_feature 1..1434: note = Description of Artificial Sequence: Synthetic coding sequence
  source 1..1434: mol_type = other DNA
atggacggattttatgaccagcaggttccatatatggtcaccaattcccagagaggccgaaattgtaatgagaagcccactaacgttaggaagaggaaattcattaatcgagacttggcacacgattcagaagagttgtttcaggatctgtcacaattgcaggagacctggcttgcagaggctcaggtaccggacaacgacgagcagttcgtcccagactaccaggcagaaagtctggcattccacgggttgccattaaagatcaagaaagagccacattctccttgctcagagatcagctcagcatgctcgcaggaacagccctttaaattttcctatggagagaagtgtctctacaatgtaagcgcctacgatcagaaaccacaagtggggatgcgcccttctaatcctcctacaccctctagcacacctgtgtctccattacaccacgcatcgcctaatagcacacatacaccgaagccagatagggcttttccggcacatctgccgccttctcagtccatccctgatagttcttatcccatggaccatcggttccgtcgccaactcagtgaaccctgtaatagcttcccgcctctgcctacaatgccacgagaagggcgtcccatgtaccagaggcagatgagcgagcccaacattccctttcctccacaggggttcaagcaggaatatcacgaccctgtttacgaacacaacacaatggtcgggtcggcagcaagccagagttttcctccaccactgatgatcaagcaggaacctcgcgacttcgcatacgactctgaagtgccttcctgtcactctatttacatgcggcaggagggctttctggcacatccaagccgcaccgagggttgcatgttcgaaaaggggcctaggcagttctatgatgatacatgcgtagtgccagaaaaatttgatggggatattaaacaggaacccggaatgtatagggaaggacctacttaccagcgtagagggagcttgcagctctggcagttcctggttgctcttctcgacgaccccagcaattctcacttcattgcttggaccgggcgtggaatggagttcaagctgatagaacctgaggaagtggccagacggtggggaatccagaaaaaccgcccagctatgaactacgacaagctatcccgatcccttcggtattactacgaaaagggcattatgcaaaaggtcgccggagagaggtacgtgtacaaattcgtttgtgatcccgaagccctgttctccatggccttccccgacaatcagcgacctctgctgaagaccgacatggagcggcacattaacgaagaagacacggtgccactgagccattttgacgaatccatggcctatatgccagaaggtggctgctgtaacccacacccctacaacgaaggatatgtctattag

SEQ ID NO: 28514 - DNA, 288 bp, synthetic construct
  misc_feature 1..288: note = Description of Artificial Sequence: Synthetic coding sequence
  source 1..288: mol_type = other DNA
atggacggcttctatgatcagcaggtcccttacatggtgacgaactcacagcgcggtcgcaactgcaatgagaaacctaccaacgtgcgcaaaaggaagtttatcaatagggacctggcacatgacagtgaagaattgttccaggacctgtctcagctccaggagacctggctggctgaggctcaggtccccgataatgatgagcagttcgtgccagactaccaggctgaaagcttggcctttcatgggctgccacttaagattaagaaggagccccatagcccatag

SEQ ID NO: 28515 - DNA, 63 bp, synthetic construct
  misc_feature 1..63: note = Description of Artificial Sequence: Synthetic coding sequence
  source 1..63: mol_type = other DNA
atggacggtttctatgatcagcaggtgccttatatggtaacaaacagtcagaggggccgttag

SEQ ID NO: 28516 - DNA, 1314 bp, synthetic construct
  misc_feature 1..1314: note = Description of Artificial Sequence: Synthetic coding sequence
  source 1..1314: mol_type = other DNA
atgctgcaagatctgagtgcctcggtattttttcccccttgctcacagcaccgtactctcgcccaggtgcctgacaacgatgagcagttcgttcccgactaccaggccgagtctttggccttccacggattacccctgaagatcaaaaaagagcctcattcaccctgctcagagattagctccgcctgcagccaggaacagcctttcaaattcagctacggtgaaaaatgcctctataacgtaagtgcttacgaccagaagccccaggtagggatgcgacctagtaaccctcctacaccgtccagtacacctgtgagccctctacatcatgccagcccaaattcaacacacactcctaaaccagatagggcctttccagcacatctgcccccttctcaaagcatacccgacagttcctaccctatggatcacagatttagaagacaacttagcgaaccttgcaattcctttccaccccttcctaccatgccaagagaaggtagacctatgtatcagcgacagatgagcgaacccaacatcccttttcccccacagggtttcaagcaggagtaccacgaccccgtgtatgaacataatacgatggtgggcagcgccgcttcccagtcttttcctcccccactaatgatcaaacaggaacccagggactttgcctacgactctgaggtccccagttgtcactcaatttacatgaggcaggaaggatttctggcccacccatctcgaactgaaggctgcatgtttgagaagggaccgaggcagttttatgacgacacttgcgtggtcccggagaagtttgacggggacatcaaacaggaacccggaatgtaccgagaggggcctacatatcagcgccgaggcagtctacagctgtggcaattcctcgttgccttattggacgaccctagcaattctcatttcatcgcttggactggtcgtggtatggaattcaaactcatcgagcctgaggaggttgcccgaaggtggggtatccagaagaatagacccgcaatgaactatgataaactcagtcgttctctgaggtattactacgaaaaaggcatcatgcaaaaggtggccggtgagcgatacgtttataaattcgtgtgcgatcccgaagctctgttctcaatggctttcccggacaaccagaggccactcctcaagacagatatggagcgccacatcaatgaggaggatactgttccccttagccatttcgacgagtccatggcgtatatgcctgagggtgggtgttgtaaccctcacccctacaacgagggatacgtgtactag

SEQ ID NO: 28517 - DNA, 1365 bp, synthetic construct
  misc_feature 1..1365: note = Description of Artificial Sequence: Synthetic coding sequence
  source 1..1365: mol_type = other DNA
atggacggattctacgaccaacaggtgccctacatggtgacgaattcacaaaggggaagaaactgcaatgagaagcccacgaacgtcagaaagcggaaattcattaatagagatcttgctcatgactcagaagaacttttccaagatctttctcagctccaggagacatggttggcagaggctcaggtaccagataacgatgagcagtttgtgcctgactatcaagccgagtctttggctttccacgggcttcctctaaagatcaaaaaggaaccacacagcccttgtagtgagatctcatctgcctgttcccaagaacaaccgtttaagttcagttacggggagaagtgcctgtacaacgttagtgcctacgaccagaagccacaggtggggatgaggccctctaacccacctacccctagttccactcccgtgtcgccactccaccacgcctctccaaattctacacacacgcccaagcctgatagggccttccctgcacacctccccccatcacaatccatcccagattcctcttacccaatggatcaccgctttcgccgtcagcttagcgagccttgcaactcatttccgccattgccaactatgccaagggagggacgccctatgtaccagaggcagatgtcggaaccaaatattcccttcccgcctcagggcttcaaacaggagtaccacgacccagtctacgaacacaatacgatggtcggctctgcggctagccagagtttccccccaccactgatgataaaacaggaacctagagatttcgcttacgactcgggctgcatgttcgaaaagggacccagacaattttatgacgatacctgcgtagtgcctgaaaagttcgacggagatattaagcaggaacccggaatgtaccgcgagggcccaacttaccagcgcaggggctctctgcaactgtggcagtttctggtagctttgctggacgatccttcaaattcccattttatagcttggactggcagaggtatggagttcaagctgattgaaccggaagaggtcgcacgtaggtggggaatacagaagaacagacctgccatgaactacgataaactgagtaggagtctgcgctattattacgagaaaggcataatgcagaaggtcgccggagaacgctacgtgtacaagtttgtctgcgatccagaggccctgttttcaatggccttcccagacaatcagcgtcctctgctcaaaacagatatggaaagacacattaacgaggaggatacagtacctctgtcgcatttcgacgaaagcatggcttacatgccagaggggggatgctgtaatccccatccttataatgaaggttacgtatactag

SEQ ID NO: 28518 - DNA, 1455 bp, synthetic construct
  misc_feature 1..1455: note = Description of Artificial Sequence: Synthetic coding sequence
  source 1..1455: mol_type = other DNA
atggagcgcagaatgaaagccggttatctggaccagcaggtgccttatactttttcctctaaaagtcccggtaatgggtccctgcgagaggccctgattggcccattaggcaaactcatggatcctggttcactcccgcctctcgactcggaggacctattccaagatctgagtcacttccaagagacatggctcgccgaggcccaggttcctgacagcgacgagcaattcgtacccgacttccactctgagaatctggccttccactcccccacaacacgtatcaagaaagagcctcagtcgcctaggaccgatccggctctatcatgctctcgaaagcctcctctcccctatcatcacggtgaacagtgtctgtacagctctgcctatgaccccccaagacagatcgcgattaagtccccggcaccaggagctctgggtcagagccctctgcaaccattccccagggcagagcaacggaacttcctgcggtcctcaggaacatctcagccccatcctggacacggttatctgggtgagcatagttctgttttccagcaaccgctggacatctgtcatagcttcacgagccaggggggagggcgagagcctctcccagccccttatcagcaccagctgtctgaaccctgccccccttacccgcagcagtcttttaaacaagagtaccacgaccctttgtatgagcaagccggacagccagcggtggatcagggaggggttaacggccacagatacccgggagccggtgtcgtgatcaagcaagagcagacagacttcgcttatgattctgatgtcacaggctgcgcatcaatgtaccttcacacagaaggattcagtgggccatcccccggtgatggagcaatgggatatggttatgagaagccattgcgaccctttccagacgacgtttgtgtagtgcctgaaaagtttgagggtgacatcaaacaggaaggagtgggggcttttcgtgagggacccccatatcagcggaggggagccctccagctatggcagttcctcgtggccctgctggatgatccaacaaacgctcacttcatagcatggactggtcgtggaatggaattcaagctcatcgaacctgaggaggtggcgcgactgtggggcatccagaaaaacaggcctgcaatgaactacgataaattgagtaggagcttgcgctattactacgagaaaggaataatgcagaaagtcgccggtgagcgctacgtgtacaaatttgtgtgcgaacctgaggctctgttctctctggccttccctgacaatcagaggccagccctgaaagctgagtttgataggccagtaagtgaggaagatacggtgcccctgtcgcatctggatgaatcccccgcttatttacctgagcttgccggacccgcacaaccatttggtccgaagggcggatattcctattag

SEQ ID NO: 28519 - DNA, 1455 bp, synthetic construct
  misc_feature 1..1455: note = Description of Artificial Sequence: Synthetic coding sequence
  source 1..1455: mol_type = other DNA
atggaaaggcgtatgaaggccggttatctagatcaacaagttccttataccttcagttccaagagtccaggaaacggctcgctgcgagaggctctcattgggccactggggaaattaatggaccccggttcactgcctcccctcgactctgaggacctgttccaagatcttagccacttccaagagacttggctggccgaggcacaggttcccgactcagatgaacagtttgtgccggatttccacagcgaaaatttggccttccactctcctacaacgagaattaagaaggaaccccagagccctagaaccgacccagctctgagctgcagccgcaagccacccctgccttaccaccacggcgaacaatgtctgtattctagcgcctacgatccacccaggcagatcgccataaaatctcccgcacctggtgcactgggccagagcccacttcagccatttcctcgggctgagcagagaaactttcttagatcctcaggcacctcccagccacaccccggtcatggctatcttggcgaacattctagcgtgtttcagcaacccctggacatctgtcactcattcacgtcccagggcggaggacgagagcctctccccgcaccttaccagcaccagctgtcagaaccttgcccaccttacccgcagcagtcgtttaagcaggaataccacgatccgctttacgaacaggccggacaaccagctgttgaccagggaggagtgaacggccatcggtaccccggtgccggagtggtgataaaacaagaacagactgactttgcctatgattctgatgtaaccggatgcgcatctatgtaccttcatactgagggattcagtggacccagtcccggagatggagccatgggttacggctatgagaaacccctgcgcccttttccagatgacgtgtgtgtggtaccagagaagttcgaaggcgacatcaagcaggagggcgtaggggcatttcgagaaggtcccccatatcaaagaaggggcgctttgcagttgtggcagttccttgtagccctcctcgatgaccctaccaatgcacatttcatcgcttggaccgggagagggatggagttcaaactgatagagccagaagaagttgctcgattatgggggatacaaaaaaacaggcccgctatgaattatgacaagctatctcgctctctccgttactattacgaaaagggcattatgcagaaggtggccggtgagcggtatgtgtataagttcgtgtgcgaacctgaagcgttattctcactagcatttcccgacaatcaacgcccagccctcaaggctgagtttgacaggccagtttccgaagaagacactgttcctctgagccacttggacgaatccccagcttatctccccgaattggctgggccagcccaaccgtttggaccaaagggagggtatagttattag

SEQ ID NO: 28520 - DNA, 1338 bp, synthetic construct
  misc_feature 1..1338: note = Description of Artificial Sequence: Synthetic coding sequence
  source 1..1338: mol_type = other DNA
atggatcctgggtcactgcctccactcgacagtgaggacttatttcaggacctgagtcacttccaggaaacctggctggccgaggctcaagtgccagactctgacgagcaatttgtgccagactttcactctgagaatttagcttttcactcaccaacaaccagaattaaaaaagaacctcagtccccgaggacggatccagcacttagttgcagcaggaagccccctctcccataccatcacggcgaacaatgcctctattcatccgcatacgacccccctaggcagattgccatcaagtctccagcacctggcgcattaggccagtctccactgcagcccttccctagagccgaacagcggaactttctacggagtagcggaacgtcccagccccaccccggacatggctatctgggcgagcactcttccgtctttcagcagccccttgacatctgtcattccttcaccagtcagggaggaggtagagagcctctcccagccccataccaacaccaactgtccgagccttgtcctccgtatccccaacagagttttaagcaggagtaccatgatccactctatgaacaggcaggccaaccagctgttgaccagggcggtgtgaatgggcaccgctacccaggagccggagtggtcatcaagcaggagcagacagacttcgcttatgattccgatgtgaccggctgcgctagcatgtacttacacaccgaaggcttctcgggaccaagccccggagacggtgctatgggatatgggtacgaaaagcctcttcgcccattccccgatgatgtgtgcgttgtccctgagaagttcgaaggcgacattaagcaggaaggcgtaggtgccttcagggagggacccccataccagagaagaggcgcactgcaactttggcaattcttggtagcgctcttggatgacccaaccaacgctcactttatcgcctggaccggtaggggcatggagttcaagttgattgaaccagaggaggtggctcgtctgtggggcatccaaaaaaacaggcccgctatgaattatgacaagctgtcccggtctctacgctattattatgaaaaggggatcatgcagaaggttgcaggcgagaggtacgtgtataagttcgtgtgtgaacccgaagcgttattttctctcgccttcccagacaatcagcgtcccgctcttaaggccgagtttgacagacccgtgagcgaagaagacaccgtgccacttagtcacctggatgagtcccctgcttatctccctgagcttgcgggacccgcacaaccgttcggacccaagggtggatatagttattag

SEQ ID NO: 28521 - DNA, 1293 bp, synthetic construct
  misc_feature 1..1293: note = Description of Artificial Sequence: Synthetic coding sequence
  source 1..1293: mol_type = other DNA
atggaacggagaatgaaagcaggctatctcgaccagcaggtgccctatacattctcttcaaaaagtcccggtaatggcagcctacgcgaagccttgattgggcctctggggaaactgatggatcctggaagtttgcctcccctggattccgaggatttatttcaagatctgagccatttccaggaaacctggcttgcggaagcacaggtccctgattctgacgaacaattcgtccctgacttccattcggaaaacttagctttccactcacctacgacacgaatcaagaaggaaccgcaatcaccccgtaccgaccctgccctgtcctgttctcgcaagccaccattgccataccatcatggagaacagtgtttgtactcgtcctctgtgtttcagcagccacttgacatctgtcactcatttacatcacaggggggaggcagggaacccttacccgcaccgtaccagcatcaactaagcgaaccatgcccaccgtatccccagcaaagttttaagcaggaataccacgacccgctttacgagcaggccggacaacctgccgtcgaccaggggggtgtgaacggccatcgctatccaggcgcaggggtggtgattaagcaggaacagaccgattttgcctatgattctgatgttaccggctgcgcatcaatgtatctgcacacagaagggttctccggcccaagccccggtgatggagcaatgggctacgggtatgaaaagcccctcagacccttccctgacgacgtctgtgttgtgccggaaaaattcgaaggtgacattaagcaggaaggcgtaggtgcttttagagagggcccaccctatcagaggcgcggtgcactccagttgtggcaatttctggtggccctcctggatgacccaactaatgcacacttcatcgcttggaccggcaggggtatggaattcaaattaatcgaacccgaggaggtggcccgtctctggggcatccaaaaaaataggccagcgatgaactatgacaaattgagtcggtcactacgatactactacgaaaagggtatcatgcagaaagttgccggagagcggtacgtttacaagttcgtgtgcgaacctgaggctcttttcagcctggcctttcccgataaccaacgcccagccttaaaagcggagttcgaccggccagtgtcagaggaggacacagttccactgtcccaccttgacgagtctccagcctacctgcccgagctcgcgggtcctgctcagccattcggcccaaaaggaggatacagctactag

SEQ ID NO: 28522 - DNA, 1338 bp, synthetic construct
  misc_feature 1..1338: note = Description of Artificial Sequence: Synthetic coding sequence
  source 1..1338: mol_type = other DNA
atggatcctggatcactacctccactggactcggaagatctttttcaagatctgtctcatttccaagagacctggctggcagaagcacaggtgcccgacagcgatgagcagtttgtgccggattttcactctgagaatctggcattccacagcccaacaacaagaattaagaaggaacctcagagcccacgtaccgatccagccctaagctgcagtcggaagccacctctcccataccaccatggcgagcaatgcttgtactcgtctgcctacgaccccccacgccaaatcgccatcaaatctcccgctcccggagctctcggccaatctcctctgcagcctttccctcgcgcagagcaaagaaacttcctgagaagctccggaacatcacagccccacccaggacacggctacctcggggaacacagctccgtgtttcagcaacctcttgacatatgtcattcatttactagccagggcggtggtcgagagcccctacctgccccataccaacaccagctctcggagccatgccccccatacccgcagcagtcttttaagcaggagtaccatgatcccttgtacgagcaggcaggccagcccgcagtggatcaagggggtgttaatggacacaggtatcccggagccggagtggtgatcaaacaggagcagaccgacttcgcttatgacagcgatgtcacgggctgcgcttctatgtatctgcatacggaggggttcagtgggccaagcccaggcgatggagctatgggttacggttatgagaaaccattgaggcctttcccagacgatgtgtgtgtggtacccgaaaagtttgagggtgacatcaagcaagagggcgtcggggctttccgagagggtcctccctaccaaaggcgaggtgcgttacaactgtggcagtttctcgttgcgctgcttgatgatccgactaatgcgcactttattgcgtggacgggccgtggaatggagttcaagctaatcgagcctgaagaggtcgcccgtctttggggcattcagaagaatcgccctgccatgaattacgacaaattgtcccgctccctccgatattattatgaaaagggtataatgcagaaagtcgccggagagcggtacgtgtacaaatttgtctgcgaacccgaggcattgttttcactcgctttccccgacaatcagcgtccggcactgaaggctgaatttgacagacccgtcagcgaggaagacactgttcctcttagtcacttggacgagtcacccgcttatctccccgagctggccggacccgctcaacctttcgggcctaagggaggatacagttactag

SEQ ID NO: 28523 - DNA, 1791 bp, synthetic construct
  misc_feature 1..1791: note = Description of Artificial Sequence: Synthetic coding sequence
  source 1..1791: mol_type = other DNA
atggcaggaaggcgtgttaacgtcaatgtgggagtcctcggtcatattgattccgggaagaccgcactggccagagccttatcaactacagcgtccacggctgcgttcgacaagcaaccccagtcacgcgagcggggtatcaccctcgacctgggattctcctgtttttccgtccccctgcccgctcgactgcgcagtagcttacccgagtttcaggcagcgcctgaggcggaacctgagcctggagagccgctgctccaggtgactctggtggactgtcctgggcacgcctctcttattcgaactataatcggcggagcgcagatcatcgacctcatgatgctggttattgacgtgaccaaaggaatgcaaactcaaagcgccgagtgtctggtaataggacagatcgcctgtcagaaattggtggtagttcttaacaaaatagacctcctgccagaaggtaagcgccaggctgccattgacaagatgaccaagaaaatgcaaaaaaccctggagaataccaaatttcgcggagcacccatcatccctgttgcagccaaacctggcggtccagaggcgcctgaaaccgaagcaccccagggaatccctgaactgattgaattactgacatcccaaatctcaattcccactagagacccctcgggcccattcctcatgagtgttgaccactgctttagcattaaggggcagggcaccgtgatgacgggaaccattctgtccggctccatttctctgggagattctgtggagatcccagcgttgaaagtagtgaaaaaagttaaaagcatgcaaatgttccatatgcccattactagtgcgatgcagggggacagattgggtatttgcgtgactcaatttgacccaaagctgctggaaagaggcctggtatgtgctcctgagtccctgcataccgtacacgcggcactcatttctgtggagaaaataccatattttcgaggaccccttcagaccaaagccaagttccacatcaccgtggggcatgagactgtcatggggcgtcttatgtttttttctccagctccagacaacttcgatcaggaacctattttggattctttcaacttctcccaggagtacctgtttcaagaacagtacttgtcaaaggatcttacccctgccgtcaccgacaacgatgaggccgataaaaaggcaggacaggctacagagggccactgcccccgacagcagtgggccttggtggagtttgaaaagcccgtcacctgtcctcgcctatgtttggtgattggatcaagactggatgcggatatacataccaatacttgccgcctcgccttccatgggatcctgctgcacggtctcgaagaccggaattatgcagattcatttttgcctaggcttaaggtctacaagctgaaacacaaacatggtctggtggaacgagcgatggatgactatagcgtcatagggaggtcactgttcaaaaaggagaccaacatccagctgttcgtcggcttgaaagttcatctgtcaacgggcgagctaggaatcatcgatagcgcctttggccaatctggtaagttcaagatccacataccaggaggcctgagtcccgaatccaaaaagatcctgacacctgctttgaaaaaacgagctagggccggtcggggtgaagctacgagacaagaggagtccgccgagcgttctgagccctctcagcatgtagtcctgagtctcacatttaagaggtacgtgttcgatacgcataagaggatggtccaaagcccttag

SEQ ID NO: 28524 - DNA, 1233 bp, synthetic construct
  misc_feature 1..1233: note = Description of Artificial Sequence: Synthetic coding sequence
  source 1..1233: mol_type = other DNA
atggccgctgaaatccattctaggccacagtctagccgaccagtgctgctgtctaaaattgagggtcatcaggacgcagtcaccgcggcactgctaataccgaaggaggacggggtgatcacggccagtgaggaccgcaccatccgagtatggcttaagcgtgattccggacagtattggccgtccatctaccacactatggcctccccatgttcagccatggcgtaccatcatgattccagaaggatcttcgtgggacaggacaacggcgctgtaatggaatttcacgtaagcgaggacttcaacaagatgaattttatcaaaacttatccagcacaccagaacagggtaagtgcgatcattttctctctcgccacggaatgggtgatcagcacaggacacgacaagtgcgtctcgtggatgtgcactcgctctgggaacatgctcgggcgacatttctttacctcctgggcctcctgtctgcaatatgatttcgacactcagtacgctttcgtgggcgattattccgggcagataaccctactgaaactggaacaaaatacctgctccgtaatcaccacccttaagggccatgaaggtagtgtcgcatgcctgtggtgggatccgattcagcgcttgctattcagcggggcatccgacaacagcatcatcatgtgggacatcggaggacgcaaggggaggacattgttgctgcagggacaccacgataaggtgcaaagcctgtgttatctgcaactgacacgacagctggtttcatgttcaagcgatggtgggatcgccgtctggaatatggatgtgtcccgagaagaggccccacagtggctggaatcagactcttgtcaaaaatgtgaacaacctttcttctggaacattaagcaaatgtgggataccaaaactttggggctgcggcagcaccattgccggaaatgtggacaggcagtttgcggtaagtgctcttccaagcgctcctcctatccagtaatgggctttgaattccaggttcgcgtgtgcgactcctgttacgattcaatcaaggacgaggataggacatccttggccacctttcatgagggtaaacataatataagccacatgtctatggatattgcccgaggcttaatggtcacttgcggtacagaccgaatcgtaaagatctgggatatgacacccgtggtgggctgctccctggcgaccggattttctcctcattag

SEQ ID NO: 28525 - DNA, 1092 bp, synthetic construct
  misc_feature 1..1092: note = Description of Artificial Sequence: Synthetic coding sequence
  source 1..1092: mol_type = other DNA
atggcaggggacctgtccgccggtttttttatggaggagttgaatacgtatcgccaaaaacagggagtagtattgaagtaccaagagctgccaaactccgggccacctcatgaccgaagattcacctttcaggtgattatcgacggtcgcgaatttcccgagggggaaggtaggtctaagaaagaagcaaaaaatgcagccgcaaagctggccgtcgagattcttaacaaggaaaagaaagccgtctcaccactactcttgacaacgacgaattctagtgaaggactctctatgggcaactatatcgggctcattaaccgtattgcccagaagaaacgtttgaccgtaaattacgaacagtgcgctagcggcgtgcacggacccgaagggtttcattataaatgcaagatgggacaaaaggaatacagcattgggacaggaagtaccaagcaggaggccaaacagctggccgcaaagttagcatatctccagatactgtccgaagagactagtgttaagtccgactatctgtcgtctggatccttcgccaccacctgtgagtcccagtccaattccctggtgacatcgaccctggcttccgaatcttcttccgagggtgatttcagcgcagacacgtctgagatcaacagcaattctgattccctgaattccagtagtctgctcatgaacggcctgcggaacaaccaacggaaggccaagcgctcgctagcacctcgctttgacctccctgatatgaaggagacaaagtacaccgtggacaaaaggttcggtatggactttaaggagattgagctgatcggatctggaggatttggacaggtatttaaagccaagcataggatcgacggcaagacatacgtgattaagcgtgttaagtacaataacgagagcaagactaagtgcctgtttatacagatggaattctgcgacaaagggacactggagcaatggattgaaaaaaggcgaggtgagaagttggacaaagtcctggcactcgagctgttcgaacagattaccaaaggtgtggactacatacacagtaagaaaaaaaagaaaaaaaaaaagaagtag

SEQ ID NO: 28526 - DNA, 309 bp, synthetic construct
  misc_feature 1..309: note = Description of Artificial Sequence: Synthetic coding sequence
  source 1..309: mol_type = other DNA
atggctggggacctcagtgccggatttttcatggaagagttgaatacatacagacagaaacagggagtggtgcttaagtatcaggagttgccgaatagtggccctcctcatgatagacggtttaccttccaggttataattgatgggcgtgaatttccagagggagaggggaggtcaaagaaagaagccaagaacgcagccgcaaaactcgctgtggagatcttgaataaggagaagaaagctgtgtcacccctcctcctcactacaaccaatagcagtgagggccttagcatgggcaactatatctag

SEQ ID NO: 28527 - DNA, 1656 bp, synthetic construct
  misc_feature 1..1656: note = Description of Artificial Sequence: Synthetic coding sequence
  source 1..1656: mol_type = other DNA
atggcgggagacctctctgctgggttcttcatggaggagctgaacacctaccgccagaagcaaggtgttgttctgaagtaccaagagctgccaaacagtggacctcctcatgatcggaggttcacctttcaggtgattatcgacgggagggagttcccagagggcgaggggcgtagcaaaaaggaggcaaaaaatgccgctgctaagttggccgtggaaatccttaataaagaaaaaaaagcagtgtcccccctgctgctgaccaccacaaacagcagcgaaggcctgagtatgggcaattacataggtcttatcaataggattgcccaaaagaaaagacttactgtgaactacgagcagtgcgcatccggcgtgcatgggccagaaggcttccattataagtgcaaaatgggccagaaggagtattcaatcggtaccgggagtaccaagcaggaggccaagcagttggctgctaagctggcctatctccagatcctcagcgaggagacaagtgtcaagagcgattacctgtcaagcgggtccttcgctacaacttgtgagagccaatccaactcattggtcacatccacactggcctccgagagctcatcagagggagacttttccgctgatacaagcgaaatcaactcaaacagtgactcgctgaactcctccagtttgttgatgaacgggctgcggaataaccagagaaaagccaagcgctctctggctcccaggttcgatctcccggatatgaaggagactaagtataccgtggacaagagattcgggatggactttaaggagattgaactgattggatcaggcggattcggtcaagtttttaaggcaaagcacaggattgacgggaagacctatgtgatcaagagagtgaaatacaacaacgaaaaagctgagcgcgaagtgaaggccctggctaagctggaccatgtcaatatagtgcactataacgggtgctgggatggcttcgattatgatcctgagaccagtgatgattcactggaatcgagcgattacgaccctgagaactcaaagaactcatcacgcagcaaaactaaatgcctgtttattcagatggaattttgcgacaagggcacgctcgaacagtggattgaaaaacgacgcggagagaaactggacaaggtcctggctttggagctctttgagcagatcaccaaaggagtagattacatccactcaaagaagctaatccaccgggaccttaaaccctccaacatctttctggtggacacgaaacaggtgaagatcggggatttcggcttggtgaccagcctcaagaatgacgggaaacggacccggtcaaagggcacactgagatacatgagccctgagcagatttcctcccaggactacggcaaggaagtagacctgtacgcactcggtctgattctggcagaattattgcatgtgtgtgataccgcctttgagacaagtaagttcttcactgacctgagggatggcatcatttccgatattttcgacaagaaggagaaaaccctcttacagaaacttctgtcaaaaaaacccgaggaccgcccaaacacaagcgagattcttaggactctgactgtgtggaagaagtcgcctgaaaaaaacgaacgtcacacttgttag

SEQ ID NO: 28528 - DNA, 351 bp, synthetic construct
  misc_feature 1..351: note = Description of Artificial Sequence: Synthetic coding sequence
  source 1..351: mol_type = other DNA
atggccggagatctatctgctggcttctttatggaggagctgaacacctatcgacaaaagcagggcgttgtactgaaataccaggaactgccaaattcaggcccaccccatgaccgccgatttacctttcaggtcatcatcgacggcagggagttccctgaaggggaggggcgatcgaagaaagaagctaaaaacgcagctgccaagctggccgtggaaatcctgaataaagaaaagaaggcagtctcgccattgctgctcaccaccaccaactccagtgagggactctcaatggggaattacataggcctcatcaacagaatagcacagaagaagagattaactgtgtag

SEQ ID NO: 28529 - DNA, 1533 bp, synthetic construct
  misc_feature 1..1533: note = Description of Artificial Sequence: Synthetic coding sequence
  source 1..1533: mol_type = other DNA
atggccggagatctatccgctggcttcttcatggaggagttgaacacttacagacagaaacaaggggtggtcctgaagtaccaagagctccccaactccggcccaccccatgacaggcgattcacctttcaggtgatcatcgatggcagggaatttccggaaggtgagggtcggtccaaaaaggaggccaagaacgcggcagctaaacttgctgtggagatcctgaacaaggagaaaaaagctgtctcccccctcctacttaccacaaccaattcttccgaaggcctgtccatgggaaactatatagggcttatcaaccggatcgcacagaaaaagcgactaaccgtgaactatgaacagtgtgccagtggagtccatgggccagaaggcttccactacaaatgcaaaatgggacagaaggagtactccataggtactggatcaaccaagcaagaggctaagcagttagccgctaagttggcgtaccttcagatactgtcagaagagacctccgtcaagtctgattatctgtcctctggtagttttgccaccacctgtgaatcacagagtaattctctggtgacttctaccctagcctctgagtcatcctcagaaggggactttagcgctgacacttcagagataaatagtaactcagacagcttaaatagtagctcactgcttatgaatggtctaaggaataaccaacgaaaggctaagcggtcattggcaccaaggttcgacctgccagacatgaaggaaaccaaatacaccgtagacaaaagaaaggctgagagggaagttaaagctctggcaaaactggaccacgtcaatatcgtgcactataacggttgttgggacgggtttgattatgaccccgaaacctctgacgattcgctcgagtctagcgattacgaccccgagaactccaaaaatagtagccgctcaaaaactaagtgtctgttcatccagatggagttctgtgataaaggtacactggaacagtggatcgaaaaaaggcgcggagagaaattggacaaggtgctcgcccttgagttatttgaacaaattactaagggggtagactacatacactccaaaaaacttatccacagggatctgaagccgtcaaatatcttcctcgtggatacaaagcaggtgaaaatcggggattttggattggtaacaagtcttaagaacgatggaaagaggacacgctctaaggggaccctgagatacatgagccccgagcagatctcatcccaggactatggcaaggaagtcgacttgtacgccctgggcctgatcctcgctgagctgctgcacgtgtgtgacaccgcctttgaaacatccaaattcttcaccgatcttcgcgacggtatcatttctgatatattcgataagaaggaaaagacccttctccaaaaactcctgagcaaaaagcctgaggaccgacccaataccagtgaaatcttaagaacacttactgtgtggaagaaatctcccgagaagaacgaacgccacacctgttag

SEQ ID NO: 28530 - DNA, 4800 bp, synthetic construct
  misc_feature 1..4800: note = Description of Artificial Sequence: Synthetic coding sequence
  source 1..4800: mol_type = other DNA
atgaacaaggcgccacagtccaccgggcctcccccagccccaagtcccggacttccccagccggctttcccgcctggacagactgcaccagtcgtttttagcaccccacaggccacacaaatgaacacccccagccagcctcgacagcacttctatcccagtagggcacagcccccatcttcggccgcttctagagtccagagcgcggctccagctagacctggccctgctgcacatgtctatccagcaggcagccaagtgatgatgatcccaagccaaatttcctatcctgcttcccagggcgcttactatattcctggtcagggacgtagtacttacgtagtgccaacacagcagtatcccgttcagccaggcgcacctggattttaccccggtgccagcccaaccgagtttggcacttacgccggtgcttattaccctgcccaaggcgtgcaacagtttccaactggggtggccccaactcctgtgcttatgaaccagccgcctcagatagctccaaagagagaacgcaaaacaatcagaatccgcgatcctaaccaaggaggcaaggatatcacagaagagatcatgtcgggcgcacgaaccgcaagtacccctacaccaccacaaaccggcggtggactcgagcctcaggctaatggagagactcctcaggtggcggtgatcgtacgaccagatgatcgtagccaaggagctattatagcagatcgcccaggactgcctggtcctgagcactccccctccgagtcccagccatcaagtcccagcccaactccatctcccagccctgtactggagcccggtagtgaacctaacttggcagtgttgtccattccaggcgatactatgaccaccatccaaatgagtgttgaagagagtacccctatcagcagggaaacaggggaaccttatcgactgtctcctgagcccactcccctcgcagagcctattctggaggtggaggttacgttatcaaagcccgtgccagagtcagagttcagcagctcacctttgcaagccccaactcctcttgcgtcacacacagtggaaattcatgagcccaacggtatggtgcccagcgaggatctggagcccgaggtggaatccagcccggaactcgccccacccccagcctgcccgtctgaatcacccgtgcctatagccccaactgctcagccagaggaattactcaacggggctccatcacctcccgctgtggacttatctccggtgagtgaacccgaggagcaagctaaggaggtgaccgcttccatggcaccaccaaccatcccttcagcaacccccgctaccgcccctagtgcaacctctcccgctcaggaagaagagatggaggaggaggaggaggaggaggaaggggaggccggagaggcgggtgaagctgaatcggagaaggggggagaggagctactgccgccagagtctactcccatccccgcaaatctatcccaaaacctagaggccgctgctgccacgcaagtggcagttagcgttccaaaaagacgacgcaaaattaaggaactgaataaaaaggaggccgtgggggacctcctagatgcgtttaaggaggcaaatcccgctgtgccggaggtagaaaaccagccacctgccggaagcaaccccggacctgagagcgaaggatccggagtgcccccacgccctgaggaagctgatgagacctgggattctaaagaggacaaaatacacaacgccgagaatatccagcccggagaacagaagtatgagtataagtccgaccagtggaagcctcttaacttggaagagaagaaacgctacgaccgggagtttctcttgggtttccagttcatattcgcaagcatgcaaaaacccgaggggctcccccacatctctgacgtagtcttggataaggcaaacaagacccctctccgcccactggatcctactagactgcaggggattaattgcggtccagattttaccccaagcttcgccaatttgggaagaacaacactgtctactagaggcccaccccgaggaggcccagggggagagctgcccagaggccctgcgggattggggcctcgacggagccagcaggggcctcgcaaagaaccaagaaagatcatcgccacagtcctcatgactgaggatatcaagttgaacaaggctgagaaggcatggaaaccgagcagcaaacggacagctgccgataaggatcggggtgaggaggatgcggatgggagcaagacgcaagatctctttaggcgtgtcagatccatcttaaataagttaacacctcagatgttccagcagttgatgaagcaggtgacgcagctagccattgacaccgaagaacggctaaaaggagttattgatctaatctttgagaaagccatctctgagcctaacttttccgtagcctacgccaacatgtgtagatgtttgatggccttgaaggttccaaccactgaaaaaccgacagtcaccgtcaactttagaaaactgttgctcaacaggtgccagaaagagttcgaaaaggacaaggacgatgacgaggtctttgagaagaaacagaaggagatggatgaagctgctaccgccgaggaacgtggtagactcaaagaggagttggaagaggctcgggacatcgctagacgcaggtccctcgggaatattaagttcatcggcgagctctttaaactgaagatgctgacagaagcaattatgcatgattgcgtggtcaagcttctgaaaaatcatgatgaggaatccctggaatgtctgtgccgcctgctgacgaccattgggaaggacctggattttgaaaaggccaagcctcgaatggatcaatacttcaaccaaatggagaagatcatcaaggagaaaaagacttcatccaggattcgattcatgctacaagatgttttagatctacgtgggtctaactgggtgcccagacgcggagatcaggggcctaaaaccattgaccagatccataaggaggccgaaatggaagagcatagagagcatatcaaggtgcagcaacttatggctaaggggagcgacaaacgtcgcggagggcctccaggaccccctatatcccgtgggcttcctttggtggacgatggaggctggaataccgtgccaatatcaaagggtagccgccctattgatacctctcgcctgacgaagatcacaaagccaggctcaatcgacagtaataatcagctgtttgctcctggcggtagactgtcttgggggaagggaagcagtggaggctccggagccaaaccatctgacgcggcatcagaagctgcccgtcctgcaacatctacgcttaataggttttctgcgctgcagcaggccgtgccgaccgagtcaaccgataatcgcagggtggttcagcggtcatctctgagtagagaacggggtgagaaagcaggcgaccggggagatcgtctggaacggtccgagcggggaggagatcgaggagatcgactggaccgtgctcggacacccgcaaccaagagatcatttagcaaggaagtcgaggagcggtcccgagaaaggccttctcaacctgagggactgaggaaagccgcttcccttaccgaagatagggataggggacgagatgcagtcaaacgggaggcagctctgcctcctgtgagccccctcaaggccgcactcagtgaagaagaactggagaagaagtccaaagccataattgaggagtatctccacctgaatgacatgaaagaagccgtgcagtgtgtgcaggagttagcttcacctagtctgctatttatatttgtaaggcacggggtggaaagtacactggagcgctccgctattgccagagagcatatgggtcagctcctccaccagcttttatgcgcaggccacctgagcacagcccagtattaccaaggactatatgaaatccttgaactcgcagaagacatggagattgatataccacatgtgtggctgtatctggcagaactagtgaccccaattcttcaggaggggggagtaccaatgggggagctattccgagaaatcaccaagccgcttcgccctctgggcaaggccgcatccctgttactagagatcctcggtctgctatgtaagagcatgggccctaagaaggtgggcaccctgtggagggaagccggactatcttggaaagaattcttaccagaaggccaggatattggcgcttttgtggctgagcagaaggtggagtataccctgggggaggaatccgaggcaccaggccagagggctctaccgtcagaggagttaaacaggcagctggagaaactgctcaaggagggcagcagtaatcagagagtgtttgactggattgaggcaaacctgtcagaacagcagattgttagtaacacactcgttagggcactcatgaccgctgtctgttacagcgccatcatctttgagacacccctgagagtggatgtcgccgtactgaaggcacgagcaaagttgctccagaaatatctctgcgacgagcagaaagaactccaggcactttacgcactgcaggccctggtggtgacactggagcaaccgcctaacttgctcaggatgttttttgatgcattgtacgacgaggatgtggtgaaggaggatgctttttattcttgggaatcgtctaaggacccagccgagcaacaaggtaaaggagtcgctctgaagagcgtaacagcctttttcaaatggctccgggaggcagaagaagagagcgaccacaactag

SEQ ID NO: 28531 - DNA, 4803 bp, synthetic construct
  misc_feature 1..4803: note = Description of Artificial Sequence: Synthetic coding sequence
  source 1..4803: mol_type = other DNA
atgaataaagcccctcagagcaccgggccaccccctgcaccatctccagggcttccccagcctgcgttcccacctgggcagacagcaccggtggtgttctccacaccacaggccactcagatgaacacaccgagccaacccagacagcatttttatcctagtcgggctcagcctccatccagtgctgcttcgagggtccagtctgccgctcctgcacggccaggccctgccgcacacgtgtatcctgcaggcagtcaggttatgatgattccttcacagatctcttatccggcatcccagggggcttattacatacccggacaggggagatccacttatgtggtaccgactcaacagtatcctgtgcagccaggggcaccagggttctatcctggcgcttctcccaccgagtttggtacttacgccggagcctactatccagcacaaggagtacagcaattccccacaggggtcgctcccacgcccgttctaatgaaccagcctcctcagatcgcacccaaacgcgaacggaaaacaattaggatacgtgaccccaatcagggcggtaaggatatcacagaagaaatcatgagcggcgcaagaacggcctccactcccacccctcctcagaccgggggtggattggaacctcaagccaatggggagacaccacaggtggccgtgattgtgcggccagatgaccgcagtcagggcgctatcattgccgacaggccaggattacctggacccgagcacagccctagcgaatctcagcccagctcccccagccctaccccttcaccctcccctgtgctcgaacccggtagcgagcctaatctggctgtgctctcaatccccggagacaccatgaccactatccaaatgagcgttgaggaatcaactcccatttcccgtgaaaccggtgaaccctatcgactctcgcctgagcccacacctttagctgagcctatcttagaagtggaagtgacccttagtaagcccgtacccgaaagtgagttctcatcatcccctctgcaggcccctacccctctcgcaagccacaccgtcgaaatccacgagccaaatgggatggtgccttctgaggatctagaaccagaagttgaatctagtccagagttggctccgcctccagcctgtccttcggaaagtcccgtcccaatagcacccaccgcccagcccgaggagctgctgaacggtgcccctagcccgccagcagtggacttatccccagtgagcgaacccgaagagcaagcaaaggaggtgaccgcgagtatggcacctcccactattccgtctgcaacgcctgctacagccccaagcgcgaccagccctgcccaagaagaagaaatggaggaagaagaggaggaagaggaaggagaagccggagaagccggagaggccgagtcagaaaagggcggtgaggaacttctgcctccggagtctactccgatcccggctaatttgtcgcagaacctcgaagctgccgcagcaacccaggtcgcagtgagtgtccccaagcgcaggcgcaaaattaaagagctcaataaaaaggaagctgtaggagacctgctcgacgcattcaaagaagcaaatcccgctgtacctgaagtggaaaaccaaccgccagccggatccaatcccggtcccgagtctgaaggctctggagtgcccccaaggcctgaagaagctgacgagacatgggactcgaaagaagataagattcacaacgctgagaacatccaacctggggaacagaagtatgaatacaagagtgatcaatggaaacccctcaacttggaggaaaagaaaaggtacgacagagaatttcttcttggcttccagttcatttttgcctcaatgcaaaagcccgagggactgcctcacattagcgatgtagtgctcgataaggccaacaaaaccccactgagaccgctagacccaactagactccagggaattaattgcgggcctgactttactccgtcattcgccaatcttggacgcactaccctcagcactaggggaccccctcgagggggaccaggaggggagctgcctcgtggcccacaagctggcctcggtcctaggcggtctcaacaggggccacgaaaggagcctcgcaagataatcgctaccgtcctaatgaccgaagacattaagctcaacaaagcagagaaggcgtggaaaccaagctcaaaaagaacagccgctgataaagatcggggtgaagaagacgcagacggttctaagacacaagaccttttccgcagggtccgctcaatcttgaacaaactcaccccacaaatgttccaacagttaatgaaacaggtgacccagcttgccatcgataccgaagagcgcctgaagggagtcatcgacttgatcttcgaaaaagctatctcagaacctaatttctccgtggcatacgctaatatgtgtagatgtctcatggcactcaaggtccccactactgaaaaacccaccgtcacggtgaatttcagaaaactattacttaataggtgtcaaaaggaatttgaaaaggacaaagacgacgacgaggtcttcgaaaagaagcagaaagaaatggacgaggccgctaccgctgaagaacgcggacgcctaaaggaagagctagaagaagcaagggacattgcaaggcgtagatcactggggaacattaagttcatcggcgagttgtttaagctcaaaatgctgactgaggccatcatgcacgattgtgttgtgaagctgttaaagaatcacgatgaggaaagcctggagtgtttgtgtcggctcctgaccactattggaaaggatctggactttgaaaaggcgaaacccaggatggaccagtatttcaaccagatggagaaaattattaaggagaaaaaaaccagctctaggattagatttatgttgcaggacgtcctggacctccgcggatcaaactgggttcctaggagaggcgaccagggacctaaaactattgaccaaatccataaggaagccgaaatggaagagcatagggagcatataaaggtacaacaactcatggcgaaaggaagcgacaaacgaagagggggtccacccggtcccccaatttctaggggcctcccacttgtagatgatggaggttggaatacagtgccgatttccaaagggtcccgacccatcgacacgagccgcctcacaaagattactaaaccagggtccatcgactctaacaaccaattgttcgcaccgggaggtcgcctctcatggggaaaagggtctagtggaggcagcggtgccaagccttcagacgctgctagcgaagccgctaggcccgctactagcaccctgaacagattcagtgctctgcaacaggccgtgcctactgagtcaacagacaacaggcgggtggtgcagagaagcagtctgtcccgagaacggggagagaaggccggagatcgcggagatagactggaaaggtctgagaggggcggagaccggggtgaccgcctggatagggcacggacccccgctacaaagcggtccttctctaaggaggtagaggagaggtccagggagcggccttcacagcccgaaggcctaagaaaggcggcttccttgactgaagaccgcgatcgcggtcgagatgccgtgaagagagaagccgctttaccacctgtgtctcctctgaaagctgccctgtcagaggaggagctcgaaaaaaagtccaaagctattatcgaggaatacctgcacctgaacgatatgaaagaggccgtgcagtgcgtacaggagctggcctccccaagtctgctttttatctttgttaggcatggggtggagtccactttagagagatccgccatagcacgtgagcacatggggcagctcctgcaccagctgctttgcgccggacacttgtcaactgcacaatattatcaaggactctacgagatcctggagttggccgaggatatggaaatcgacatcccacacgtatggttgtatctggccgaactagtgacacctattctgcaagaaggaggggtcccaatgggagagctgtttagagagatcaccaagccactcagacctcttgggaaagcagcttccctgcttctcgagattcttggcctgctgtgtaagtccatgggccctaaaaaggtcggtaccttgtggcgggaggccggtctcagctggaaagaatttttgccagaaggacaggacatcggcgctttcgttgctgagcagaaggtggaatatactttgggagaggaatccgaggccccaggtcaacgggctctgccaagcgaggaactgaatcgacaactggagaagctcctaaaggaaggatcaagcaatcagagggtcttcgactggattgaagccaatctgtccgaacaacaaattgtaagcaatacactcgtgagagctctcatgactgctgtatgctattccgcaatcattttcgagacacctctccgtgtggatgtggccgtgttaaaggcacgggctaagctgctgcagaaatacctctgcgatgaacagaaggaacttcaagccctgtatgcactgcaggctctcgtcgtgacactcgagcaaccgcctaatctcttgcgaatgttttttgatgccctatacgacgaagacgtggttaaggaggatgccttttacagttgggaatcctccaaagatcctgctgaacaacaaggtaagggggtcgccctaaaatccgtgaccgccttcttcaagtggctgagagaagccgaggaggagagtgaccacaactag

SEQ ID NO: 28532 - DNA, 4800 bp, synthetic construct
  misc_feature 1..4800: note = Description of Artificial Sequence: Synthetic coding sequence
  source 1..4800: mol_type = other DNA
atgaataaggctccacagtcaacagggccaccacccgctccctcaccaggcctccctcagccagcctttcctcccggacaaacggcaccggtggtgttcagcacaccacaggccactcagatgaacacccctagccagccgcgtcagcacttctacccaagcagggcccagcccccttcctccgctgcctctagagttcaatcagccgctcctgcaagaccgggtcccgctgcccatgtctaccccgctggatcgcaggtgatgatgattccctctcagatctcctaccctgcgtctcagggggcttattacatcccgggtcaagggagaagcacttatgtcgtgcccacccagcagtacccggtccaaccaggagcccctggattctacccaggggcatccccaactgagttcggtacctatgctggcgcttactacccggcacagggcgtgcagcaatttccaaccggcgttgccccaactcctgtgctcatgaaccagccaccacaaattgcccctaaacgcgaacgcaaaacaattaggatacgggatcctaaccagggagggaaagatataaccgaagagattatgtcaggagccaggactgctagcacccccaccccaccccagaccgggggaggcctggagccgcaagctaacggagagaccccgcaggtagcagtgatcgtaagaccagatgacagatctcagggcgcaatcatagctgatcgcccagggctccccggtccggagcactcaccctcggagtcccagccatcaagtccatctcctactcctagccctagccccgtcctggagcccggttcagaacctaatctggcagtgctgagtatccctggggacaccatgaccactatccagatgtcggttgaagagtccacccctatctcccgcgaaacaggagaaccttaccgtctgtcccctgagcccacccccctggcggaacccattctggaagtcgaagtgacgctgagcaagcccgtgcctgagtccgaattttcttcttccccgctgcaagctcccaccccactggcgtcacacacggtggaaatccacgagcctaatggtatggtaccatccgaggacttagaaccagaggtggaatccagccctgagttggcccctccccctgcatgcccttcagagagtcccgtgcctatcgccccaacagcccagccagaggagctgcttaatggagccccaagccccccagctgtcgacctgagtccagtgagcgagccagaagagcaagccaaggaagttacggctagcatggccccaccaactattccgagcgcgactccagccacggccccatccgccacttctccggcacaggaggaggagatggaggaagaggaggaggaggaggagggagaggctggagaggccggagaggctgaatcggagaagggaggtgaggaactgctgcctcccgaatcaacgcccattccggcaaatctgagccagaatctggaggcagctgctgccacacaggtggccgtgagcgtacccaaacgcagaagaaaaatcaaagaactgaacaagaaagaggccgtcggagacctgctggatgcattcaaagaagcaaaccctgcagtacccgaagtggagaatcagcctcccgctggcagcaatccaggccctgagagcgaaggaagcggtgtcccaccacggcctgaggaagcagatgaaacatgggattccaaagaggacaagatccataacgcagagaatatacaacccggagagcagaaatacgagtacaaatcagaccagtggaagcctttaaatctggaagaaaaaaagcgttacgaccgggagtttctgctgggattccagttcatcttcgccagcatgcagaaacctgaagggttaccacatatttctgacgtggtcctggacaaggctaataagactcctttgcgacctttagaccccacacgccttcagggcattaattgcgggcctgattttacaccatcattcgctaatttgggaaggacgaccctgagcactaggggaccacctagaggcggtcccggaggtgagcttccccgaggccctgcaggcctgggcccaaggcgctcgcagcaggggcctcggaaggaaccacgaaaaattattgccactgtgctcatgaccgaagatattaagctgaataaggctgagaaagcttggaaaccaagcagcaagcggaccgcagcagacaaagatcgaggagaggaggatgcagatggctcaaaaactcaagatctgttccgacgcgttcgctcgattctgaataagctaaccccccagatgttccagcagctgatgaaacaggtcacccagctcgccatcgatacagaagaaaggttgaaaggagtgattgatttgatatttgagaaagcaatctcagaacctaacttcagtgtggcctacgcaaacatgtgtcgttgtctgatggccctgaaggtccctacaactgagaagccgacggtgaccgtgaactttagaaaactgttgcttaaccggtgtcagaaagagttcgagaaagataaggacgacgatgaagtctttgaaaagaaacagaaggaaatggatgaggccgctaccgccgaggagaggggcagattgaaggaggagctggaggaggctcgagatattgcaagaaggcgctccctgggcaatatcaaattcataggtgagctgtttaaactgaagatgcttactgaggctataatgcacgattgtgtggtgaagctccttaagaaccacgacgaggaatccctggagtgcctgtgcaggttattgaccacaatcgggaaggatttggactttgagaaggccaaaccaaggatggatcagtactttaatcaaatggagaaaatcattaaggaaaagaagacatcttccaggattcgtttcatgctgcaagacgtcctagacctaaggggcagcaattgggtaccccgacggggtgaccagggacccaaaacaatcgaccagatccataaggaagctgagatggaggaacatcgcgagcatataaaagtgcaacagttgatggctaaagggagtgataagcgaaggggaggtccaccaggaccacctatcagtcggggtttgccacttgtagatgatggaggatggaacactgtcccaatcagcaaagggtctaggccaatcgacacatcgcggctgacaaaaattaccaagcctggctccatcgattctaacaatcagttgtttgcccctggcggaagactgtcttgggggaaggggtcctccggcggaagtggggcaaagccatcagacgcagcatcggaggccgctcggcctgctacgagcacactcaatcggttttccgcactgcagcaggccgtgccaaccgaatctaccgataatcggagagtggtgcaacggtcgagcctatcccgcgagcgcggagagaaggcaggagaccggggagatagattggaacgtagcgagagaggcggtgatcggggagaccgactggaccgggctagaacaccagcaactaagcggagcttcagtaaggaggtagaggagcggagcagagagcgtcccagccagccggaaggactgagaaaagccgcatccctaaccgaggacagagaccgagggagggacgctgtaaaaagagaggccgcattgccacccgtctcccctctgaaagccgcactgtcggaagaggagctagaaaaaaaatccaaggccatcattgaggagtatcttcacctgaacgatatgaaggaggcagttcagtgcgtgcaagagctggcgagtccaagcctgctgtttatctttgtgagacacggcgtggagagtactctcgagcggagcgcaatcgcaagagagcacatgggccagttgttacaccagttgctttgcgcaggccatcttagcactgctcaatattaccagggactctatgagattctggaacttgctgaggatatggagattgacattcctcacgtttggctgtatctggctgaactggtgacccctatcttacaggaagggggtgtcccgatgggggaactgtttcgggaaataaccaagcctctcagacctctggggaaggctgcatccctgctcctggagatcctgggactcttatgtaaatctatgggtcccaagaaagtggggaccctttggcgcgaagccggtctcagctggaaagaatttctgcctgagggacaagatattggcgcattcgtggccgagcagaaggtcgaatacacactgggagaggagtcagaggcaccgggacagagggcactgccatcggaggagttgaaccggcaattggaaaagttattgaaagaaggctcaagcaaccaacgcgtgtttgattggattgaagccaacctctctgaacagcagatcgtctccaacaccctggtgagggcactgatgacggctgtgtgttactctgctattatattcgagactcctcttcgcgtggacgtcgccgtgctcaaggcccgagctaagttactccaaaagtatttatgcgatgaacagaaagagctccaagctctctatgcactccaagctcttgtggtgacattggagcagccccctaacttactgcggatgttcttcgacgctttgtacgatgaggacgtagtgaaggaggacgctttctactcctgggagagcagcaaggaccccgctgagcagcagggcaaaggcgtggccctgaaaagtgtgacggcgttctttaaatggctccgagaagctgaggaagagtccgaccacaattag

SEQ ID NO: 28533 - DNA, 4308 bp, synthetic construct
  misc_feature 1..4308: note = Description of Artificial Sequence: Synthetic coding sequence
  source 1..4308: mol_type = other DNA
atgaaccaacccccacaaattgcgcctaaaagagagcgcaagaccataagaattcgagatcccaatcaaggaggaaaggacattaccgaggagatcatgtccggggctcgcaccgctagcacgcccaccccgcctcagactggcggtggtcttgaaccccaggcaaatggcgagaccccccaggtggccgtcattgtgcgtcctgacgacagatcccagggcgcaattatcgccgacaggccaggcctgcctgggccagaacatagtccatccgagtctcagccgtccagtccatctccaacaccctcaccttctccggtcctggagcccggatcggaacctaacctggccgtcctgagcatccccggagatactatgacaacaattcagatgtccgtggaggaaagcacccccataagcagggagaccggagaaccttatcggctcagtcccgaacccacacctctggccgaacccatcctcgaggtcgaagtcacactgtcgaaacctgtacccgaaagcgaattcagcagcagtcctctgcaggctccaacccccctcgctagtcacacagtggaaattcacgagcccaacggtatggtgcccagcgaggatctggagcctgaggtggagagcagtcccgaacttgcaccaccaccggcttgtcctagtgaatctcctgttccaatagcccctactgcccagccagaggagctgctgaatggggcaccgtccccgccagccgtcgacctgtcccccgttagcgaaccagaggaacaagctaaggaagtgaccgctagtatggctcccccaactataccgtcagcaaccccggcaacagccccatccgcaacctcacccgcacaggaggaggaaatggaagaggaagaagaggaggaagagggagaagctggagaagctggcgaggccgagagcgaaaaagggggagaggagctgctgccgccagaatcgacacccatcccggcaaacctgagccaaaatttagaggccgctgcagctactcaggtggccgtgtcagttccgaaacgtcgacggaaaatcaaggaactaaacaagaaggaagcagttggagatttgctcgatgcatttaaagaggctaacccagcagtgccagaggtggagaaccagcctcctgcaggttcaaatcccggacccgaatcggaagggtccggggtcccccctaggcctgaggaagcagacgagacatgggactccaaagaggacaagatccacaatgccgagaacatacaacctggtgaacagaaatacgaatataagtcagaccagtggaagccgctgaacctggaggaaaagaaacggtatgacagagaatttctccttgggttccagtttatctttgcaagcatgcagaagccagaggggctgccccatatcagtgatgtggtgctcgacaaagccaacaagacacctctccggcctttggaccccacccgattgcagggcatcaattgcggtccagatttcacacccagtttcgccaacctgggaagaacaactctctctactagagggccaccgcgtggcggaccaggaggcgaactgcctcgcggacctgctgggctaggccctagaagaagtcaacaagggccacgaaaggaacccaggaagataatcgccaccgtactgatgaccgaggacatcaagcttaacaaggctgagaaagcctggaaaccctccagtaagcgcacagccgcagacaaagatcgcggtgaggaggatgccgacggaagtaagacacaggatctgttccgtagagtgagaagcatcctcaacaaactgactccccaaatgtttcagcaactaatgaagcaggtaactcagctagctatcgataccgaggaaagactgaaaggagtcatcgatctgatcttcgagaaggccattagcgagccaaactttagtgttgcatacgccaacatgtgccgatgtctgatggccctgaaagttccaaccaccgagaagcccacggtcacagtgaacttcaggaaacttttgttaaatcgctgtcagaaggagtttgagaaagataaggacgacgacgaggtgttcgaaaagaaacagaaggagatggatgaagctgccaccgctgaagagaggggacggttaaaagaagagctggaggaagccagggatatagccagacggaggtctttgggcaatataaagtttatcggtgagctctttaagctcaaaatgttaaccgaggctattatgcacgattgcgtggtgaagttactcaagaaccatgacgaggagagtctcgagtgcctgtgcagactgttgacaacgatcggcaaggatcttgatttcgagaaggccaaaccgagaatggatcaatacttcaatcagatggagaagattatcaaggaaaaaaaaaccagctctcgcatccgctttatgctgcaagacgtgctggatctgaggggtagtaattgggtgccgaggagaggagatcaaggtcccaagaccatagatcaaatccataaagaagcagagatggaggagcaccgagagcacatcaaggtgcagcaattgatggccaagggatctgacaagaggaggggcggaccacctggtcctccgattagcagaggcttacccttagtagatgatggcggttggaacaccgtgcctatctccaagggtagccgcccaatcgatactagtcggctgaccaagataactaaaccagggtctatagattccaataaccagttgtttgctcctgggggtcggctgtcatgggggaaaggcagctccggcggttccggagcaaagccgtctgatgccgcatcagaggccgctaggcccgcaacaagcacacttaaccggtttagcgccttacagcaagccgtacctactgaatctaccgacaatcggagagtggtccagcggtcttctctgtcccgcgagagaggcgagaaagccggtgaccgaggcgaccggctcgagagatcagaacgcggaggagatcggggagaccgccttgacagagccagaacccctgccacaaagcgcagctttagtaaggaagtcgaggaaaggagccgagaaagaccttcacaacctgagggtctcaggaaggccgcttctctgacagaggaccgtgaccggggacgtgacgcagtcaagagagaagcggctcttccaccagtctctcccctcaaagctgctctaagtgaggaggaactcgagaagaaatccaaagcaataatcgaggagtatctgcatctgaacgacatgaaagaagccgtgcagtgcgtgcaggaactcgcgagtcccagcctgttgttcattttcgtgcggcacggtgtcgaatcaaccctggaaagaagtgctatcgcgcgtgagcacatgggtcagctgctccaccagctgctctgtgctggtcatctgagcacggcccagtactatcagggactgtacgagattttagagctcgctgaggacatggagattgatatcccccacgtctggttgtatctggccgagttagtgacaccaatcctccaggaaggaggcgtgccaatgggggagctgttccgggaaataactaaacctctgcggcctttaggaaaggccgcatccttgcttctggagatactcggactactgtgtaagtccatgggccctaagaaggtggggacactgtggcgggaggccggtctgtcatggaaagaatttcttccagagggccaggacatcggcgcattcgtggccgaacaaaaggtggagtacactctgggtgaggagtctgaagctccaggtcagagagccctccctagtgaagaacttaatcggcagttggaaaaactacttaaagagggtagctccaaccagcgagttttcgattggattgaagcaaacctctctgagcagcagatcgtgagcaatactctcgtgagggccctgatgactgctgtgtgctacagtgccatcatttttgagacgccactgagggtggacgtggccgtcttgaaggctcgggcaaaactgctgcagaagtacctgtgtgacgagcagaaggagttgcaagcactgtacgctctgcaggccttggtggttacgctggaacagcccccaaacctgctgagaatgttctttgatgcattgtacgatgaagacgtggtcaaggaagacgcattttatagctgggagtcatccaaagaccctgcagagcagcaagggaagggagtcgcattgaaatccgtcacggcttttttcaaatggctgcgggaggcagaggaagagtccgaccacaactag

SEQ ID NO: 28534 - DNA, 4821 bp, synthetic construct
  misc_feature 1..4821: note = Description of Artificial Sequence: Synthetic coding sequence
  source 1..4821: mol_type = other DNA
atgaataaggcgcctcagtctaccggaccacctcccgcaccctcgccaggcctgccccagccggcatttccgcctggccagacagccccagttgttttctctacacctcaggcgacacagatgaacactccttcacagcctcgacagggtgggtttcgcagcctgcaacacttctacccatccagagcccagccaccttcctcagcggcttcacgagtgcaatcagctgctcctgccaggccgggacctgccgctcacgtgtaccctgccggtagccaggttatgatgatccctagtcaaatctcgtatcctgctagccagggggcatactatataccaggccagggacggtccacctacgtagtacccacacagcagtacccggtccaacccggtgcccctgggttctacccaggggcttcccccacagagttcgggacctacgccggagcatattatccagcacagggggtccaacagttcccaactggcgtggcccctacgccagtgcttatgaaccagccaccacagatagccccaaagagagagagaaaaactatccggataagggacccaaaccaggggggtaaagatatcaccgaagaaattatgtccggggcacgcaccgccagtacacctactcctccacagactggtggcggattggagccacaggctaatggtgagacaccacaggtggctgtaattgtgcgccctgacgaccggtctcaaggggcaatcatcgctgatcgccctgggctccctggacccgagcactccccttccgaatcccagcccagcagtccctctccaactcccagccctagcccagtgctggagcctggatctgagcctaacttagcagtgctgtctatccccggagacaccatgactaccattcagatgagtgttgaggagtcgacgccaatcagcagggagacaggcgagccataccggctgagccctgagcctacacctctcgccgagcccattctggaagtggaggttactctctcgaaacccgtgcctgagtcggagttttctagcagtcctctgcaggctcctactcccttagccagtcatacggtcgagatacacgaacccaacggcatggttccttcagaagacctcgaacctgaggttgagagttccccggagctggcaccgcctccggcatgtccatccgagagccctgtgcccatagcaccgactgcacagcccgaagagctgctcaacggcgctccaagcccacccgcagtagacctgtcacctgtgtccgaacctgaggagcaggctaaagaggtcacggcctctatggcgccacctactatccctagcgccactcccgcaaccgccccaagtgctacgtctccagcccaagaggaagagatggaggaggaagaagaagaggaagaaggagaagcaggagaggcgggagaggccgagtcagaaaagggcggagaggaactgctcccccctgagtcaactcccattcctgccaacctctcacagaacctcgaagccgcagcagcaactcaggtggcagtgtcggtaccaaagcgtcggaggaagatcaaagagctgaacaaaaaagaggctgtgggtgacttattagatgcgtttaaggaggctaacccagcagtgcccgaagtagagaatcagccccctgccggatccaatccaggcccagagagcgaggggtcaggcgtccctccgaggcccgaagaggccgatgagacgtgggactcaaaggaggacaagattcataacgccgaaaatattcagcctggagaacagaagtacgagtataagagtgaccagtggaaacctctcaatttggaagagaaaaagcgctacgatcgggagttccttctgggcttccagtttatttttgcttcaatgcagaaacctgagggccttcctcacatcagcgacgtggtactcgacaaggctaataaaacacccctgcgacctttagatcctacccggctgcagggaattaactgcggcccagattttacccccagctttgcgaatctggggaggactactctctctacacgaggtcccccacggggaggcccaggcggtgaattacctcgcggtcctgccggacttgggcctaggcggtctcaacagggccctcgcaaagaacctcggaagattatcgccaccgttcttatgacagaggatattaagttgaataaagccgagaaagcgtggaagcccagctccaaaaggacagctgccgacaaagatagaggtgaggaagatgcggacgggagcaaaacacaagatctgtttagaagggtgcggagtattcttaataagttgactccgcaaatgttccagcagctgatgaaacaggtgacacaactggccattgacacggaggagcgactgaaaggagtgatcgatctcatcttcgagaaggcaattagtgagccaaacttctctgtcgcatacgcaaacatgtgtagatgcctgatggcattgaaggtgccgactaccgagaagcctacagtgacggtgaacttcagaaagctgctcctcaaccgatgtcagaaagaattcgaaaaggacaaagacgatgatgaggtctttgagaagaagcagaaagagatggacgaggctgctaccgctgaagaaaggggccgattgaaagaggagttggaggaggctcgtgatatagcaaggcgcagaagtctgggcaacatcaagttcattggcgagctctttaagcttaaaatgctgacagaggcgattatgcatgattgtgtcgttaaactactgaagaatcacgatgaagagtctctggagtgcctctgtagactcctgacaacaattggcaaggatcttgactttgagaaggcaaagcccaggatggatcagtattttaatcagatggagaagattatcaaagagaaaaagacgagttcccgaatcaggtttatgttgcaggatgtcctcgatttgcgcggtagtaattgggtgccgagacggggagaccaaggacctaagacgattgaccagatccacaaagaggcagagatggaagagcaccgcgagcacattaaagtgcagcagcttatggcgaagggcagcgacaagcgcagaggtgggccacccggtcctccgatctccagggggctgcctctggtggacgatggaggctggaatactgtgcccatcagtaaagggtctagacctattgatacttctcggctgactaagatcaccaagcccggaagtatagactccaacaatcagttgtttgccccaggcggtcgccttagttggggcaaaggctctagcggcggtagtggggcaaagcccagtgacgcggcatcggaagccgctaggcctgccactagcactctgaaccggttcagcgccttacagcaagccgttcccaccgagtctactgacaacagacgggtagtccagcggagtagtctgtcccgggagcggggagagaaagcaggcgataggggagaccgcctggaacgaagcgaaagggggggagacagaggcgaccggcttgacagagcgaggacgccagccaccaagaggagtttctccaaggaagtcgaggagcgcagtcgtgaacgtccctcccagcctgaggggcttaggaaggctgccagtctgaccgaagaccgcgacaggggcagggacgctgtcaagcgagaagccgcactgcctcctgtttctccattaaaggccgcactgagtgaagaagagctggaaaagaagagcaaggctatcattgaggagtatctgcatctgaatgacatgaaagaggcggtgcaatgtgtgcaagagctggcaagtccatctctcttgttcatctttgtgcgtcacggggtggagtccaccttagaacgaagtgcaatcgccagagaacatatgggccagttgctccatcagctgctctgtgccggacatcttagtaccgctcagtactatcagggcttatatgagattctggaactggcagaggacatggaaattgatattccccatgtctggctgtacttggccgagttggtcactccaatattgcaggagggaggggttcctatgggcgagctgttccgcgagattactaaacccctcaggcccctaggcaaggcggcttctctgctgctggagattcttggtctgttatgtaagtctatgggaccaaaaaaggttggcaccttatggagagaggccggtttgtcttggaaggaattcttacctgaggggcaggacataggagctttcgtggctgaacagaaggtcgagtacacgctaggggaggagagcgaagctccagggcagagagctctgccctccgaggagctgaaccgtcagctcgagaaactgctgaaggagggaagcagtaatcaaagagtcttcgattggatagaggccaatttatccgagcagcagatagtgtctaatactctggtgcgggctctgatgacagctgtgtgctacagtgcaatcatcttcgagactccactgagggtcgacgttgcagtgctgaaggcacgggctaagctgttgcagaagtacttgtgtgatgaacagaaggaactgcaagctctgtacgcacttcaggcactcgtggtcaccctcgagcagccccctaatctgctgaggatgtttttcgatgccctgtacgacgaggatgtcgtgaaggaggatgccttctattcatgggagtcctcaaaggatccagcggagcagcagggcaagggcgtagctttaaaatcagtcacagcctttttcaaatggctaagagaagcagaggaggagagtgaccataattag

SEQ ID NO: 28535 - DNA, 4821 bp, synthetic construct
  misc_feature 1..4821: note = Description of Artificial Sequence: Synthetic coding sequence
  source 1..4821: mol_type = other DNA
atgaacaaagccccacagagcacggggcctccccctgccccttccccaggcctgcctcagcccgctttccctccagggcagaccgcccctgtagtgttctccacgccccaggcaacacagatgaatacaccatcacagcccaggcaggggggatttcggtcacttcagcacttttatccaagtcgcgctcagccaccatcttctgccgctagtcgcgttcaatctgccgctcccgctcggcctgggcctgcagctcatgtgtacccagccggaagtcaagtgatgatgattccatctcaaatttcataccccgctagtcaaggcgcatactatattccaggccagggtcgctcaacttacgtggtgcctacccagcagtaccccgtacagcctggagccccaggcttctaccccggagcaagtcccaccgagttcgggacctacgccggagcttattaccctgcccagggagtgcaacagttcccaacgggggtggccccaaccccagtcctcatgaatcaaccgccacagatcgccccaaagagagagaggaagacaatcagaatacgggaccccaaccaggggggaaaggacattacggaggagatcatgtctggagccaggactgcaagcacaccgaccccgccacaaaccgggggtggcttggagcctcaagcaaatggtgagacaccccaggtggcggttatcgtgaggcctgacgatcgctcgcaaggcgcaataatagctgataggcctgggctccctgggcctgagcattcaccatcagagtcgcagcccagctcaccatcacccacaccttccccaagtcccgttctagagccaggctccgagccgaacttagccgtgctgtccatccccggtgacactatgacgaccattcagatgtccgtggaggagagtacacccatatcccgagaaactggcgaaccctatcggctgtccccagaaccgacaccactggcagagcccatcctggaggttgaggtaaccctgagcaaacccgtcccagaaagcgaattctcttcctctccccttcaggcaccaacacccttagccagccacaccgtcgagatacatgagcctaatggaatggtgcctagcgaggatttggaacccgaggtggaaagttctccagaactcgcacctcctcctgcttgtcccagtgagtcccctgtgcctattgcccctaccgctcagcccgaagaactcctcaacggtgcacccagtcctcccgcagttgatctttcgcccgtaagcgaacccgaagagcaagccaaggaagtgacagcgtcaatggctcctcccactattccaagcgccacgccggctacagccccttccgctacttcgcctgcacaagaggaggagatggaggaggaggaggaggaggaggagggcgaggccggtgaggctggtgaggcggaaagcgagaaggggggagaagagctcttaccaccagagtctactccaatccccgcaaacctctcgcagaatctggaagctgccgcagcaacacaggttgcggtttctgtccccaagcggaggcgaaagatcaaagaattgaataaaaaagaggcggtgggtgatctgcttgacgccttcaaagaagctaatcctgccgtccccgaagtcgaaaatcaacccccagccggttcaaaccccggtcccgaaagcgaagggagcggagtgccccctagaccagaagaggccgatgagacatgggactcaaaggaggataaaatccacaacgccgagaatatccagcccggagagcagaagtacgaatacaaaagcgatcagtggaagccactgaacctggaagagaagaaaaggtacgatcgggagttcttactcggctttcagttcattttcgcgtccatgcagaaacccgaaggccttcctcacatctctgacgtggtgttggacaaagccaataagaccccgctgcgacctctcgatcccacaaggctgcaaggaatcaattgtggtcccgactttacaccgagtttcgccaatctcggcaggaccacgctttcaaccaggggacccccacggggtggcccaggtggagaactaccccgagggcctgccggacttgggcctcggaggagccagcaagggccaagaaaagagcccaggaaaatcattgcaactgtcctgatgacagaggacattaagcttaacaaagctgaaaaggcatggaagccgtcgtccaaaaggacagccgcagacaaagatcgaggggaagaagatgccgatggctctaagacccaagacctctttaggagggttcgctccatcctgaacaaacttactccacagatgttccaacagctgatgaagcaggtgacccagctagctatcgacactgaggagcgcctcaagggtgtcatcgacttaattttcgagaaagctatttctgaacctaactttagtgttgcatatgccaatatgtgccgctgcttgatggcactcaaggtccccacaaccgaaaaacctacagtgacagtcaatttccggaagctgcttctcaaccgctgtcagaaagaattcgagaaggacaaggatgatgacgaggtcttcgagaaaaagcaaaaggagatggacgaggcagccacagcagaagagaggggcaggctgaaggaggagttggaggaagcaagggatattgccaggcggagaagcctgggcaacatcaaattcataggagagcttttcaaactcaaaatgttgacagaagccataatgcatgattgtgtggttaagctgcttaaaaatcatgatgaggagagtctcgaatgcttgtgtcggctgttgacaactattgggaaggacctggacttcgagaaggccaagccccgtatggaccagtactttaatcagatggagaagattataaaggaaaagaagaccagctcccgaattaggttcatgctccaggatgtcctcgacctgagaggatccaactgggtccctcgtagaggggatcagggccctaagacgatagaccagatccacaaagaggccgaaatggaggagcatcgagagcatatcaaagttcagcagttgatggccaagggctccgataaacgacggggaggacccccaggtcctccgataagtcgcggtctccctctggtcgatgatggcggttggaacaccgtgcccatcagcaaagggtcccgtcccattgataccagcagacttacaaagattaccaagccaggtagcatcgattccaataaccagttatttgcccctgggggacgcctttcttgggggaagggctcttccgggggatccggcgcaaagccatcagacgcagcctctgaggccgctcgaccagccacgtctacgttgaacagattttccgccctgcagcaggcagtgcccacggagtccaccgacaaccgacgggtggtgcagcgttcctcactttcccgagaacgaggcgagaaggccggtgaccggggagaccgactagaacggtccgagcggggaggagaccgaggggatcgtcttgatcgtgctaggacacccgcaactaagcgctccttttctaaggaagttgaagaaagaagtagagagcggccttctcagccagagggtttgcgcaaagccgcatcgctgaccgaagacagagacaggggaagagacgcagtaaaacgagaggccgcactcccaccagtgtctcccctgaaggctgctctgtcggaagaagagctcgagaaaaaaagcaaggccatcatcgaggaatacctccacctgaatgatatgaaagaggcagtgcagtgtgtccaggagctggcttcacctagtctgctatttattttcgtgcggcatggcgtagagagtacacttgagagaagtgcaatagccagggaacacatggggcagttgctgcatcagctgctttgtgccggtcacctctcaaccgcccagtattaccaggggttgtatgaaatcctggagctggcagaagatatggagatcgatattccgcacgtatggctgtacctcgcagagctcgtgacaccaattcttcaggaaggcggtgttcctatgggagagctgttcagggagattacaaagccactgcggccactcggcaaggctgcgagtttgctcctcgagatcctcgggttgctgtgcaaaagtatggggccaaaaaaggtggggaccctgtggagggaggcaggcctgtcttggaaggaattcttgcctgaagggcaggatatcggtgccttcgtcgctgagcagaaggtagagtacacactgggggaagaaagcgaggctcctggccagcgtgccttgcctagcgaggaattgaatcgccagcttgaaaaactgctcaaagaaggttccagtaatcaaagagtcttcgattggatcgaggccaacctttcagaacagcagatcgtctccaacactcttgttagggctctcatgaccgccgtctgttatagtgccatcatattcgagactccactgagggttgacgttgctgtcctgaaagcacgagctaagttgctgcagaagtatctgtgtgacgagcaaaaagagttgcaggcattgtatgccttacaggcactggtggtgactctggaacagcctcccaaccttttgagaatgttcttcgatgcgttatacgatgaggacgttgtgaaagaggatgccttctatagttgggagtcctctaaagatcccgctgaacaacagggaaagggtgtcgcccttaagagtgttactgcattcttcaagtggctgcgcgaggcggaggaagagagtgaccacaactag

SEQ ID NO: 28536 - DNA, 4539 bp, synthetic construct
  misc_feature 1..4539: note = Description of Artificial Sequence: Synthetic coding sequence
  source 1..4539: mol_type = other DNA
atgatgataccgagtcagatatcttaccctgctagccagggtgcctactatattcctggtcaagggaggtccacctacgttgttcccacccagcagtaccctgtgcagcctggagcacctgggttctaccctggggcttctcctacggaattcgggacttatgctggggcttactacccggcacagggcgtccagcagtttcctacgggagtggccccaacacctgttcttatgaaccaacctcctcaaattgctcccaagagagagaggaagactatccgcattcgcgaccccaatcagggaggcaaagacatcaccgaggagattatgagcggagcaagaacagcttccacccccacaccccctcagacaggagggggactcgagccccaggctaatggagaaactccacaggtggcggtaatcgtccgcccagacgacagatctcaaggcgctataattgcagaccggccagggttgcccggacccgaacatagtcccagcgagtctcaaccttcatcgcctagtcccactccttcgccctctcccgttctggagccaggatctgaaccaaatcttgccgttctgtctatccccggagacaccatgaccactatccagatgtccgtcgaagagtctacccctattagcagagagactggggagccttatcggttgtcccccgagcccacaccactggcggagcccattcttgaagtcgaagtgactctatctaagccggtcccagagagtgagtttagctcttccccactgcaagcgcctacacctctggcatcccacaccgtcgagatccatgagccgaacgggatggtgcctagcgaagacctcgagccagaagtggagtcaagccctgaattagcccctcctcccgcttgccccagtgaaagccccgtccccatagcacccactgcccagcctgaagagctcctgaacggggcacccagcccaccagccgtcgatctgtctcccgtaagcgaaccggaggaacaggctaaggaagttactgccagcatggccccacccactatcccctccgctacccccgcaacagccccttcagcaactagtcccgctcaggaagaggaaatggaggaggaagaagaggaagaggaaggcgaggccggagaggcaggtgaagccgagtcagagaaggggggagaggagctgctgccaccggagtctacaccgattccagccaacctgtctcagaatctagaagccgctgcggcaacacaggttgcggtctctgttcctaaaaggcgtagaaaaattaaggagctaaataagaaagaggcagtcggtgatctgcttgatgctttcaaggaggccaaccccgctgttccggaagtggaaaaccagccacccgctgggtctaaccctggcccagagtccgaaggttccggcgtgccccctcgaccagaggaggcagatgaaacttgggactctaaggaagacaagatccacaatgccgagaacattcagcccggagaacagaagtacgaatacaaatctgatcaatggaaacccttgaatctggaggaaaaaaagagatacgaccgagaattcctgctggggtttcagtttatctttgcctctatgcaaaaacccgaaggattgcctcacatatccgatgtcgtgctggataaggccaacaagacacccctgcgcccactcgacccaacacggttgcaaggcattaactgcggccctgactttacaccatcctttgccaatctgggacggacaacgttgtctaccaggggtccaccacgcggtggccctggtggcgaacttcctcgaggccctgccggtctggggcctcgaaggtcacaacagggccctaggaaggaacccaggaaaattatcgctaccgtacttatgacggaggatattaagttgaataaggctgaaaaggcctggaaaccctcatccaaaaggaccgccgctgataaagacagaggcgaagaggacgccgatggcagcaaaacccaggatcttttcagacgtgtcaggtcaatcctgaataaattaactccccagatgttccagcagctgatgaagcaggttactcagcttgccatcgataccgaggaacggttgaagggcgtgatcgatcttatcttcgagaaggctatttccgagccgaacttttctgttgcctatgctaacatgtgtaggtgtttgatggcgctaaaagttcccacaacagaaaaacccacagttaccgtgaacttccgtaagctgctacttaaccgttgtcaaaaggaattcgagaaagacaaggatgacgacgaagtgttcgagaagaagcagaaggaaatggatgaagcagctacggccgaggaaaggggcaggctaaaagaagaactagaggaggcgagagacattgctcggaggcgatccctagggaatattaaatttattggcgagttgtttaaactcaaaatgctgacagaggcgataatgcacgactgtgtcgtcaaactgcttaaaaatcacgacgaagagagcctggagtgcctatgtcggctgttaactacaataggtaaagatcttgatttcgagaaagcaaagccacggatggatcaatatttcaatcagatggagaaaattatcaaggagaaaaagacgtcgagcaggatccggtttatgctccaagacgtcctcgaccttcggggtagcaactgggtgccacgccgaggcgaccagggcccaaagacaattgaccaaattcacaaagaagctgaaatggaggaacatagggagcatatcaaagttcagcagttgatggctaaagggagtgacaaaaggaggggcggtcctccaggaccacccatcagtaggggcctgcccctcgttgacgatggagggtggaacactgtccctatttcaaagggaagcagacccattgacacatcacgactgactaaaattacaaagcctggctcgatcgactccaataaccagttattcgcaccagggggacgcctgagttggggcaaaggctccagcggcggatcaggtgccaagcccagtgatgcagctagtgaggccgcaagacctgcaacaagcactctgaaccgcttttccgccttgcagcaggcggtccctacagaaagcacagataacaggagagtggttcagagatcctccctgtcccgagaacgcggagagaaggccggagataggggggaccgcctggaacgctctgagcggggaggcgaccgcggagacaggctagaccgtgcacgcacccccgctactaaacgcagtttcagtaaagaagtggaggagcgatcccgggagagaccttcacagccggagggtttgcgcaaggccgcttctctgaccgaggatcgagatcgtgggagagatgctgttaaacgcgaggctgctttgccacctgtgagccctttgaaggcagccctttctgaggaggagttagagaagaagtctaaggcaattattgaagaatacctccacctgaatgacatgaaggaagcagttcagtgtgttcaggagctcgcctcaccgtcgctgctctttattttcgtgagacacggggttgaaagtaccttggaaaggtctgccatcgcgcgtgagcatatggggcaactcctacatcagttgctctgcgcagggcacctcagcactgctcagtattatcaggggctgtatgaaattctggaactggcagaggacatggagattgatattccccacgtgtggttataccttgccgaactcgtcacccctattttgcaggagggaggcgtgcccatgggggagctctttcgggaaatcaccaagcctctccgtcctttgggaaaagccgctagcctcttactcgagattctcggactattatgcaaaagcatgggccctaaaaaggttggaacactgtggcgcgaagctggactgtcttggaaggagttcctgcccgaaggacaggatatcggcgcatttgtggcagaacagaaagtggaatacaccctaggggaagagtctgaggcacctgggcagagggccttgccaagtgaggaactgaaccggcaactagaaaagctactcaaggagggaagttcaaatcagagggttttcgattggatagaagccaacctgagcgagcagcaaatcgtctccaacacactggtgagggctttgatgaccgctgtctgttacagcgcgatcatcttcgaaacacctctcagagtggacgtggcggttctgaaggccagagcaaagctgcttcaaaaatacctgtgcgacgaacagaaggagcttcaggctttgtacgccttgcaggcactggtggttacactggagcagccacctaacttgctgcggatgttcttcgacgctctgtacgatgaggacgtcgtcaaagaggacgctttttactcgtgggagtcttccaaggaccctgcagaacagcaaggcaagggcgtggcacttaagagcgttaccgccttttttaagtggctgagggaagccgaggaagagtccgaccacaactag

SEQ ID NO: 28537 - DNA, 4539 bp, synthetic construct
  misc_feature 1..4539: note = Description of Artificial Sequence: Synthetic coding sequence
  source 1..4539: mol_type = other DNA
atgatgatcccctctcagatttcttaccctgccagccagggtgcttactatatccccggacagggcagaagcacatacgtggtccctacgcagcagtaccctgtgcagccaggtgcccctggcttttaccctggcgcatctccgaccgaatttggtacttacgctggggcatactaccccgctcagggagtgcagcaattccctactggagtggctcccactcccgtgcttatgaatcagccccctcagatcgccccaaagcgcgaacggaagacgatccgcatcagggatccaaaccagggcggaaaggacattacggaggagattatgagcggggctcgcaccgcctccacgcctacgccacctcagaccggcggagggctggaacctcaggccaatggcgagacgccccaggtcgccgtgattgtgaggccagacgaccgttcacagggagccatcattgccgacaggccaggcctgccaggtccagagcatagccccagtgagagtcagccatcgagtccttcccccacgccaagtcccagtccagtgctggagcctgggtccgagccaaaccttgctgtgctgagcatcccaggagacactatgaccactatccagatgtccgtggaagaatcaactccgatttctcgggaaaccggtgagccttataggttgtcgcccgaacccaccccactggctgaacctatcctagaggtggaggttacactctccaagccagttcctgaatcagagttcagcagcagccccttgcaagcaccaactcctctcgccagccacaccgtagagattcatgagcctaacggcatggttccttccgaagacctcgaaccagaggtcgagtcgtccccagaacttgcgcctccgcctgcctgtccatctgagtctccagtgccgattgcgccaacggcgcagcctgaagaacttctgaacggggctccatccccacccgctgtggacctatctcccgtgtctgaacctgaagagcaagcgaaggaggtcaccgctagcatggcccctcccactattccttctgcaacaccagccacggctccatctgcaacatcgcccgcacaggaagaggagatggaggaagaagaagaagaggaggaaggagaagcaggagaagctggagaggctgaatcagagaagggaggcgaggagctgctgcctcccgagtccacacccatccctgccaatctgtcacagaacctcgaggcagcagccgctactcaggtggccgtcagtgtgcccaaacgtcggcgaaagatcaaagaactaaacaaaaaggaggctgttggcgacttgctggacgcattcaaggaggccaatcccgctgtgccagaggtcgagaatcagccccctgcaggtagtaaccctggccctgaatctgagggatctggcgtgccaccacggcctgaggaggccgatgagacttgggacagtaaggaggacaagatccataatgcagaaaacatccagcccggtgaacaaaagtatgagtacaaatcagatcagtggaaaccattaaacctcgaagagaagaaacgctatgaccgcgagttcttactggggttccagttcatcttcgcctcgatgcagaagcccgaaggcctaccccacataagcgatgtggtgcttgacaaggccaacaaaaccccattgagacctctggaccccactcgactgcaggggatcaattgcggcccagatttcacaccaagttttgctaacctgggcaggacaacactttcgactaggggaccaccaaggggcggacccggaggcgagctgcccagaggaccggctggcttaggcccaagacggtcacagcaggggcctcggaaagaacccaggaaaatcatagcgaccgtcctaatgaccgaagacattaaattgaacaaggcggaaaaagcatggaagccctccagcaagcgtaccgccgcagacaaagatcggggagaggaagacgctgacggctccaaaactcaggatttattcagacgcgtgaggagcatactgaataagcttacaccccagatgttccaacagcttatgaagcaggtcacccagctggcaatcgatacagaggaaaggctgaaaggggttatagacctgattttcgagaaggccatttcagagccaaacttctctgtggcttatgctaacatgtgccgttgcctgatggcactcaaggtgcccacaaccgaaaagcccactgtgaccgtgaatttccggaaactgctcttaaatcggtgtcagaaagaattcgaaaaggataaggacgatgacgaagtgtttgaaaagaagcagaaggaaatggatgaagctgctaccgctgaggaacggggaagactgaaagaggagcttgaggaagcacgtgacattgccaggcgtcgctcgctcggcaatatcaaattcatcggcgaactgttcaagctcaagatgttaaccgaagccataatgcatgactgtgtggtgaagctgctgaagaaccatgatgaagagagtctggagtgcctgtgtcgactgcttacaaccattgggaaggacttggattttgagaaagccaaacctcgaatggaccaatattttaatcagatggaaaaaataatcaaggaaaaaaagacctcatccagaattagatttatgttgcaggacgtgctggatctgcgtggatccaactgggtcccacgtcgaggagatcaaggccctaaaaccatagaccagatccataaggaggccgagatggaggagcatagggagcatatcaaggtccagcagcttatggccaaaggatcagataagaggcgcggaggaccacccggacctcccatctcccggggtctgcctcttgtggacgacgggggttggaatacagtgccaattagcaaaggtagccggccaatagacacctctagactcaccaaaatcacaaaacccggaagtattgattccaacaaccagttgtttgcccctggtgggcgattgtcatggggaaaaggctcttcagggggttctggtgcgaaaccctcagacgcagcgagtgaagctgctcgccctgccacttccacactgaacaggttttctgccctgcaacaggcagtgcccaccgagtcaactgataaccgccgagtcgtccagaggagcagcctgtcaagggagagaggtgaaaaagccggtgaccggggagaccggctcgagagatccgagcgagggggagatagaggagatcgtctcgatagagcaaggacgcccgcaacgaagcgctccttctctaaggaagtcgaggaaagaagccgcgaaagaccatcccagcctgaaggcttacgtaaggcagcaagcctgaccgaggacagggatagggggagggacgcggtgaagagggaagccgctctgcccccagtgagcccgttgaaggctgctctcagcgaagaggagctcgagaaaaagtcaaaggccatcattgaagagtatcttcatctgaacgacatgaaagaggccgtgcagtgtgtgcaggagctcgcttctccatcattgctgtttatttttgtgcgtcacggagtcgaatctaccctggaacgctccgcgatcgccagggagcatatggggcagctcttgcatcagttgctgtgcgctggtcacctgtccacggcccagtactaccaggggctctatgagattctagagctcgccgaggatatggagatagacataccccatgtatggctgtacttagccgagctcgtgactcccatattgcaagaaggaggagttcctatgggcgaactcttccgtgagattactaagcctctccggcctctgggcaaggcagcctctttgctcttggaaattttggggctattatgcaaaagcatgggcccaaagaaggttggaaccttgtggcgtgaggcgggtctgtcatggaaagagttccttcctgagggccaggatattggcgcttttgtcgctgaacagaaggtagagtacacactgggcgaggagtcagaagccccagggcaacgggcacttccatccgaggagctaaacagacagttggagaagttattgaaggaagggtcaagcaatcagcgggtgtttgactggatcgaggcaaatctcagcgaacagcagattgtcagcaatacgttggtcagagcgttgatgaccgccgtgtgctactcagccattatcttcgagacaccgctacgcgtggatgtggcagttctgaaagccagagccaaacttttacagaagtatctttgcgatgaacagaaggagctgcaggcgctctatgccctgcaagctttggttgtgaccttagagcagccgcctaacttgttgaggatgttctttgacgccctgtatgacgaagacgtagtgaaggaggacgccttttactcctgggaatcctccaaggatcctgctgagcagcagggtaaaggtgtggccctaaaatcggttacggcctttttcaaatggcttcgtgaggcagaggaagagagtgaccacaattag

SEQ ID NO: 28538 - DNA, 4683 bp, synthetic construct
  misc_feature 1..4683: note = Description of Artificial Sequence: Synthetic coding sequence
  source 1..4683: mol_type = other DNA
atgaacaccccttcccagccgcgacagcacttctacccatcgcgcgctcagccccctagttccgctgctagtcgcgtgcagtcagccgcacccgcacgcccaggcccagcagcacacgtgtacccagcgggttcccaggtgatgatgatcccctcccagatcagttatccagcatcacagggagcctattacattcccggacagggtcggtcaacatacgtagtacccacgcagcagtaccctgttcagcctggcgctccgggattttatccaggagctagccccactgagttcgggacttatgctggagcgtactatccagctcaaggggtgcagcaattccccaccggggttgccccaacccccgtcttgatgaatcagccccctcagatcgcacctaagagggaaagaaaaactatcaggatccgagatcccaatcagggcggaaaggacataactgaggaaatcatgagcggcgctcgaaccgcttctaccccaacgccaccacagacaggcggaggccttgaaccccaggctaacggcgagactccccaggtggccgtaatcgtgagacctgacgaccgttctcagggtgcaataatcgctgaccggcctggtctcccaggacccgaacactcaccaagtgagtcccagccctcctctccctcaccaaccccctccccatcgcccgtgctcgagcctggatctgaacccaatctggcggtactgtctattcctggggatacaatgacgaccattcaaatgagtgtcgaagaatccacccccattagcagagaaacgggggaaccctatcgactctccccagagccgaccccactagccgaacccatactggaagtggaagttaccctgtcaaaacctgttcctgagagcgaattttcttccagccctttgcaggcacctacacccctggcgtcccataccgtggagatccatgaaccaaatggaatggttccatcagaggacttagaacccgaggtcgaaagctctccagaactggctcccccaccggcttgtccatccgaatctcccgtgcctattgcaccgactgcgcagcctgaagagttgctgaacggggctccctcgccgcctgccgttgaccttagtccggtaagcgaacctgaggagcaggctaaggaagtcaccgcatcaatggctccaccaactatcccttccgcaacgccggcaaccgcacccagcgcgacaagcccagcccaggaagaagagatggaagaagaggaagaggaagaggagggtgaagctggtgaggcgggagaagcagaaagtgagaaggggggtgaggagcttctccctccagaatccacgcccatcccagcaaatcttagtcagaatctggaggccgctgctgcaacccaagttgccgtgtcagtgcctaagcggcgacgcaaaatcaaagagctcaacaaaaaggaggccgtgggtgatcttctggacgcatttaaggaagctaaccctgccgtgcccgaggtggaaaaccagcctcctgctggctctaaccctggccctgaatcagagggctctggggtacctccccgtccagaagaggccgatgaaacgtgggattctaaagaggataaaattcacaatgccgagaatatacagccaggcgagcagaagtacgaatacaagagcgatcaatggaagccactcaatctggaggaaaagaaaaggtacgatagggaattcctgctcggcttccagttcatcttcgccagcatgcagaaacccgaaggtctgccgcatatcagcgacgttgtgctagataaagccaataaaacaccactccgtccgctcgacccaacccgacttcaaggaatcaactgcggacctgatttcacccccagctttgcaaaccttgggcgaacgactttgtctacacggggtcctccccgtgggggacccggaggtgaactcccaaggggccctcaggccggtttgggtcctagaaggtcgcagcaggggcctcgtaaggaacctcggaaaatcattgctactgtacttatgacggaggacattaaattgaataaagccgagaaagcatggaagccttcctccaaacgcacggctgctgataaagatcgcggtgaggaggacgccgacggttccaaaacacaggatctgttcaggagagtacgatctatcttgaacaagctgacaccccagatgtttcagcagctgatgaagcaggttacccagcttgcaatagataccgaggaaagattaaagggggtaatcgatctcatatttgagaaggccatttccgaacccaatttctcagtcgcttacgcgaatatgtgcaggtgcctcatggccctcaaggtgcctactaccgaaaagcccaccgtgaccgttaatttcaggaagctactcctcaacaggtgtcagaaagagttcgaaaaagacaaggatgatgatgaggtctttgagaagaagcagaaggagatggacgaggcagcaactgccgaggagcggggaaggctgaaggaggaattggaagaagctagagatattgctcgaaggcggtccctaggcaatataaagttcataggagaactttttaagctaaagatgctaactgaggcgattatgcacgattgtgtcgttaagctgctgaagaaccacgatgaggaaagtttggagtgcctgtgccgcttgctgaccacaattgggaaagatctggattttgaaaaggctaaacccagaatggatcagtacttcaatcagatggaaaaaatcattaaggagaagaaaacttcgtcacgcatcaggtttatgctgcaagacgtgctcgatctgcggggttctaactgggtaccgagaagaggggaccagggcccaaagacaatcgatcagatacataaggaagctgaaatggaagagcaccgcgagcacataaaagtgcaacagctgatggctaaaggcagtgacaagcggcgtggcggacccccagggccacccatctcccgcggtctgcctctggtggatgatggtgggtggaataccgttcccatttccaaaggatctcggcctatagatacttctaggctgactaagattaccaaacctggctctatcgattctaataaccaacttttcgccccaggcggtaggttgtcttgggggaagggctcaagcggcggatccggagccaagccgtctgacgccgcatctgaggcggcacgccctgctacctcaacgcttaatcggttctccgcattacagcaagccgtgccaaccgagtctaccgataaccggagagtggtgcagagaagtagtctgtcacgcgagagaggagaaaaggcaggagatcgtggagaccgcctcgagcggtccgagcggggtggggatcgtggggataggttggacagagccaggacacccgcaaccaagagatccttctcaaaagaggtagaggagcgaagtcgcgaacgtcccagccaaccggaggggctccgaaaagccgcatccttaaccgaggatagagaccggggacgcgatgccgtcaagcgcgaggcagcattgcctcccgtttcccccttgaaggctgctctatcagaggaagaactggaaaagaagtcgaaggccatcatcgaagagtatctgcatctcaacgacatgaaggaagcagtacagtgcgtacaggaactagcatctcctagtctgctgttcatatttgtgcggcatggcgtggagtccaccctagagcggtctgctattgcacgtgagcacatgggccagctgctccaccagctgttgtgtgctggacatttgagtacagctcagtactaccagggactttacgagattttagagttagcagaagatatggagatcgatatcccacatgtgtggctttatctggctgagcttgtcaccccaattctccaggaaggaggggttcctatgggggaactgtttcgagagattactaagcctctgagacctctgggtaaagcggctagcctcctcctggaaattttgggcctgctgtgcaaaagtatgggacctaagaaggtcggcaccctgtggcgcgaagcgggtctctcatggaaggagttcctgccagagggtcaggacattggggctttcgttgcagagcagaaagtggagtacaccctgggtgaggaaagcgaggcacccggtcaacgcgcactccctagcgaagagctgaatagacagctggagaaactgctaaaggagggatccagcaatcagagggtgttcgactggattgaagccaatctgagcgagcagcagatcgtgagcaatactctggttagagcactgatgaccgcagtttgttacagcgcaataattttcgagactccccttagggtagacgtggctgtgctgaaggccagggctaaacttttacaaaagtatctgtgcgatgaacagaaagagctgcaagcgctctacgctctgcaggccctcgttgtgaccttggaacagccacctaacctgttgcggatgtttttcgacgccctttatgacgaggacgtggtgaaggaggatgctttttactcatgggagtccagtaaggatcccgctgagcagcaggggaagggggtcgctctgaagagcgtgactgctttcttcaagtggcttcgcgaggctgaggaagaatcagatcacaattag

SEQ ID NO: 28539 - DNA, 4680 bp, synthetic construct
  misc_feature 1..4680: note = Description of Artificial Sequence: Synthetic coding sequence
  source 1..4680: mol_type = other DNA
atgaacactccctctcagccaagacagcacttttatccctctcgggctcaaccaccttcttcggcggctagtcgggtacaatcagcggctccagcaaggcccggaccggcagctcacgtgtacccagcagggtcacaggtcatgatgataccctcacagattagctatcccgcatctcaaggtgcgtactatatcccgggacaaggacggtccacatacgtggttcccacccaacaatatcccgtgcagcccggtgcccctggcttctacccaggagcgtcaccgacagagtttggaacgtatgctggcgcttactaccccgctcaaggagttcagcagtttcctactggagttgccccaacccctgttttgatgaatcaacctcctcaaatcgctcctaagcgcgaacgtaaaaccattaggatccgcgacccaaatcaagggggtaaggatattactgaagagattatgtccggcgctagaacggcgtccacccccaccccacctcagactggaggagggctggagccgcaggccaacggagagactccacaggtcgctgttattgtgaggcctgatgaccggagccagggtgcaattatcgctgaccggcctggcttacccggtcccgaacacagcccatcagagtcccagcccagcagtccaagccctacgcccagccctagccccgttctggaaccaggatctgaacccaatctggccgtcttgtccatccccggagatactatgaccacaatccagatgagtgtggaggagtccaccccaatctctcgggaaaccggcgaaccctacaggctaagtccagagccaacccccctggccgagcctatcctcgaagtagaggtgacgctgtccaagcctgtgccagaatcagaattctcttcttctccactgcaggcacctacccctctcgccagtcacaccgtcgagattcacgaacctaatgggatggttcctagcgaggatcttgagcctgaggtggagtcttcccccgaactggcccctcctccagcctgtccctctgaatctcccgtgcccattgctccaactgcgcaaccagaggagctgctgaacggtgctccatcccctcccgcagtagatttaagccccgtgtccgagccagaggagcaagcgaaagaagtgacagcatccatggcaccgccaaccattccctctgctacaccggctacagcacccagcgctacgtcccctgcccaggaagaggaaatggaagaggaggaggaggaggaagagggcgaggccggtgaggccggagaagccgagtctgagaagggaggggaggaactgctcccaccagagtccacgcccatccccgctaacctgtctcagaatctcgaggctgctgctgctacccaggtggccgtttcagtgcctaaaaggaggaggaagatcaaggaactgaacaaaaaggaagcagtcggtgacctgctggacgcctttaaagaggctaacccagccgtccccgaggtggagaaccaaccacccgcaggcagcaacccaggcccagaatccgaggggagcggcgtacctcccaggccagaggaggcggatgaaacttgggattcaaaagaggataaaatccacaacgccgagaacattcagcctggcgagcaaaagtacgagtataagagcgaccagtggaagcccctaaacctggaggagaagaagcgctacgaccgagagttcttattgggattccagttcatctttgcgtcaatgcaaaagcctgagggcctcccccacatttccgatgtggtcctggataaagctaataagactccacttcggccactggaccctactcgactgcagggtattaattgcggacctgactttaccccatctttcgccaatctcggaaggactaccttgagcactcggggtcctccacgtggaggacccggaggtgagctgccccgtggtcctgccggattgggaccacgcagaagccagcagggacccaggaaagagccaaggaaaattatcgccactgtgctgatgacagaggatatcaagctaaacaaggccgaaaaagcttggaaaccctcttctaagcgcacagcagccgataaagatagaggtgaagaggacgcggacggaagtaagacacaggatcttttccggagggtccgttcgatcctcaataaactgacaccacagatgtttcagcaactgatgaagcaagtgactcagctggccatcgatactgaggaacgcttgaagggagtgatagacctgatttttgagaaagcgatctctgaaccgaatttttcagtggcatatgcaaacatgtgtaggtgtctaatggcactcaaagtccctactacggagaagcccaccgtcactgttaatttccgaaagctactgctcaaccggtgtcagaaagaattcgaaaaagataaggatgatgatgaggtcttcgagaagaaacagaaagagatggatgaggccgcaacggccgaagagcgtggtcggctcaaggaggagctcgaggaggcccgtgacatcgccaggagacggagcctcggcaacattaaatttattggggagctctttaagctgaaaatgttaacggaggctattatgcatgactgcgtcgttaagttactgaagaaccacgacgaagaatcgctggaatgcctttgtaggcttttaacaaccattggaaaggacctagacttcgaaaaagccaaaccacgcatggatcagtacttcaatcagatggagaaaataatcaaggagaaaaagacatctagcaggatccggtttatgctgcaggatgttctcgacctcagaggatctaattgggtccctagaagaggtgatcaaggccctaagacgatagatcaaatccacaaggaagctgaaatggaggaacaccgcgagcatatcaaagtgcagcagctgatggcgaaaggtagtgataaaagacgcggagggcctcccggacccccaatctcgagaggacttccactggtggacgacggaggctggaataccgtgcccatcagcaaaggctcacgcccaattgatacttctcggctgacaaaaattacaaagccaggctctattgactccaataaccaactgttcgcacccggaggtcgcctgtcatggggcaagggctcatctggcggatccggggctaagccgagcgacgcggctagtgaagcggctcgccctgcaactagcacactcaatcgcttttcagcattgcaacaggcagtccccacagagagcactgataacagaagagtggtgcagcgctcttcattatctagggagcggggagaaaaggcaggagatcggggagacagactggaaagatctgaacgcggaggggaccggggagatcgtctggatagagctcgcacacccgcaaccaagagatccttttcaaaagaggttgaggagcgatcacgagagcgccctagtcagcctgagggactccggaaggctgcgtcactcactgaagaccgggaccgtgggagagatgccgtgaagcgggaggctgcactgcccccagtgtcgcccttaaaggccgctctctctgaggaagagttggaaaagaaaagcaaggctatcatcgaggaataccttcacctcaacgacatgaaggaagctgtccagtgtgttcaagagctcgcctcccccagcctcctatttatcttcgttcggcacggtgttgagagtactctcgagagatcagccattgctcgagagcatatgggacagctcctccaccagctactgtgcgccggacatcttagcactgctcagtattaccaagggctgtatgagattctcgaactcgccgaggatatggagatcgacattccacatgtgtggctatacctggcagaactggtcactcccatattacaggagggtggggtcccgatgggggaactatttagagagataactaagccactgcgccctttgggcaaggccgcatccttgcttcttgagatccttggactgctgtgcaagtctatgggccctaaaaaagtcggaacactctggagggaggcgggtttgtcctggaaggaattcctgcccgaagggcaggacataggtgcctttgttgcagagcagaaggtggaatatacacttggagaagaatcagaggctcctggccagagagctctaccatcagaagagttaaatcgtcagctggagaaactcctgaaagagggaagcagcaaccagcgcgtgttcgattggatcgaggcgaatttgtccgagcaacagatcgtgtcgaatactctggttagagcactgatgaccgctgtgtgttatagcgcaatcatctttgaaacccctctgcgggtggatgtggctgttctgaaagctagggcaaaactgctccaaaaatacttgtgcgacgaacaaaaagagcttcaggccctgtatgccctgcaagcgctggttgtaacactcgaacagcccccaaatctgctacgcatgttcttcgacgctctgtacgacgaggacgtggtgaaagaggacgccttttactcttgggaaagttcaaaggaccccgcagaacagcaggggaagggagtggccctgaagtcagtgaccgccttcttcaagtggctgagggaagccgaggaggagtcagatcacaactag

SEQ ID NO: 28540 - DNA, 4821 bp, synthetic construct
  misc_feature 1..4821: note = Description of Artificial Sequence: Synthetic coding sequence
  source 1..4821: mol_type = other DNA
atgaataaggcgccacagtcaacaggacctccaccggcaccttcaccgggactacctcaacctgcctttcctccgggacagactgcacctgtggtattctccaccccacaggctactcagatgaatacgccttcacagcctaggcaggggggatttcggagccttcaacatttctaccccagcagagctcaaccgccaagctcagcagcctctcgtgtgcagtctgcagccccagcccgtccgggacccgcagcccatgtctacccagcgggatcccaggtgatgatgatcccctcgcagattagctatcccgcaagccaaggcgcttactacattcccggtcagggacgttccacttacgtcgtgcccacacagcagtatcctgtacagcctggcgcacctggattttatcctggggcatctccaacagagttcggcacatacgcaggtgcctattatccagcacagggcgtgcaacagttcccaactggcgtagcgccaactcccgtcctcatgaatcagccaccacagatcgcccctaaacgtgagcgaaaaacaatccggatccgcgacccgaatcaaggaggaaaagacattacggaagaaattatgagtggagcccgaaccgctagcactccaactccaccccaaacgggtggaggtttggagccacaagccaatggggagaccccacaggtggccgtgatcgttcgacccgatgacaggagccagggtgcaattattgccgacagacccggacttcccggacccgagcatagcccctctgaatcccagcctagctccccatctcccaccccgtcgcccagccccgtcctcgagcctggcagcgagcccaacctggccgtgctgtccatacctggcgatactatgacgacaatccaaatgagcgttgaagagagcacccctatctctcgagaaacaggtgagccctaccgtctctccccagaacctacgccactggccgagcccatcttggaggttgaagtgacactaagtaagcccgtgccagaaagtgaattttcaagtagtcctctccaggcccctaccccactggcttcccatactgttgagatacacgaacccaacgggatggtgccctcagaagaccttgaacctgaagtcgaatcgagccccgagctggctccacctccagcttgccccagtgagtctcctgtgcccatcgctcccaccgctcagcccgaagagctactcaacggagctccaagtccccctgccgtggatttaagtcccgtgtcagagcccgaagaacaggccaaggaagtgacagcatcgatggctccccctacgattccaagcgcgacaccagccactgccccaagcgctacctccccagcacaggaggaagagatggaagaggaggaggaggaggaggagggcgaggcaggtgaagctggggaagccgagagtgagaagggaggcgaggagctcctgccaccagagtccacccccattcccgctaatctgtcgcagaatcttgaggcggcagcggcaactcaggtggccgtgtcggtccctaagcgccgacggaaaatcaaagaactgaataagaaggaggccgtgggagacttgctggacgctttcaaggaggcaaaccctgccgtgccagaagtggaaaatcaacctcccgctggctccaaccccggacccgagtcagaaggatccggcgtgccccctaggccggaagaggcagatgaaacctgggactccaaggaggacaagatccataatgcagaaaatatccaacctggcgaacaaaagtatgagtacaaatccgaccagtggaagccactgaacctggaggaaaagaagcgttatgacagagagttcctcctgggcttccagttcatctttgccagtatgcaaaaacccgagggcctgccacacataagcgatgtcgtgctggataaagcaaataagacacccctgcggcctctcgacccaactaggctgcaggggataaactgtggaccagacttcacaccatcattcgccaatctggggaggactacgctctcgacccgcggacctcccagaggcggacctggaggggagcttcccagggggccagccggtctgggccctaggcgaagtcaacagggcccacgaaaagaaccccgaaagatcattgcaaccgttttgatgactgaagatatcaaactgaacaaggcagaaaaggcctggaagcccagtagcaagaggactgctgcagataaggacaggggtgaagaggacgccgacggctcgaaaacacaagatttgttccgtagggtgcgttctatcctgaataagcttacgccacagatgtttcaacaactcatgaaacaagttacccagctggccatcgacactgaagagcggctcaaaggcgtgattgacctgatatttgagaaggcgatttccgaaccgaacttcagcgtggcttacgctaacatgtgcaggtgtctgatggcattgaaagtgcctaccacggagaagcccacagtgaccgtgaactttcgcaaattgctattaaaccgatgccaaaaggagtttgaaaaagataaagatgatgatgaagtcttcgagaaaaagcagaaagagatggatgaagcagctaccgcagaggagagggggcgactcaaagaagagttggaagaagccagagacattgccaggcggagaagtttaggcaatatcaaattcattggcgagctgtttaagctcaaaatgctcactgaagctattatgcatgactgcgtggtgaaactgttgaaaaaccacgatgaggagagcctcgaatgcctgtgcagacttctgaccacaataggcaaagatctggattttgagaaggcgaagccccgaatggaccagtactttaatcaaatggaaaagataattaaagagaaaaagacgtcatcccgaatccggttcatgttgcaggacgttctggacctgagaggtagtaactgggttccaagacggggagatcaaggccctaagactatcgatcaaattcacaaggaagctgagatggaagagcatagagaacatatcaaagtccaacaattaatggcaaaaggatccgacaaaaggagaggtggtccaccaggtcctccaattagtcggggactgcccctggtggacgatggagggtggaataccgtgcctattagcaaaggcagccgcccaatcgacacctcacggctcacaaagattaccaagcctggttctatcgattccaacaaccagctgtttgcacccggaggcaggctgtcatgggggaaaggaagttccggaggaagcggagccaagccaagcgacgcagcctctgaagcagcccgaccagctacctccacgctaaataggttttctgccctgcaacaggcagttccgacagagtccacagacaaccgccgagtcgttcagcgatcgtctctgtcacgcgaaagaggagaaaaggcaggcgacagaggggaccgcttggaacggtccgagagaggaggcgaccggggagaccgtctggaccgcgctcgtaccccagctacaaagcgatctttttcaaaagaagtggaggaaaggtcacgtgaaagacctagccagcctgagggcttgcgcaaagccgcatcgttaaccgaggatcgtgataggggcagagatgctgtgaaaagagaggccgcactgcccccagtctccccactcaaagcagcactgtcagaagaggagctggagaaaaagagcaaggctatcattgaagagtacctgcatcttaatgatatgaaagaggcagtacagtgcgtccaggaactggcttctccgagcctcctgtttatctttgttcgacacggggtcgaatccactctggaacgttcggcgatcgcaagggagcacatgggacagctgctacaccagctgctgtgcgctggccatttaagtaccgctcagtattaccagggcctatatgagatcctcgaactggcagaggatatggaaatcgatattcctcatgtgtggttatacttggccgaattagttactcctatccttcaggagggcggtgtgcccatgggagagctttttagagagatcacaaaacctctgagacccctgggcaaggcagcctctctcttgctcgagattcttggactgttgtgtaagagtatgggcccaaagaaggttgggaccttatggcgtgaggccggacttagttggaaggagttcctccccgagggccaggatatcggtgcttttgttgccgaacagaaagtcgagtacacactcggcgaggagtctgaagcaccgggacaacgcgcactacccagtgaagaactgaaccgtcagctggaaaaattattgaaagaaggatcttccaatcagcgcgtatttgattggattgaggctaatttaagcgagcagcagatcgtctcaaacaccctggtgagagccctgatgacagcagtctgctattccgcaatcatctttgagacacccttaagggtagacgtcgccgtactcaaagcccgagctaagttgttgcagaagtatctttgcgatgagcagaaagagcttcaggctctgtacgcgctgcaggcattggtagtgactctggagcagccacctaacctgctgcgaatgttcttcgatgccctatatgacgaagacgtggtgaaggaggacgccttctattcttgggaaagctcaaaagatccagccgaacagcagggaaagggtgtcgctttgaagagtgtcacggccttcttcaaatggctgcgagaagccgaggaagagagcgaccataattag

SEQ ID NO: 28541 - DNA, 492 bp, synthetic construct
  misc_feature 1..492: note = Description of Artificial Sequence: Synthetic coding sequence
  source 1..492: mol_type = other DNA
atgagcggagctcgcaccgcctcgaccccaacacctccgcagacaggcggagggttggaaccgcaagctaacggagaaacccctcaagttgctgttatagtacggcctgatgacaggtcacagggcgcaatcatcgcagatagaccaggattgcccggacccgagcacagcccatctgaatctcaacctagttcaccatcccccactccgtctccttctccagtactggagcctgggtcagagccgaatctcgcggtcctgtctatcccaggtgatacgatgaccactattcagatgtctgtggaagagtcaacacctatatcccgtgagactggcgagccttacaggctgtcccctgaacctactcccctggccgagcccattctggaagtggaggtcacacttagtaaaccagtgcccgagtccgagttcagctcttcgcctctccaagcccctacaccactggcctcccacacagtagaaatccattag

SEQ ID NO: 28542 - DNA, 4542 bp, synthetic construct
  misc_feature 1..4542: note = Description of Artificial Sequence: Synthetic coding sequence
  source 1..4542: mol_type = other DNA
atgatgatcccaagccaaatcagttatcctgcctctcagggggcttattacatacccggacagggcaggtccacctacgtggtacccacacagcagtaccccgtgcagcctggagcacccggtttctatcccggagcaagccccaccgagttcggaacatacgcgggagcctactatcccgctcaaggagtccagcaattcccaacgggcgtcgctcctacgcccgtcctgatgaaccagccgccacagatcgctccaaaacgggagagaaaaacgatccgtatccgggatcctaatcagggcggaaaggacatcacagaggagatcatgagtggcgctagaacagcttccacacccactcccccacagaccggcggagggctggaaccgcaagcaaacggcgaaaccccacaggtggctgtcatcgtaaggcctgacgaccgttcccagggggcaataatagcggatcggccaggtttgcctgggccagagcattctccaagtgagtctcagccttcaagcccctctccgaccccgtcccccagtccggttctggaaccgggaagcgagccgaacttagcagtgttatccatccctggtgacaccatgactactattcagatgagcgttgaggaatctacaccaatcagtcgggaaaccggtgaaccctacagactctccccagaacccactcccctggcggaacccatcctcgaggttgaggtgacactcagcaagcctgtgcctgaatctgagttttcgagctcacccctacaggccccaactcccctcgccagtcacacggtggagatacacgaacctaacggtatggttccctctgaggacctggagcctgaggtggaatctagcccagaactcgcccctccacccgcatgtccatctgaatccccagttcctatcgcgccaacggcccaacccgaggagctgctcaacggggctccctccccccctgccgtggacttgtctcctgtgagcgaacctgaggagcaggccaaagaggtgaccgcaagtatggccccacctaccatcccttcagctactcctgctaccgcacccagcgccacttcacctgcccaggaagaagagatggaggaggaggaagaggaagaggagggcgaagcgggtgaagccggagaggctgagtctgagaagggaggtgaggaactcttgcctccggaatcgactcccatccccgcaaacctgagccagaatttagaggcggcagcggctacacaagtggcagtgagcgtgcctaagcgcagacgaaagatcaaagagcttaacaagaaggaagcagtgggcgacctgctcgatgccttcaaggaggccaatccagcagtgccagaggtggagaatcaaccaccagccggatctaatcccggacccgagtctgaggggtccggagtcccacccaggcctgaggaagccgacgaaacatgggactctaaggaagacaaaatccacaatgccgaaaatattcagcccggagaacaaaaatatgagtacaagtcagaccagtggaagcctctgaatctggaggaaaagaaacgttacgatagggagttcctgttgggcttccaatttatctttgcctctatgcagaagcccgagggattgcctcacatttctgatgtggttctcgacaaagccaacaaaactccactgcgcccactggacccaactcggttgcaaggaatcaactgtgggccagattttaccccctccttcgcgaacctgggtaggaccacattatctactagagggccaccgagaggtggccctggcggtgaactgcctagagggcctcaggccggactggggcctagacgctcccagcaaggacctcgcaaagagcccagaaagattattgccactgtccttatgacagaagatattaagctgaacaaagccgagaaagcctggaagccatcttcaaaaaggacagctgcagacaaggacagaggagaggaggacgcagatggctctaagactcaagatctgtttcggagagtcaggagcatcctaaacaagctgacaccacaaatgttccagcaacttatgaagcaggtgacacaactggctattgacacagaggaacgcctaaaaggcgttatcgacctgatattcgagaaagctatcagtgagcccaatttctccgtggcctatgccaacatgtgccgatgtttgatggcccttaaggttccaacgaccgagaagccgacggttacagtgaattttagaaaattgttgctgaatcggtgccaaaaggagtttgagaaggacaaagacgatgatgaagttttcgagaagaagcaaaaggaaatggacgaagcagccacagcggaagaacgtggaaggcttaaggaagaactcgaggaggcaagggacatcgccagaaggaggtctcttgggaatataaagttcattggagagctattcaagcttaagatgctcaccgaagccattatgcatgattgtgtcgtaaagctcttgaaaaaccacgatgaagaatctctagaatgtttatgtcgtctgctgacaacaataggaaaagatctcgactttgaaaaggctaaacccaggatggatcagtacttcaaccagatggaaaaaataatcaaagaaaaaaaaacaagctcgaggatacggtttatgctgcaagatgtgctagacctgagggggtcaaattgggtccctaggagaggtgaccaaggacccaaaacgatagaccagatccacaaagaagcagaaatggaagaacaccgagaacacatcaaagtccagcagttaatggctaagggaagcgataaaagaaggggtggaccccctggtcccccaattagcagaggactcccgctcgtagacgacggcggatggaatactgtcccgataagcaaagggtcccggccaattgatacgagcagattaactaagatcactaaacctgggtccattgacagtaataatcaactgttcgctccaggaggcaggctgtcatggggaaaggggagttccggcggatcaggagctaagcccagtgatgctgcctcagaggctgcaaggccggctacctccactctcaatcgctttagcgccctgcagcaagccgttccaactgagtcaacagacaatagacgagtggtccagaggtcctcattatcccgggagcgtggggaaaaagccggtgatcgcggagataggctcgagagatccgaacgaggcggtgaccgcggtgatcggctggaccgagcacgtacgccggctaccaagcgctcattcagcaaggaggttgaggagagatctcgagagcgcccaagccagcctgagggtttgcggaaggccgcttcgcttacagaggatcgagacagaggaagagatgccgtcaagagggaggccgctctccctcccgtatctccacttaaggctgccctgtccgaggaggaactagagaagaagagcaaagcaatcatcgaggaatacctgcacttgaacgatatgaaggaagccgttcagtgtgtgcaggagctcgcttcaccatcgctcttgttcatcttcgtccgtcatggcgttgaatctaccctggaacgctctgctatagccagagaacatatggggcagttactgcaccagctgctttgtgccggacacctcagtacagcgcaatattaccaaggactgtatgagattctagaactggctgaagatatggagatagatatccctcacgtttggttatacctggctgaattagtcacgccaatccttcaggagggaggcgtgcccatgggtgagttgtttagggagatcacaaaaccgttgaggcccctgggcaaagcggcttctttgttactcgagatactgggcctgttgtgtaaaagcatgggcccaaagaaggtaggtacactgtggcgcgaggcaggactgtcgtggaaagaatttttgcccgaggggcaggacatcggggcatttgtggcagagcagaaggtcgaatacacactaggtgaagaatccgaggcccctgggcagcgagcactgccttccgaagaattaaaccggcagctcgagaaactgctcaaggaaggttctagtaaccaacgcgtttttgattggatcgaggcgaaccttagcgagcagcagattgtgtcaaacactctggtgcgggctctgatgacggctgtctgctactcagccattatcttcgagaccccgttgcgcgtggacgtcgccgtgctcaaggccagggctaaacttttgcaaaaatatctgtgtgatgaacaaaaggaactgcaggcgctatacgcattgcaggccttggtcgtgacactcgagcaacccccaaaccttcttagaatgtttttcgatgccctgtatgacgaggacgtggtgaaggaggacgccttctacagttgggaatcttcgaaggatccggctgagcaacagggtaaaggcgtggccctgaagtctgtcacggccttctttaagtggttgagggaggccgaagaggagtccgatcacaattag

SEQ ID NO: 28543 - DNA, 432 bp, synthetic construct
  misc_feature 1..432: note = Description of Artificial Sequence: Synthetic coding sequence
  source 1..432: mol_type = other DNA
atgtcaggggcacgcactgcttcaacccccaccccacctcaaacaggcggaggactcgaaccgcaagcaaatggagagacaccacaagtagccgtaattgtcaggcctgacgataggagtcagggagctattattgccgaccgcccaggattgcccggtcctgagcacagcccttctgaatcccagcctagttcccccagtcccacgccctcacctagccctgttctagagcctggcagcgagcccaacctggccgtgctgagtattccaggtgacacgatgaccaccatacagatgtctgtcgaggagtctacccccattagccgcgaaaccggagagccttacagactgtcccctgaacccactccgctggccgagcctattcttgaggtggaggtcactttatctaagcccgtgcccgaatccgagtag

SEQ ID NO: 28544 - DNA, 4215 bp, synthetic construct
  misc_feature 1..4215: note = Description of Artificial Sequence: Synthetic coding sequence
  source 1..4215: mol_type = other DNA
atgtccggtgctaggaccgcgagcacaccaacgccaccccagaccggcggtgggttagagccccaggcgaacggagagaccccccaggtggctgttatcgtaaggcccgatgaccgctctcagggcgctataatcgccgatagacccggattacctggtcccgagcacagtccgagtgagtcccagcctagttcccctagccctaccccatctccatcaccggttctggagcctggtagcgaacccaacctggccgtgttgtccatccctggggatacaatgaccaccatccaaatgagtgtggaggagtcaacacctattagccgcgagactggagaaccatatagactttctccagagcccacccctcttgcagagcccatcctggaggtcgaggtgacactctcaaagccagtcccagaatctgagttctccagcagtcctctccaggccccaacacctctcgcttcacacacagtagagattcatgaacccaatggaatggtgccatctgaagatctggagccagaagtcgaatcgtcacccgagctggccccaccacccgcatgcccaagtgaatctccagtgccaattgccccaaccgcacaacccgaggagctcctcaacggcgcaccttctccacctgctgtcgatctttcccccgtgtccgagccagaggaacaagcaaaagaggtgactgcctcaatggcccctccaactattccctcagcaacacctgcaacagcaccttccgctacatccccagcacaagaggaggagatggaagaagaagaggaggaggaggagggggaagcgggtgaagctggggaagcagaaagtgaaaagggaggagaagaattactgcctccggagagcacccctatacccgctaacctgtctcagaacctggaggccgcagcggcaacgcaagttgcggtatctgtacccaaaagacgacggaaaatcaaggaattaaacaagaaggaggctgtaggcgatctgcttgatgcctttaaagaagctaacccagccgttcctgaggtggagaaccagccacccgctgggtcaaaccctggccctgaaagcgaaggctcgggcgtgccaccaagaccagaggaggccgatgagacgtgggacagcaaggaagacaaaattcacaacgccgagaacatccaaccaggagaacagaaatacgaatacaagagcgaccagtggaagcctctcaacctcgaggagaagaagcggtacgacagggaattcctccttggcttccagttcatctttgcaagcatgcaaaagccagagggactcccacacataagcgatgttgtcttggacaaagcaaacaagactcctcttaggcccctggatcccacaagactccaaggtataaattgtggtccagattttacaccgagtttcgctaacctgggaagaacaaccctgagcacccgtggaccaccgagaggcggacctggaggtgaactgcccaggggcccacaggccggtttgggaccacgcagaagccagcaaggacccaggaaggagcccaggaaaatcatcgcaactgtgctgatgacggaggatattaaactgaacaaggctgaaaaggcatggaagccttctagtaaacgaacagcagctgataaggatagaggggaagaggacgcagacggcagcaagacacaggacttatttcgacgcgtgcgcagcattctgaataaactaacaccacaaatgtttcagcagctaatgaagcaggttacccagctggcaatcgacactgaggaaaggcttaagggagtgatagatttgatttttgagaaggctatctcggaaccaaactttagcgtcgcttacgccaacatgtgccgatgcttaatggctttgaaagtgccgacgacggaaaagcctactgttacggtaaacttcaggaaacttctgctcaaccgatgtcaaaaagaattcgaaaaagacaaagacgacgacgaggtgttcgagaaaaaacagaaagaaatggacgaggccgcaaccgccgaagagcgcggaagattgaaagaagagctagaagaggcccgtgatatcgctagacgacggagtctcggtaatatcaagttcataggggagctgttcaagttaaaaatgctcaccgaagcgataatgcatgactgcgtggtaaagctcttgaagaaccatgatgaagagagtctggagtgcctgtgccgtctgctgacaaccatcggtaaagacctcgactttgagaaggccaagccccgtatggatcaatattttaatcaaatggagaagatcattaaagaaaagaagacttcttcccgcatccgattcatgcttcaggacgtgctggaccttcgcggaagtaactgggtgcccagacggggagatcagggcccaaagacaatcgaccagatccataaggaggcagagatggaagagcaccgggagcatatcaaggtgcagcaattgatggctaaggggagtgacaaacgtcggggagggcctccgggtccgcctatttcccggggtttacccctggttgacgacggaggctggaacaccgtcccaatctccaaggggagcagacctattgatacttcgcggctgaccaagattaccaaacctggttcaattgactcgaataaccaacttttcgctcctgggggtcggttaagctggggaaagggctctagtgggggaagcggcgcaaaaccgtccgacgcagcctcagaggccgcacgccctgcaacctccactttgaatcgctttagcgccttacagcaggctgtaccaactgaaagtactgacaatcgcagggttgttcagcgttcctcactgtctcgcgaaagaggtgagaaagccggagacagaggggatcgactggagcgatccgaacgagggggagatagaggtgatcgcctggacagagctaggacacccgctacaaaacggtccttcagtaaggaggttgaagagcggtctcgggagcgtccatcccagcctgaggggctccgcaaagctgcatctctcaccgaggaccgggatcgcggacgagacgcagtgaagcgagaggcagcactaccccctgtttctccactgaaggcggctttgtcagaggaggaactggagaaaaaatcaaaagcaatcatagaagagtatttgcacctgaacgatatgaaggaagctgtgcaatgcgtacaggagttggcttctccaagcttgcttttcattttcgtcaggcacggcgtggagtcgacacttgagagaagcgctattgccagggagcatatgggccagctgctgcatcaactgctctgcgcagggcatttgagcaccgctcagtactatcagggcctttatgagatcttggagctggcggaggacatggagatcgacattcctcatgtctggctataccttgcagaacttgttacccccattcttcaggagggtggggtgccaatgggagaactcttccgtgagattacaaaacccctgaggcctctggggaaggcagcctctcttctattagagatccttggcctcctgtgcaagtcgatggggcctaagaaggtcggtacactctggagggaagctggattatcttggaaggagtttctcccagaggggcaggacatcggtgcttttgtcgccgagcaaaaggttgagtacactttgggtgaagagagtgaggcgccaggtcagagagctcttccaagcgaggaactgaaccggcagctcgagaagctacttaaggagggttcctcgaaccaaagggtttttgactggatagaggctaatctctctgagcagcagattgtctcaaacactttagttagggcattaatgacagctgtttgttacagcgcaatcatctttgaaactccattaagggttgatgtcgcagttctcaaggccagagcaaagctcttgcagaaatacctgtgcgacgagcagaaagaacttcaagcactctatgctctgcaggccctagtagttacgttggaacagcccccaaacctgctgaggatgttctttgacgcactgtacgacgaagatgtagtcaaggaagacgctttctattcctgggagtcaagcaaagaccctgccgaacagcaaggtaaaggtgtcgcccttaaatctgtgacagcattcttcaagtggctgcgcgaagctgaagaggaatccgaccacaattag

SEQ ID NO: 28545 - DNA, 4212 bp, synthetic construct
  misc_feature 1..4212: note = Description of Artificial Sequence: Synthetic coding sequence
  source 1..4212: mol_type = other DNA
atgtccggggctaggacagcgtctacgccaaccccgcctcagacgggcggtggcctggaaccacaggcaaacggtgagaccccgcaggttgctgtcatcgtgcgccctgacgataggtctcagggtgctattatagccgataggccgggactccccggacccgaacactccccctcagagtcacagccctcatcgccaagcccgacaccctcgcccagtcctgttctcgagcccggatctgagcccaacttggctgtgctctccatccccggagacacaatgactactatccaaatgtcagttgaggaatccacccctatttcgcgcgaaaccggagaaccctataggctgtcacctgaacctactcccctggctgagcctatcctggaagtggaggtgactctgagcaagccagtccccgaatctgaatttagcagttccccgctgcaggctccaactccgttagcctcacacaccgtggaaattcatgagcctaacggaatggtccccagtgaagatctcgagcctgaggtggaatcatcacctgagctcgccccaccacctgcctgcccttcagaatcccccgtgccgattgctcccaccgcccagccggaagagttgcttaacggggcacctagtcctcccgctgttgatctatcaccagtaagcgaacctgaagagcaggctaaagaggttaccgcatcaatggctccccctacgattccatccgccacaccggcaactgccccaagcgctacctcgccagcccaggaagaagagatggaagaggaagaggaggaggaagagggagaggccggagaggctggggaagccgaatccgagaagggcggagaggaactccttcctcctgagtccacgcctatccccgctaatctcagccagaatttagaagctgccgcagccactcaggtggcagtctcagttccaaagcggaggaggaagataaaggaactgaataagaaggaggccgtcggtgacctacttgatgcatttaaggaagcaaacccggctgttcctgaagtggagaatcagccaccagctgggtccaatccaggccctgagtcagaagggtccggtgtaccccctcggccagaggaagccgatgagacatgggattcgaaggaggacaagatccacaatgccgagaatatccagccaggggaacagaaatacgaatacaaatcggatcagtggaaacccctcaacctggaggagaaaaaacggtacgaccgcgagtttctgctggggttccagtttatctttgcatcaatgcagaagccagaaggattgccccacataagcgatgtcgtgttagacaaggcgaacaagactcccctaaggcctctcgaccccacacggctgcaggggattaactgcggccctgacttcactccaagtttcgctaatttgggaaggacgacgctgagtactcggggtcctccgcgaggcggtccaggtggcgaactcccaaggggccctgcaggtctcgggccacgccgttctcagcagggtcccaggaaagagcccagaaagatcatagccactgtgctaatgactgaggatattaaactcaataaagcggaaaaagcatggaaaccaagttcgaagaggacggctgccgataaagaccggggtgaggaagatgccgacggtagcaaaacacaggaccttttccggagggtaagatcaattctaaacaagctgactcctcagatgttccagcagttaatgaaacaggtgactcagttggccattgataccgaagaaaggcttaaaggtgttatcgacctgattttcgagaaggccatctccgagcctaacttctcagtggcatatgcaaacatgtgtaggtgtctgatggctttgaaggtgccaaccacagaaaagccgacagtgacagtgaatttccgaaagttgttactgaaccgctgtcaaaaagagttcgagaaagataaggatgacgacgaggtgtttgagaaaaagcagaaggaaatggacgaagcagcaaccgctgaggagcgtggtcggctcaaagaagaactggaggaagcacgcgacatcgccagaagacgatccttgggcaacattaaattcatcggggaactttttaaactcaaaatgctgaccgaggccattatgcacgactgcgtagtgaaacttctaaaaaaccacgatgaggaatcactcgagtgcctgtgccggctgctcaccacaattggaaaggacctggactttgaaaaagctaagccaaggatggaccagtattttaatcaaatggaaaagatcatcaaagaaaagaagaccagctcacgaatcagatttatgcttcaagatgtactggacctcagagggagcaattgggtgcctcggaggggagatcaaggaccgaaaacaatcgaccagatccacaaggaggctgagatggaagagcacagagagcatatcaaagtccaacagctcatggccaaggggtccgataaaaggagaggcggacctccaggaccacccatatcccggggactgcctctagtggatgatggaggctggaacaccgtccccattagtaaagggtcgaggccgatagacactagtaggttaacgaagatcacaaagccaggaagcattgatagtaacaatcagttgttcgcccctggaggtcggctgagctggggaaaaggaagttcagggggatctggagctaaaccctcagacgctgcctccgaggctgccaggcctgctacatccacacttaataggttttcagccttacagcaggcagtgcccacggagagtacagacaaccgcagagtagtacagcggtcttcattatccagagaacggggagagaaagcaggggaccggggagacagactggagcggtcagagagaggcggagacaggggggacaggttagacagagcacggaccccagccactaaaagatccttctccaaggaggttgaggaacggagtagggagcgtcctagtcagcctgagggtcttcgaaaggccgctagtcttaccgaggatagagaccggggacgcgacgccgtcaagcgggaagctgctctgcctccagtctcacccttgaaggcggcactgtcggaggaagaactcgaaaaaaagtccaaagcgattattgaagaataccttcatctgaatgacatgaaggaagctgttcagtgtgtccaggaactggctagccctagcctgttgttcatctttgtccgtcacggtgtggaatctacccttgagcggtccgccatcgccagagagcatatgggccaactgctacatcagctgttgtgcgctgggcacctgagcacggctcagtactaccaggggctgtacgaaatactcgaactggccgaggacatggagattgatattcctcacgtgtggctgtatcttgccgaactggtaactcccatcttgcaggagggtggcgtgccaatgggcgagctttttcgcgaaatcaccaaacccctgaggcctctgggaaaggctgcctcactcttgctggaaattctggggttgctttgtaagagtatggggcctaagaaggtcggcactctctggagggaagctggacttagttggaaggaattcctaccggaaggccaggatatcggagcctttgtggcagagcagaaagtggaatacacattgggcgaggagtctgaagcccctgggcaacgcgctctgccctctgaggaactgaatcgtcagctagaaaagctgctgaaagagggctcgagtaaccaacgggtcttcgactggattgaggcaaacttatccgaacagcagatagtctccaacacgttggttcgggcactgatgaccgccgtgtgttactcggcaattattttcgagacacccctaagagtagacgttgctgtgttgaaagccagggctaaactcctgcagaaatatctgtgcgatgaacagaaggaactccaggcactgtacgcactgcaagcacttgttgtaacactggaacagccacctaacctcctcagaatgtttttcgacgctctgtacgatgaggacgtagtaaaagaagatgccttttatagttgggagtcctctaaagatcctgccgagcagcagggtaaaggcgttgccctcaaatcagtcacagcttttttcaagtggctcagggaggccgaagaggagagcgaccacaattag

SEQ ID NO: 28546 - DNA, 4311 bp, synthetic construct
  misc_feature 1..4311: note = Description of Artificial Sequence: Synthetic coding sequence
  source 1..4311: mol_type = other DNA
atgaaccaaccgccacaaattgccccaaagcgggagaggaaaactatccgaatccgggaccctaatcagggtggtaaggatatcacggaggaaatcatgtcgggagccaggaccgcgtcaaccccaaccccgccacagactgggggtgggttggagccacaagcgaatggggagactcctcaggtggcagtgatcgtgcgtcccgatgatcgcagtcaaggcgctattatcgcagataggccaggtttgccagggccagagcattcccccagcgagagccagccctcttcaccctctcctacacccagcccctctccagttttagaacccggaagcgaaccaaatctggcagtgctgtccattcccggtgacacgatgaccactatccagatgtccgttgaagagtcaactccaatatctcgggaaacaggtgagccatatcgtctgagccccgagcctaccccactggccgagcccatccttgaggtagaggttacattgagtaaacccgtgccggagtccgagttttcatctagccctttgcaggctccgaccccattggcttctcataccgtggagatacacgagcccaatgggatggttccttcggaagacctggagcctgaggttgaatcgagtccggaacttgctccaccccctgcttgtcccagtgaatctccagtgcccatcgcacccacagcccagccggaggaattgctcaatggcgctccaagcccaccagctgtggacctgtcgccagtgagcgagcctgaagagcaggccaaagaggttacagcttcaatggcgccacctaccattcctagtgcaacccccgctaccgctccttccgctacctctcccgctcaggaggaagagatggaggaagaggaggaggaagaggagggggaagctggagaagccggagaggcagagagcgagaagggaggcgaggagctactgccccctgaatccacccccatccctgctaatctgagccagaatttggaggccgcagctgccacccaggtggcagtgtccgtgcccaagcgcaggcgaaagattaaagaattgaacaaaaaggaggcggttggcgatctgcttgacgctttcaaagaggccaatccggcagttcccgaggtagaaaatcaaccccctgccggttctaaccccggtcctgagtccgagggatcaggggtgccccctcgacctgaggaggctgatgaaacatgggacagcaaggaagacaagatccataatgctgaaaatattcagcctggcgaacagaaatatgagtataagagtgaccaatggaagcctttgaatcttgaagaaaagaagcggtatgacagagaatttttactcggcttccagtttattttcgcttccatgcagaaaccagagggtctgcctcacatatctgatgtggtattggataaggcaaacaagacaccactgaggcctctggatccaacccgccttcaaggcattaattgcgggcctgacttcacaccttccttcgccaaccttggcaggactactctatcaacaagaggccctcccagggggggtcctggaggggaattgccacgcggaccccaggccggactgggacctaggcggtcccaacaagggccacgtaaagaacccagaaagataattgctaccgtgctgatgactgaagatattaaactgaacaaggctgaaaaggcctggaagcctagcagtaagcggacagctgccgacaaggatcggggtgaggaagatgcggatggttctaaaacccaggacctttttagaagggtgagatccattctcaacaagctcacgccgcaaatgttccagcagctcatgaagcaggtgacccagcttgctatagacactgaggagagactaaagggcgtaatcgacctcatcttcgaaaaagctatctccgaaccaaacttctctgttgcctacgccaacatgtgtcggtgcttgatggccctgaaggtccccaccactgagaagccaaccgtgaccgtgaatttccggaagctcctgctgaacagatgccagaaggagttcgagaaggataaggacgacgacgaggtctttgaaaaaaaacaaaaagagatggacgaagcagcaaccgctgaagaacgtgggagactaaaggaggagcttgaagaagcgagagatatcgcgcgtcggcgtagccttggaaacatcaagtttatcggcgagctgtttaaactgaaaatgctgaccgaggctattatgcacgattgcgtggtgaagctcctgaagaaccacgatgaagagtctctcgagtgtctgtgtcgcctgctcacgacgataggtaaggacctcgattttgagaaagccaaaccccgtatggaccaatattttaaccagatggagaagatcataaaggagaaaaagaccagttcaagaatacgatttatgctgcaggacgtgctcgatcttcgcggaagcaattgggtgcctcgccgaggcgatcaggggcctaaaaccatcgatcaaattcataaagaggctgaaatggaagaacaccgcgaacatattaaggtgcaacaactgatggcaaagggatcagacaagcgcagagggggtccgccaggtccccctatttctcgtggcctacctctggtcgatgacggcggttggaacaccgtacccatctctaaggggtcacgcccaatcgacacttctagattgacgaagattactaagcccggaagcattgactctaataaccagctgtttgctcctggcggtcgactctcttggggcaaaggttcctctgggggtagcggagcaaagccctctgatgccgcttccgaggcagcaagacccgctacctcgacacttaaccgctttagtgcattgcagcaggccgtgcctacagaaagcacagacaataggcgggtcgtgcaacggagctctctttccagggaacgcggtgagaaggctggggacagaggggatcgtctggaacgatcggaacggggaggagaccggggagaccggctggaccgggctcggacaccagccacgaaaagatcattttctaaggaggtggaagagcggagcagagagcggccttctcaaccggagggtctgagaaaggccgcttcactgacagaggaccgagatcgcggtcgggacgcggtcaaacgcgaggccgcactaccccctgtgagccccctgaaggctgcgctctcggaggaagaattggagaaaaagagcaaggcaattatcgaggaatatctgcacctgaatgatatgaaggaagctgttcagtgcgtccaggagttagcttctccttctctactttttatatttgtcaggcatggcgttgagtccacactagaaagaagcgcgatcgccagagagcatatgggccagttattgcatcagctgctgtgcgctggccacctctcaacagctcagtactatcagggactctacgaaattctggagcttgcagaagatatggaaatagacattcctcacgtgtggctatatctcgctgagctcgttacacctattctccaggaaggcggagtgccgatgggggaacttttccgggagatcaccaagcctctccgccctctgggaaaagctgcctccctgctccttgagatcctgggcctgctatgcaaaagtatgggccctaaaaaggtgggaacattgtggcgcgaagccggacttagctggaaggagtttctgccagaaggccaggacatcggggcatttgtggctgaacagaaagtggaatacacattgggcgaagagtcagaagcccctggccaacgggcactcccatctgaggagttgaaccgacagctcgagaaactgctgaaggaagggagcagcaaccagcgagttttcgactggattgaggctaacctgtccgaacaacaaatcgtgtccaacaccctggtgcgggctctgatgactgccgtgtgctactctgctatcatcttcgagacccctctcagagtcgacgtggccgtgctgaaagccagagccaagttgttgcagaagtacttgtgcgatgaacagaaggagctgcaggctctgtacgccctccaggctttggtcgtcacattggagcagcctcccaatttgctgagaatgtttttcgatgccctgtacgacgaggacgtggtaaaagaggatgcattttattcttgggagagtagcaaagatccggctgaacagcagggcaaaggggtcgcactcaagtccgtcaccgccttttttaaatggttaagagaagcagaggaagaaagcgatcacaactag

SEQ ID NO: 28547 - DNA, 384 bp, synthetic construct
  misc_feature 1..384: note = Description of Artificial Sequence: Synthetic coding sequence
  source 1..384: mol_type = other DNA
atgagcggcgctcgcaccgcctccacaccgacgccaccccagaccggcggagggttggagcctcaggctaatggcgaaacgccccaggtggctgttattgtccggccagacgaccgcagccaaggggcaatcatcgccgaccgccctggcctgccaggcccagagcattcacccagcgaatctcagcctagttccccaagcccgacccctagcccttcccctgtgctggagcccggttctgaacccaatctggcagtgctgtccattccaggggacactatgacaactatccagatgtccgttgaagaatcgacccctatctctcgagagactggtgaaccctataggcttagccccgagcctaccccgcttgccgagccttag

SEQ ID NO: 28548 - DNA, 264 bp, synthetic construct
  misc_feature 1..264: note = Description of Artificial Sequence: Synthetic coding sequence
  source 1..264: mol_type = other DNA
atgaacaccccctcccaaccacgccaacatttttatccttcccgagcccagccaccaagctctgcagctagtcgagttcaatcggcagcccctgccagaccaggcccagctgcccatgtttaccccgctggcagccaggtgatgatgattccaagccagataagttacccggcaagtcaaggtgcttactacatcccagggcagggtagatcgacctatgtagtgcctactcaacaatatcccgtgcagcctggcgctccctag

SEQ ID NO: 28549 - DNA, 858 bp, synthetic construct
  misc_feature 1..858: note = Description of Artificial Sequence: Synthetic coding sequence
  source 1..858: mol_type = other DNA
atgagtggcgcacggaccgcgtctacccctaccccgccacagactggtggaggtttggaaccgcaagcaaacggcgagacaccacaagtggccgtcatcgtcagacccgacgatagatctcaaggcgcaattatcgccgacaggccaggcctgcccggtcctgagcattctcctagtgagtcacaacccagctctccgagtccaacaccctcgccctcccccgtgttggagccaggcagcgaaccaaacttggccgtgctctctattcctggagataccatgacaactattcagatgagcgtggaagagtctacccccatctcaagggaaacgggagaaccttacagactctcccctgagccaacccccttggccgagccaattctggaggttgaagtcaccctgagtaaacctgttccagaaagcgaattctcgtccagcccgctccaagcaccaaccccgctggccagtcacacagtcgagatccacgaaccaaacggcatggttccaagtgaagatctggaaccagaagtcgagtcttcacctgaactagctccaccacccgcttgtcctagcgagagtcccgtccctattgccccaacagctcagcctgaggagcttctgaacggtgcaccttctccacccgcagtagacctttctcctgtctctgagccagaagagcaggctaaagaggttacagccagcatggctcctcccaccattccgagcgctaccccagcaacagctccatcggctacctcacccgctcaggaggaggagatggaggaggaagaggaggaggaagagggagaagcaggcgaggcgggagaagccgaaagtgagaagggcggagaatag

SEQ ID NO: 28550 - DNA, 1836 bp, synthetic construct
  misc_feature 1..1836: note = Description of Artificial Sequence: Synthetic coding sequence
  source 1..1836: mol_type = other DNA
atggccgcaagcgcgaaaaagaagaacaagaaaggtaaaacaattagtctcacagatttcctggctgaggacgggggtacgggcggaggaagtacatatgtatccaagcctgtgagctgggcagacgagacagatgaccttgaaggggatgtgtctacaacgtggcacagcaacgatgatgacgtatatagagcccctcctatagacaggtctattctgccaaccgccccaagagccgctcgcgaaccgaatattgacagatccagactgccaaaatcccctccgtatactgccttcctagggaacctgccttatgatgtcactgaggaaagcataaaagaatttttcagggggctgaatatctccgcggtgaggttgcccagagagccttcgaacccagaacgcctgaaaggttttggctacgcagaatttgaagatctggactccctgctgtccgctctcagcttgaatgaggaatccctgggaaacagacgaatacgcgtggacgttgcagaccaagcccaagacaaagatagggacgaccggagcttcggcagggaccgtaacagagactccgataaaaccgacaccgactggagggctcgaccggcaaccgactcattcgatgactatccaccccgaagaggcgacgatagttttggcgacaagtaccgcgatagatacgatagcgaccggtaccgcgatggttatagagatgggtatcgggatggacctagacgagacatggaccgctatggcggtcgcgatcgttacgatgacagaggtagtagagattacgatagaggctacgattctagaatcggttccggaaggcgagcttttgggagcgggtataggcgtgacgacgattatcggggaggaggagacagatacgaggacagatacgatagacgggacgatagaagctggagctctagagacgactactcacgagatgactatcggagagatgataggggccctcctcagaggcctaagctgaacctgaaaccaagatccacccctaaggaagacgatagctccgcttccaccagccagtctacccgggcagcaagtatctttggaggcgctaagcccgttgacaccgccgctcgggagcgcgaggtggaagagagactacaaaaggaacaggagaagctccagcgccagttggacgagccgaagctcgagaggcgtccaagagagcgacacccatcgtggaggagcgaggaaacgcaggagagggagcggtcaagaacaggatcggagtcaagtcagaccggcacatcaaccacaagctctcgcaacgcgagacggcgtgagtcagagaaatccctggaaaacgaaactctgaacaaggaggaggactgtcatagccctacatccaagcctcccaagcccgatcaacccttaaaggtaatgcctgcgccaccccctaaagagaatgcatgggtgaagagaagctcaaaccccccagccagatcacagagtagtgataccgagcagcaaagcccgacttcaggtggcggaaaagtcgcacctgctcagcccagcgaagaagggccaggtagaaaagacgagaataaagtcgatggtatgaatgcacccaaagggcagacaggaaatagcagtcgcggtcccggagacggagggaacagggatcattggaaggaatctgatcgaaaggacggtaagaaagatcaggacagcaggtccgcgccagagccaaagaagcctgaggagaacccggctagcaaattttcatctgcttctaagtatgcagccttgtctgtagacggggaggatgaaaatgaaggggaagattacgctgaatag

SEQ ID NO: 28551 - DNA, 1764 bp, synthetic construct
  misc_feature 1..1764: note = Description of Artificial Sequence: Synthetic coding sequence
  source 1..1764: mol_type = other DNA
atggccgcatctgctaagaaaaaaaacaaaaagggcaaaacaatatctctcacagattttcttgccgaagatggtgggacagggggtggcagcacatatgtgagcaagccagttagctgggcggacgagacggacgacctggaaggtgatgtctccacaacatggcatagcaatgatgatgatgtgtaccgtgcaccacctatcgaccggtctatcctgccaacggctcccagagcagctcgggaacctaacatcgacaggagccggctaccgaaatctccaccatacacggccttcctggggaacctcccctatgacgtgacagaggagtctattaaggaattctttaggggcctcaacatcagtgcagtccggctgccacgggaaccttccaacccggagcgcctgaagggcttcggttacgcagaattcgaagacttagactccctcctttcagccctatcgttgaatgaggagtctcttggaaatcgtagaatccgcgtggacgtggcggatcaggcccaggacaaagatagagacgacaggagctttgggagagaccggaacagggacagtgataagacggacaccgattggcgtgcacggcctgccaccgattccttcgatgattacccacccagaagaggcgatgattcctttggagacaaatatcgggacagatatgggggtcgtgatagatacgatgaccggggaagcagggactacgataggggatacgattctcgcatcggcagtggcagacgtgccttcggctctggctatagaagagatgacgattatcgcggagggggagaccgctacgaggaccgctacgaccgaagggatgataggtcatggagctcacgagacgactactctagggacgattatagacgggatgacagagggcctcctcagaggcctaagctgaacttgaagccacgtagtacgcccaaagaggacgattcctccgccagcacctcccagagcacgcgcgctgcctcgatttttgggggagctaagcccgtggacacagcagcccgagaacgcgaagtcgaggagcgccttcagaaagagcaggagaaacttcagcggcagctggacgaaccaaagctcgaaagacgaccccgagagagacatcctagctggcgtagcgaggagacgcaggagcgagagagaagccgaacaggctccgagtcaagtcagaccggcacctccactacctcttctagaaatgccaggagacgtgagtccgagaagtctcttgaaaacgagacccttaacaaggaagaagattgccactcacctactagcaagccacccaagccagatcagccactcaaggtcatgcctgcaccgccacccaaggaaaacgcctgggttaagagatcttcaaacccgccagccaggtcacaatcttctgatacagagcagcaatcgcctactagcggtggtggcaaggtggcccctgcacagccttccgaggaaggcccaggcaggaaggacgagaataaagttgacgggatgaatgcacctaaggggcagacaggcaattcctcaagaggacctggcgacggtggaaatagagatcactggaaggagtcagatcgaaaagacgggaagaaagaccaggactcgagatctgcaccagaaccaaaaaaaccggaagagaatcctgctagtaagttttctagcgccagcaaatacgcggctctgagcgtggatggggaggatgagaacgaaggggaggactatgcagaatag

SEQ ID NO: 28552 - DNA, 714 bp, synthetic construct
  misc_feature 1..714: note = Description of Artificial Sequence: Synthetic coding sequence
  source 1..714: mol_type = other DNA
atgctcgacctgacctcccggggtcaggtgggtacatcccggagaatggccgaggccgcatgcagcgctcatttccttgaaacaacacccaccccgaatcctccaacaaccgaagaagagaagaccgaatccaatcaggaagttgctaaccccgagcattacataaaacacccactgcaaaatcggtgggctctgtggttctttaagaatgataagtcaaaaacctggcaggccaacctcagactgatttcaaagtttgataccgtggaggatttttgggcactatacaaccatatccaactgagttctaatctgatgccaggttgtgactacagtctctttaaggacggtattgagcccatgtgggaggatgaaaagaataaaaggggcggaagatggctgatcaccctcaataagcagcagcggagaagtgatcttgatcggttttggctcgagactttactgtgtcttattggcgaatcattcgacgactatagcgatgacgtctgtggagcagttgtaaacgtgcgggctaagggagataagatcgccatatggacaacagaatgtgagaatcgagaagctgtgacacacatcgggcgagtctataaggaacggctgggcctgccacctaagattgtcattggctatcaaagccacgccgacaccgccacaaagtcgggctccacgaccaaaaatcgttttgtggtgtag

SEQ ID NO: 28553 - DNA, 654 bp, synthetic construct
  misc_feature 1..654: note = Description of Artificial Sequence: Synthetic coding sequence
  source 1..654: mol_type = other DNA
atggctactgtcgaaccagagactacacccacacccaaccctcccaccaccgaagaagagaaaaccgaatccaatcaggaagtggcaaacccagagcactatatcaaacatccgctgcagaacaggtgggccctgtggttctttaagaatgacaagagcaagacatggcaagctaatctccgactgatcagcaagttcgacactgtggaggatttctgggccttgtacaaccacatccagctgagtagcaacctgatgccaggctgtgattattcgctgtttaaggacggaatagagccaatgtgggaagacgagaagaacaaacgcggtggtagatggctgattaccctgaacaaacagcagcggcgaagtgatctcgatagattctggctcgaaacacttctctgcctcataggtgaaagctttgatgattactcagacgacgtgtgcggtgctgttgtcaacgtccgggctaaaggggacaagatagctatttggactaccgagtgcgaaaaccgggaggccgtcactcatatcggcagagtgtataaggaacgcctagggctgcctccaaagattgtgataggatatcagtcgcacgcagataccgcaaccaaaagtggcagtacgactaagaatcggtttgtcgtatag

SEQ ID NO: 28554 - DNA, 747 bp, synthetic construct
  misc_feature 1..747: note = Description of Artificial Sequence: Synthetic coding sequence
  source 1..747: mol_type = other DNA
atggccaccgtggaaccagagaccaccccgacacctaacccacctaccacagaggaggagaagacggaaagcaaccaagaggttgcgaatccggagcactacattaaacacccactccagaaccggtgggctttgtggttctttaagaatgacaaaagcaaaacttggcaagccaatcttaggctgatctctaagtttgataccgtcgaagacttctgggccctatataaccatattcaactgtctagtaacctgatgcctggctgcgactactctctgttcaaagatggaatcgaacccatgtgggaggacgagaagaataaacgcggaggccgttggctgatcacattaaataagcagcagcggaggagcgatctggataggttctggttggaaacacgctgggaccttgcaatgctacctaggctagttagcaatttctggccccaggttatactgccactccaacctccaaaggtgctggagctccagctgctgtgcctgattggagagtcctttgacgattattctgacgatgtgtgcggtgccgtggtgaacgtgcgggcaaaaggcgacaagatcgccatttggaccactgaatgtgagaacagagaagctgtgacacacatagggagggtgtacaaagagcgccttggcttgccacctaagatagtcattggttaccagagccatgcggacaccgcgacgaagagtgggtcaaccaccaagaatcgtttcgtggtttag

SEQ ID NO: 28555 - DNA, 357 bp, synthetic construct
  misc_feature 1..357: note = Description of Artificial Sequence: Synthetic coding sequence
  source 1..357: mol_type = other DNA
atgagtggtggttcttcatgctctcaaacaccaagtcgcgcaatcccagcgacgcgaagggtcgtcctgggagatggagttcaactgccaccaggtgattactcaactactccaggcggtaccctgttttccacaacaccaggaggcactcgaattatctacgatcgtaagttcctcatggagtgcaggaactctcctgtaaccaaaactccgcctcgcgacttgcctaccatacccggagtaacatcaccctcttctgatgagccccctatggaagcctctcagagccatttgaggaactcaccagaagacaaaagagcaggaggggaggagagccagtttgaaatggacatctag

SEQ ID NO: 28556 - DNA, 1857 bp, synthetic construct
  misc_feature 1..1857: note = Description of Artificial Sequence: Synthetic coding sequence
  source 1..1857: mol_type = other DNA
atggcgtcaactgattactccacttactcacaggctgccgcacaacagggttactccgcatacactgcgcagcccacacaaggctacgctcaaacaacacaggcgtatggccagcagagttatggtacatatggtcaaccgactgatgtatcatacacacaggcacagaccactgccacatacgggcagaccgcctatgcaaccagttatggccagccacccaccgggtatacgactcctactgcgcctcaagcctactcacagcccgtgcagggatacggaacaggagcatacgataccaccactgccactgtgaccacaacgcaagcaagttatgccgcacaaagtgcttacgggactcagccagcctaccctgcctacggacagcagccggcagcaaccgcgccaacacggccacaggatggaaataagccaaccgagacgtctcagccccaatcatcaactggaggttataaccagcctagcttaggttatggacaatcaaattactcttacccacaggtacctgggtcgtacccaatgcagccggtaacggcacctccttcatatcccccaacttcttacagttccactcagccgacatcttatgatcagtcctcttacagccagcaaaacacgtacgggcagccgtcatcatatggccagcagtcctcctatggtcagcagtctagttacggccagcagcctcctacttcctatccccctcaaaccggtagctattcccaagccccaagccagtattcacagcaatcatccagctacggccagcaatctagttttagacaggatcacccatcaagtatgggcgtttacggacaggagtcaggagggttttccgggccaggagagaatcgttcaatgtcgggtccagataatcgcggtagaggccgaggaggatttgatcgcggtggaatgtcccgggatccggacgaggatagtgataattctgcgatatacgttcaaggcttaaatgactcggtcacactggacgatcttgcagacttctttaaacagtgcggtgttgtgaagatgaacaagaggacgggccagcctatgattcatatctatctggataaggagactggaaagccaaaaggagacgccacagtgagctatgaggacccacctaccgcaaaggcagccgttgaatggttcgatggcaaggacttccaaggcagcaaactaaaagtgtcacttgccagaaaaaaacctcctatgaacagcatgagaggaggtcttccccctagggagggcagaggaatgcccccaccccttcgaggaggccctggaggacccggtggacccggaggacccatggggaggatggggggacgcggtggcgacaggggaggcttccctccacgtggccctcggggatcacggggaaatccctcaggcggagggaatgtccagcatagggccggagattggcagtgcccaaatcccggttgcggaaaccaaaactttgcctggcgcaccgagtgtaatcagtgcaaggctccgaagcctgaaggtttcctgcctcccccatttccgcctcctgggggtgatagaggtaggggtggacctggtggcatgagggggggtcggggagggctcatggatcggggaggaccaggcggaatgttcaggggcggaagaggaggggacagagggggattcaggggaggcagaggaatggatcggggaggcttcgggggaggcagacggggtggacccggtggtccccctggccctctcatggaacagatgggaggcaggcgcggtgggagaggcggacctggcaaaatggataaaggcgagcataggcaggagcgacgggatcggccttactag

SEQ ID NO: 28557 - DNA, 1803 bp, synthetic construct
  misc_feature 1..1803: note = Description of Artificial Sequence: Synthetic coding sequence
  source 1..1803: mol_type = other DNA
atggcctccaccgactactcaacttatagtcaggctgcggcacagcaggggtatagtgcctacacggctcagcccacccaaggctacgctcagacgacgcaagcatatgggcagcagtcatatgggacatatgggcaacccacagatgtgtcgtacacacaggctcaaacgacagcaacttacggacaaactgcctatgcgacctcctacgggcagcctcccacagggtacacaaccccaacggcaccccaggcttactcccagcctgtccagggctacggcactggagcctacgatactacaaccgctacagtgacaaccacgcaggcatcatacgcagcacagtcggcatacggcacacagccggcttatcctgcctacggccagcaacccgctgccaccgccccaacaagctacagctccacacagccgacctcatacgaccagtcctcgtattctcagcaaaacacctacggccagcccagctcttacgggcaacaatcatcctacggtcagcagagctcatatggacagcagcctcctacttcttacccaccccagacaggaagctacagtcaagcccctagccaatactcccagcagagctcatcctacgggcaacagagcagttttagacaagatcacccgagctctatgggcgtctacggacaggagagtggcggtttctctggccctggagagaaccgttcaatgtcaggcccagataaccggggaagaggtcgcggtggcttcgacagaggaggtatgtcaagggggggtagggggggagggagagggggtatgggcagcgccggtgagcggggaggctttaacaagccagggggaccaatggatgaagggcctgatctagacctgggcccacccgttgacccagatgaagacagtgacaatagtgctatttatgttcaggggcttaacgatagtgtaaccttagatgatctggctgactttttcaaacagtgcggagtggtaaaaatgaacaagcggacgggtcaacctatgattcacatctatttggacaaagagacggggaaacctaaaggcgacgctaccgtcagctatgaggacccccctaccgccaaagcagctgtggaatggttcgacggcaaggacttccaggggtcaaaactgaaggtatcactggcacgaaaaaagcccccaatgaatagtatgaggggagggctaccacctcgcgaagggcgaggtatgcctccgcctcttcgaggcggacccggtggtccaggtggtcctgggggtcccatgggaagaatgggcggacgcggtggggaccgaggaggctttcctccacgaggacccaggggatcccgcggtaacccatctggcggaggcaacgttcagcatcgggcaggcgactggcagtgtcctaatccaggatgtggaaatcaaaatttcgcgtggagaaccgaatgtaaccaatgtaaggccccaaaaccagagggattcctgcccccaccttttccacctcccggaggcgacaggggccgaggtggccctggtggcatgcggggtggtcggggaggtcttatggatcggggtggtcccggaggtatgtttcgcggtggacgaggaggcgaccggggtggatttcgtggtggaagaggtatggatagaggagggtttggtggagggagacgtgggggaccagggggaccacccggtcctcttatggaacagatggggggacgtcgaggaggacgcggtggaccgggtaagatggataaaggagagcacaggcaagagaggcgggatcgcccttactag

SEQ ID NO: 28558 - DNA, 1752 bp, synthetic construct
  misc_feature 1..1752: note = Description of Artificial Sequence: Synthetic coding sequence
  source 1..1752: mol_type = other DNA
atggcttctaccgactactctacatatagccaggctgccgctcagcagggctactctgcgtataccgctcagcctactcagggctacgcccaaaccacccaagcctatggacagcagtcttatgggacgtacggacagcctaccgacgtttcctatacccaggcacagactaccgctacatatggacagaccgcttacgctacgagttacggtcagccacctactggatacaccactccaaccgccccacaggcctattcacagccagtacaggggtatggaaccggggcttacgacaccaccaccgccacagttaccactacacaggcgtcttacgccgctcagagtgcttatggtacacagcccgcttaccccgcttatggtcagcagccagctgcaaccgccccaacccgcccacaggatggaaacaagcccaccgagaccagccagccacagtcctcaaccgggggttataatcaacccagcctcggttacgggcaatctaattattcctacccacaggtaccaggctcttaccccatgcagcctgtgacggctcccccttcatacccaccaactagttattctagtacccagccgacgtcctatgaccagtccagctatagtcaacaaaatacgtacggacagccctctagctacggacaacagtctagctacggacagcagtccagctacggacagcagccgcctacatcttatccaccacagaccggttcttatagtcaggctccatctcagtacagccagcagtcttcgtcctacggtcagcagcgccctatggacgagggccctgatctggatctggggccacccgttgaccctgacgaagactctgacaatagtgctatatatgtgcaaggcctgaacgatagtgtgaccctcgacgatctagctgacttttttaagcagtgtggagtggtgaagatgaataaacggacaggccaaccaatgatccatatctatctagataaagagaccggaaaacctaaaggcgacgcaaccgtgagctacgaagatcctcctaccgctaaggccgctgtggagtggttcgatgggaaggattttcagggatctaagctcaaagtctctctggcaagaaagaagcccccaatgaatagcatgaggggaggtttgccaccgcgagaagggcgtggcatgcctcccccactgcggggagggccaggaggcccaggagggcctggcggtcccatggggaggatgggaggaagaggaggggaccgaggcggattcccaccacggggtcctaggggatcgaggggcaatccaagcggcggtggaaatgtgcagcaccgcgcaggtgattggcagtgtcctaatccaggctgcggcaaccaaaatttcgcctggcgcaccgaatgtaatcagtgtaaggccccaaaacccgagggctttctgcccccacccttccccccaccaggaggcgataggggcaggggcggaccgggaggcatgcgtgggggacggggaggtttaatggatagaggtggcccaggtggaatgtttaggggcggtcgagggggtgatcgcggaggatttcgcggtggtagggggatggaccggggaggattcggaggaggcaggcgcggtggcccagggggaccacccggacctctaatggagcagatgggtggacggagaggcggtagaggcggacctggaaagatggataagggagagcaccggcaggaaaggagagataggccatactag

SEQ ID NO: 28559 - DNA, 1971 bp, synthetic construct
  misc_feature 1..1971: note = Description of Artificial Sequence: Synthetic coding sequence
  source 1..1971: mol_type = other DNA
atggctagtaccgattattccacctactcccaggctgccgcacagcagggctactcggcctacaccgcccagcccactcaagggtatgcacaaacaactcaggcttacggacagcagagttacggcacctacggtcaacctactgacgtgagctacacccaggcacagacaacagcgacatacggccagaccgcctatgctacatcatacggacaaccacctactgggtataccacaccaacagctccccaagcatactcccagcccgtgcagggttatggtactggagcctatgatacgactaccgccaccgtgacaaccacacaggcctcttacgccgcacagtcagcctacggtacgcagcccgcatatccagcatatggccagcagccggcagccacggcaccaacaaggccacaggacggtaataaaccaaccgagactagtcagccccagtcaagcacaggtggttataaccagccatctctcggctatggacagtccaactacagctacccccaggttcccggtagctaccctatgcaaccagtgacggcgccaccgagctaccctcccaccagctacagctcaacccagcccaccagctacgatcagagtagctactctcagcagaatacatacggccagccctcatcgtacggccagcagagttcatatggtcagcagtcctcctacgggcagcaaccacccacatcgtatcctccacaaacgggctcctatagccaggctccaagtcagtactcccagcagtcctcttcatatggtcagcagagtagctttcgacaggaccatccttcttcaatgggagtgtatggacaggagagcggaggcttcagtggaccaggagaaaaccgctccatgtccggccctgacaatcgtggccgtggacggggtgggttcgatcggggtggaatgtcaagaggaggacggggaggaggccgaggtggcatgggcagcgctggggagagagggggattcaacaagccaggcggacccatggacgaaggaccggatttggatctgggaccgcctgttgaccccgacgaggattccgacaactccgccatctacgtccaagggctgaatgacagcgtgaccctcgatgacttggcagacttctttaaacagtgtggcgtggtcaagatgaataagaggacaggacagccaatgatccacatctatctggataaggagacaggtaagcccaagggagacgctaccgtgagctacgaggaccctcctacggccaaggcggcagtggaatggtttgacggtaaagacttccagggatctaagcttaaggtaagcctcgccaggaaaaagccaccgatgaattctatgaggggcggacttccccctcgcgaaggcagaggaatgccgccaccgctgagggggggacccggtggccctggagggcctggcggacctatgggacggatggggggtagaggcggtgaccggggtggattccccccacgcggacccagggggtctcgcggtaatcccagcgggggaggaaacgtccagcatagggcaggcgactggcaatgtcccaaccccggttgcggaaatcagaacttcgcctggaggacagagtgcaaccagtgcaaggcgccaaagcctgagggcttcctgcctccaccttttccacccccagggggtgaccggggacgcggaggtccgggtggcatgagggggggtaggggcggattaatggacagaggcggtcctggaggcatgttccggggagggagaggcggtgaccggggtggattccgaggaggtagaggtatggatcggggaggcttcggcggtgggaggagaggtggacccggaggtcctcccggaccgcttatggagcaaatgggcggtcgacgcggagggcgtgggggtcccggtaaaatggacaagggagagcaccggcaagaaaggcgggatcggccttattag

SEQ ID NO: 28560 - DNA, 1968 bp, synthetic construct
  misc_feature 1..1968: note = Description of Artificial Sequence: Synthetic coding sequence
  source 1..1968: mol_type = other DNA
atggcgagcactgattattctacatactcccaggccgctgctcaacagggatatagcgcgtacaccgcacagcccacacagggctacgctcagaccacccaagcctatgggcagcaatcatacggtacatacgggcaacctacagatgtctcctacacccaggctcagaccaccgcaacatatgggcagacggcttacgccaccagttacggccagcccccaactggatacactacccccactgccccacaagcctattctcagcccgtgcaggggtacggcaccggcgcatacgacacgaccacagccacggtgactactacacaagccagttacgcggcacagtccgcctatggaacacagccagcatacccagcatacgggcaacagcctgccgctaccgctcctaccagaccacaagatggcaataaaccaacagagacctcccagccacagagcagcaccggcggatataatcagccgtcattggggtacggccagagcaattatagctatcctcaggttccgggaagctatcccatgcagcctgtcacagccccaccctcatatccacccaccagttactcgtccacccagcctacttcatatgaccagtcaagctattcccagcaaaatacatacggacagccctccagttatggccaacaaagttcttatggccagcagtcatcttacggacaacagcccccaacatcatatccgccacagactgggagctacagccaggcaccctcacaatatagccaacagagcagctcctatggtcagcagagcagctttagacaggatcaccctagttcaatgggggtgtatggccaggaatcgggtggattttccgggcctggtgagaatcgcagtatgtcagggcctgacaaccgcggtcgcggtcgaggcggatttgatcggggtggtatgtcccggggtgggagaggaggaggtagagggggaatgggagccggagagagagggggatttaacaagcctggcggtcccatggacgaaggtcccgacctcgacctgggtccccctgttgacccagacgaagacagtgataacagtgcgatttatgtgcagggacttaatgactcagtgaccctggacgatctggctgatttttttaaacagtgcggcgtggtcaaaatgaacaagcgcactggacagccaatgattcatatctatcttgataaggaaaccgggaagccaaagggagacgctaccgtgtcctacgaagatcctccgaccgcaaaggccgctgtagaatggtttgatggcaaggacttccaaggctctaaactcaaagtcagcctggcccgaaaaaagcctcccatgaactccatgcgcggagggcttccccctcgggagggccgtggcatgccccctcctttgcgcggtggtccaggcggtccgggaggacctggaggcccaatgggaagaatgggaggtagagggggagaccggggagggtttccgcctcgaggtcccaggggcagccgcggtaatcctagtgggggtggaaacgtacagcaccgggcaggcgattggcagtgtccgaacccaggttgcgggaaccagaacttcgcctggagaactgaatgcaatcagtgtaaagctcccaagcccgagggattcctgccgccaccattcccaccccctggcggtgaccggggtcggggaggacccggaggtatgaggggcggacgcggaggactaatggatagagggggaccgggtggtatgttccggggaggcaggggcggagatcgcggaggcttccgcggaggaagagggatggaccggggaggctttggcggtgggcgacgcggtgggccaggaggaccaccagggccattgatggagcagatgggcggacgcagaggcggtaggggtggccctgggaagatggacaaaggagaacaccggcaagagcgacgggaccgcccatactag

SEQ ID NO: 28561 - DNA, 1986 bp, synthetic construct
  misc_feature 1..1986: note = Description of Artificial Sequence: Synthetic coding sequence
  source 1..1986: mol_type = other DNA
atggcaagcactgattattccacatacagccaggcagccgctcaacaaggttacagtgcatacacagcacaacctacccaaggctacgctcagactacacaggcatacgggcagcagagttacggcacatatggacagccaaccgatgtttcttacacacaggcccaaaccaccgctacttatgggcagactgcctacgctaccagctacggccaaccacccactgtggaagggaccagtacaggctacactaccccaaccgcccctcaggcctactcgcagccagtacagggatacggaacgggggcttatgacacgaccaccgcgaccgtgacaacaactcaagcttcctatgcagcgcagtccgcatatggaacccagccggcataccccgcatacggccagcagccagctgccacagccccaacgcgtccgcaggatggtaataagcctaccgaaactagccagccgcagtcaagcaccgggggatataatcagccctctttgggctacggacaatctaactacagctatccgcaggttcccggatcttacccaatgcagcccgttacagcccctccatcttacccacctactagctattcgagcacacagcccacctcttatgaccaatccagctactcacaacagaacacctatggccagccctcctcatacgggcaacagagtagttacgggcagcagagttcatatggacagcagcccccaacatcttatcctcctcagacagggagttattctcaggctccttcacagtattcccaacaaagttcaagctacggccagcaaagttcctttagacaggatcacccatcctctatgggagtgtacgggcaggagtctgggggatttagcggcccaggcgagaacagatctatgagtggtcctgacaaccgcggaagggggagagggggattcgataggggcggaatgtcccgcggtggtcggggtggagggaggggaggcatgggcgctggggagagggggggtttcaataagccaggcggtcccatggatgaaggccctgacctcgaccttggtcctcctgttgatcctgacgaggacagcgacaattcggcgatctacgtgcaggggctcaacgactccgttacgcttgacgacctcgcggattttttcaagcagtgtggtgtcgtcaagatgaacaaaagaacgggacaaccaatgatacatatctatttggataaggagacaggtaagccgaaaggtgacgctaccgtcagctacgaagatcctcccaccgcaaaggcagctgtcgagtggtttgacggcaaggacttccaggggtccaagctcaaggttagccttgcacgaaaaaaaccgcctatgaattcaatgcgcggaggcctgccccctcgagaaggaaggggcatgcccccacctttgcgcggtggacccggaggaccaggcggaccaggcggacccatgggaaggatggggggacggggaggtgatcgtggcggattcccaccgaggggtcccagaggatcaagaggcaaccctagcggcggtggcaatgtgcagcacagggcaggtgattggcaatgcccaaatcctggctgtggaaaccagaacttcgcgtggagaactgagtgcaatcagtgcaaggccccaaagccagaagggttcctgcccccaccatttccccctccagggggagatcggggacgcggagggcctggcggtatgaggggtgggagggggggactgatggacagaggtggacccggtgggatgttccgcggaggcagggggggagatcggggaggctttagaggtggtcgcggaatggatcgtgggggtttcggcggaggcagaagggggggacctggcggtccaccaggacccctgatggagcagatgggcggacgacggggtggcagagggggtcccggaaagatggacaagggagaacatcgacaggaacgccgagacaggccctattag

SEQ ID NO: 28562 - DNA, 543 bp, synthetic construct
  misc_feature 1..543: note = Description of Artificial Sequence: Synthetic coding sequence
  source 1..543: mol_type = other DNA
atggcctctaccgattattcaacttattctcaagcggcagcccagcagggatactccgcctacactgcccagcctacccaaggatatgctcagacgacccaggctagctatgctgcacaatccgcttacggaacccagcccgcataccctgcttacggacaacagcctgctgccactgcacccacccgaccacaggacggcaacaaacccactgagaccagccagcctcagtccagtactggcggatataatcagccctccctcggttacggacagtcaaactactcatacccacaggtcccgggaagttaccccatgcagcctgttacagcccctccttcatatccgcctacaagctactcttctacgcagccgactagctatgatcagagctcctattctcaacagaatacttacgggcagccatcgtcttacggacagcaatcatcttacggtcagcaatcctcttatggacagcagccacccacatcctacccgccacagaccggatcttattctcaggcccctagtcagtacagctag

SEQ ID NO: 28563 - DNA, 1065 bp, synthetic construct
  misc_feature 1..1065: note = Description of Artificial Sequence: Synthetic coding sequence
  source 1..1065: mol_type = other DNA
atggctagcaccgattatagcacctactcccaggccgcagcacagcagggctacagcgcctacacggctcagcctactcagggctatgcacagacaactcaggcctatgggcagcagtcgtatggcacatatggacagccaaccgacgtgtcctacacacaagctcagaccacagccacttacggacaaacagcgtatgcaacatcctatggtcagcctccgactgggtataccactcctacagcgcctcaggcctacagtcaacccgtccagggttacggtacaggagcttacgatacaacaaccgctactgtgactaccactcaggcaagttacgctgcgcaatcggcatatggaacccagcctgcctaccccgcttatggccaacagcccgctgccacagccccaactagacctcaggacggaaacaagccaacagagacctcccagccccagtcctcaacgggaggatacaaccaaccttccctgggctatggtcaaagcaattatagttatccacaggttcccggttcctatccgatgcaaccagtgaccgccccacccagttacccacccacaagctattcttccacccagccaacgtcttacgatcaaagcagctatagccagcagaacacatatggacagcccagctcttacgggcaacagtctagctatgggcaacagtcctcctatgggcagcagccacctacttcttacccccctcagactggctcatatagccaagcacctagtcaatattcccaacaatcgtcctcatatgggcagcaaagctcctttagacaggatcatccttcttcgatgggcgtttatgggcaagagtccggaggcttctcgggccctggggaaaataggtctatgagcggtcccgataatcggggaagaggacgagggggttttgacagaggcggaatgtcacggggagggcgagggggtggaaggggaggcatgggcctgcagtccgagagcctcgtctacacaagcatcttaaagaaatatccctattcagtcctgtcaaggcagcacaatgaaaaatgggactag

SEQ ID NO: 28564 - DNA, 972 bp, synthetic construct
  misc_feature 1..972: note = Description of Artificial Sequence: Synthetic coding sequence
  source 1..972: mol_type = other DNA
atggaccccggaaaagacaaggagggcgttccccaaccctccggcccacccgcaagaaaaaagtttgtcatacctctcgacgaggacgaggtcccgcctggcgtggccaaaccgttgtttcggtcaacccagagtctgcctacggtcgacacctctgctcaggctgcgcctcagacttacgctgagtatgcaatttcccaaccactagaaggagccggtgcaacgtgtccaacaggaagcgagcccttggcgggtgaaacccccaatcaggctcttaagccaggggcaaagagcaactcaataatcgtgtcccccaggcaacgaggcaacccagtccttaaatttgtccgcaacgtgccctgggaattcggagatgtcatcccagactacgtcctggggcaatccacctgtgccttgtttctaagtctgcggtaccacaaccttcatcccgactatattcacggacggctgcagagcttgggaaaaaactttgctctccgagtcctgcttgtgcaggtggatgtaaaggacccacagcaggccttaaaagagcttgcaaaaatgtgcattctggctgattgtaccttaatcctggcctggagcccggaggaagctggtcgctatctggaaacctacaaagcatacgagcagaagcctgcagaccttttgatggagaagctcgagcaggatttcgtgagcagagtcaccgaatgcctgaccaccgtcaaatctgtcaataaaactgatagtcagaccctgctcaccacctttggctccctcgaacaactcattgccgcttcacgagaggatctggctttatgtcccggactcgggcctcagaaagttcgcgcactaggcaagaatcccagaagctggggcaaggagcgcgctcctaataaacataacctgcgaccacagtcttttaaggttaagaaagaacccaaaacccgccactccggcttccgactgtag

SEQ ID NO: 28565 - DNA, 894 bp, synthetic construct
  misc_feature 1..894: note = Description of Artificial Sequence: Synthetic coding sequence
  source 1..894: mol_type = other DNA
atggaccccggaaaagataaggaaggagttcctcagccatcaggtcctcccgctcgaaagaagttcgtcattcctctcgacgaagatgaagttcctcctggggtcgcgaaacccctcttccgttctactcagtcccttcccacggtcgacacatctgctcaggcagctccgcaaacctatgcagagtatgccatctctcagcctctagagggagctggcgcaacgtgccctaccggctcagaacctcttgcaggagagacccccaatcaggcactgaaaccaggcgcaaaatccaactcaatcattgtttcccctcgccagcgtggcaatcccgtgctgaaattcgtaaggaacgtcccctgggagtttggggacgtcatacccgattacgtgctgggtcaatctacatgcgccttattcctgtctctgcgttaccataacctccatcctgattatattcacggcagattgcaatcattagggaagaactttgccttgagggtcctcctggtccaggtggacgtgaaggacccccaacaggcgcttaaagaactggcaaaaatgtgcattttggccgactgcaccctgatcctggcatggtctcctgaggaagcgggaagatatcttgagacatacaaggcatacgaacagaaaccggctgatctgctgatggaaaagcttgagcaggattttgtgtcccgagtgaccgagtgtctaaccactgtgaaatcagttaataaaaccgactcccagaccctgttgactacattcgggagcttggagcagctgattgctgctagccgcgaggacctggcattgtgtcccggattgggccctcagaaggcacgcagactgtttgacgtgctacatgagccttttcttaaggtcccttag

SEQ ID NO: 28566 - DNA, 822 bp, synthetic construct
  misc_feature 1..822: note = Description of Artificial Sequence: Synthetic coding sequence
  source 1..822: mol_type = other DNA
atggaccctggaaaagataaagagggagtccctcagccatctggtccgcctgcgagaaagaagttcgtgattccactagacgaggacgaggtgccaccgggtgtggctaagcccctttttcgaagcacacaatcactgccaacagtggacaccagcgctcaggctgccccacaaacatatgcagaatacgcgataagccagcccctggaaggcgcaggagcaacttgccccacaggatcagagcccctggcaggcgagactcccaatcaggcactgaagccaggagctaaatccaacagtattatcgtaagtcctagacagcggggtaacccggtactcaaatttgtgaggaacgttccgtgggagtttggcgatgtgatacccgactacgtccttggccaatcaacgtgcgcactctttttatccttgagataccataacctccaccccgactatatccacggtagactgcagtccctaggtaaaaatttcgcgctgagagtactcctggtgcaggtggacgtgaaagatccccagcaagccttgaaagaactcgcgaaaatgtgcattctcgctgactgtactctgatcttagcgtggtcacccgaggaggccggacgatatctggaaacttataaagcgtatgaacaaaaacctgctgatcttttgatggagaaactagaacaggattttgtgtcccgcagtctcgagcagttaatcgcagcctcacgcgaggatcttgccctttgcccaggtttaggaccacagaaggccaggcgactatttgacgtcctgcatgagccgttcttgaaagtgccctag

SEQ ID NO: 28567 - DNA, 678 bp, synthetic construct
  misc_feature 1..678: note = Description of Artificial Sequence: Synthetic coding sequence
  source 1..678: mol_type = other DNA
atggaccccggaaaagataaggagggcgtgccacagccctctggcccaccagcaaggaagaaattcgttatccccctcgatgaagacgaggtcccccctggtgtacgaggaaatcccgtgctaaaatttgtacgaaatgtcccctgggaatttggtgacgtcatacctgactatgtgcttggacaatccacatgcgccctctttctcagcctccgataccacaacctccacccagactatattcatggcagactgcagtctcttggcaaaaattttgccctcagggtgctgctcgtgcaggttgatgtgaaagaccctcagcaggcattgaaggaattagccaagatgtgtatactagccgattgtactctcatcctggcgtggtctcctgaggaagctggaagatacctggaaacctacaaagcttatgagcagaagccggctgacttactcatggaaaagcttgagcaggatttcgtgtctcgggtgaccgagtgcctaacaaccgtgaagtctgtgaacaagaccgactctcagactctgctgactacattcggtagtttagaacaattgatcgccgcttcccgggaggatctggcattatgcccagggctcgggcctcagaaggctaggcgtcttttcgacgtcctgcatgaacccttcctgaaggtgccatag

SEQ ID NO: 28568 - DNA, 120 bp, synthetic construct
  misc_feature 1..120: note = Description of Artificial Sequence: Synthetic coding sequence
  source 1..120: mol_type = other DNA
atggatccagggaaagacaaagagggagtgccccagccttccgggcctcccgcacggaaaaaatttgtcataccgctggacgaagacgaggttccccctggtgtgagcaagcccctctag

SEQ ID NO: 28569 - DNA, 726 bp, synthetic construct
  misc_feature 1..726: note = Description of Artificial Sequence: Synthetic coding sequence
  source 1..726: mol_type = other DNA
atggctagtctgagcggcctggcctcagcactggaatcttatagaggacgagaccgactgatccgtgtactagggtattgctgccaactcgtggggggagtcttggtggaacaatgccccgctcgatcggaagtgggaacccgacttctcgtagtgtccactcagctcagccattgtagaacaatcttacgcctgtttgatgacctggccatgttcgtctatacaaagcagtatggactgggcgctcaggaggaagacgccttcgtgaggtgcgtttcagtattgggcaatcttgcagatcaactctactatccctgcgagcatgtcgcttgggccgctgatgccagagtcttgcacgtggactcttcccggtggtggacactgtcgaccaccctgtgggccctgagcctgctgttgggagtcgccagaagtctgtggatgctgttaaagctgaggcaacgtctccggagccccacagcaccatttacatccccgttgccaaggggcaaacgtagggctatggaggcacaaatgcagtccgaggctctgtccctcctgagcaatcttgctgatcttgctaatgcagtgcactggctccctagaggcgtcctgtgggccggtagatttcctccttggttggtggggctgatgggaactatatcatccatcctctcgatgtatcaggccgctcgagccggtgggcaagccgaggccactaccccctag

SEQ ID NO: 28570 - DNA, 1218 bp, synthetic construct
  misc_feature 1..1218: note = Description of Artificial Sequence: Synthetic coding sequence
  source 1..1218: mol_type = other DNA
atgcgcgaactgaaaagaactctagacgccaaggggcacggagtgctagagatgccatcagggaccggcaaaaccgtgagccttctagccttaatcatggcgtatcagcgggcttatcccctagaggtgactaaactgatttactgctctcgcactgtcccagagattgagaaagtgatcgaggagctgcgaaagctcttaaatttctacgagaaacaagagggcgaaaagttgcccttcctgggtctggccctgagtagtaggaagaacctgtgtattcaccctgaggtgaccccactgcggtttggcaaggacgtcgatggaaaatgccactcccttactgcatcctacgtcagagcacagtaccaacacgacacctccctcccacattgccggttttacgaggagtttgacgcccacggacgggaggtgcccctgcctgcgggaatctacaaccttgacgatctgaaggctctcggcagacggcagggttggtgcccttacttcttggccaggtattccattcttcatgctaatgtcgtggtgtattcctatcattaccttttggatcctaaaattgctgacctggtttcaaaggagctagccaggaaggctgtggttgtgttcgacgaagcacataatatcgacaacgtgtgtatagactcaatgtccgtcaacctcacccgcaggacacttgataggtgccagggcaatttggagactctgcagaagacagtgttacgcattaaagaaacagacgagcagagattgagggatgagtacagaagacttgttgaaggactgagggaagcctcagccgctagggagaccgatgcccatctcgctaacccagtgctgccagacgaggttctgcaggaggcagtgcccggatctatcagaactgctgaacactttcttggcttcctacgcagactgctcgaatatgtgaaatggagactccgggtgcagcatgttgtccaagaatcacctcccgcttttctgagtggcctagcacagcgcgtttgtatacagcgaaagccccttaggttttgtgctgagcgcttgcgaagcctgctccacaccctcgagatcactgatctcgcagatttttccccactgactcttctcgccaactttgccacgctagtgtccacttatgcaaaaggccaggcccagcactgtggctccagccggaaccagaagcgtagccatccatag

SEQ ID NO: 28571 - DNA, 2133 bp, synthetic construct
  misc_feature 1..2133: note = Description of Artificial Sequence: Synthetic coding sequence
  source 1..2133: mol_type = other DNA
atgagagaactgaagaggacgttagacgccaaggcctaccccctcgaggtgaccaaactcatttattgctctcgcacagtcccggagatcgagaaagtaattgaagagttacgtaaactgcttaatttttatgaaaagcaggaaggagagaaactgccgtttctgggcctggccctaagtagcaggaaaaatctttgtattcatcccgaagtgactccactccggttcggaaaggatgtggatgggaagtgtcattccctgaccgccagctacgtgcgggctcagtaccagcatgatactagtctaccacactgccggttttacgaggaatttgatgcacacgggcgagaagtgcccctgccagccggtatttataatctggacgacctgaaagccttaggtagacgccagggatggtgcccttatttcctcgcacgctattccatactccacgcaaatgtggtcgtctattcatatcactatctgctcgatccaaagattgccgatcttgtgtcaaaggagttggcaaggaaggccgtggttgtgtttgatgaagcgcataatatcgacaacgtgtgcatcgactccatgtccgtgaacttgacaaggcgaaccctggataggtgccaggggaaccttgagaccctccagaaaacggtcctacgtattaaggagacggacgagcagcgtctccgtgacgagtatcggagacttgtggagggtctgagggaggcttcagccgctcgggagaccgacgctcacctggccaatccggtccttcctgatgaggtgctgcaggaggctgtacctgggtcaatccgtactgctgaacacttcctcggttttctccggcgactgctcgagtatgtcaagtggcggctcagggtgcagcacgtggtgcaggaatcgcctcccgctttcctcagtggcctggctcagagagtgtgtatccaacggaagccattgaggttctgtgcagaaagattgcgctccctgttacacacgctcgaaatcacagatttggcagatttcagtcccttgaccttgctcgcaaactttgccacactggtgtccacatacgccaaagggtttactattataattgaacccttcgacgatcggacaccaacaatcgccaacccgattctgcatttttcttgtatggatgctagtctcgcaattaagccagtgtttgagcggttccagtccgttataattacctcaggtacactgagcccacttgatatctatcccaagatactggacttccaccccgtgaccatggcgacattcactatgaccttagcaagggtctgcctgtgtcctatgattatcgggaggggcaatgaccaggttgcaatctcatccaagtttgaaacaagggaggatattgccgtaatcagaaattacggtaacctgcttctggaaatgtccgccgtcgtgcctgacggcatcgtcgcattttttaccagctaccagtacatggagagcacagtggcatcttggtacgagcaggggatactggagaatattcagcgaaataagctactgtttatagagacccaggatggggctgaaacctctgttgccctcgagaagtaccaggaggcttgcgaaaatggtcgcggtgccatattacttagtgtggccaggggaaaggtgagtgagggcatcgattttgtacatcactatgggcgtgccgtgatcatgttcggggtgccgtatgtgtatactcaatccagaatccttaaagcccgtcttgagtacctgcgcgatcagtttcagattcgtgaaaacgatttcctaacattcgatgccatgcgccatgccgctcagtgcgttggccgagccatcagagggaagactgactatggtttgatggtcttcgcggataaacggtttgctaggggtgataaacgaggcaagcttcccaggtggattcaggagcacttaaccgatgcgaatctcaacctcacagtagatgagggagttcaggttgctaagtactttctgaggcagatggcacaacccttccatcgcgaggaccagttgggactgtcacttctctcccttgagcagttggagtctgaggaaactcttaaacgaatcgagcagatcgcccaacagctctag

SEQ ID NO: 28572 - DNA, 2211 bp, synthetic construct
  misc_feature 1..2211: note = Description of Artificial Sequence: Synthetic coding sequence
  source 1..2211: mol_type = other DNA
atgcgcgagcttaagcgcacactcgatgcgaagggccatggagtgctagagatgccctccggaaccggcaaaaccgtctccctgttagccctcatcatggcctatcagcgggcatatcccctggaggtaacaaaactgatttattgttctcggacggtgcccgaaattgaaaaggttattgaggagttgcggaagctcctgaatttttatgaaaagcaggaaggggagaaactgcccttcctgggactcgcattgagctcacgaaagaacctgtgcatccaccctgaagtcacaccgctgaggtttggtaaggatgttgatggcaaatgtcattccctcacagcctcctacgttcgggctcagtaccagcatgacacatctctcccacactgccgcttctatgaagaattcgacgcccatgggcgtgaggtccctcttcccgctggaatctacaacctcgatgatctgaaggcactcggcaggagacaggggtggtgcccctacttcttggccagatattctatactgcacgcgaatgtggtggtgtattcctatcactacctgttggacccaaagatagccgaccttgttagcaaggagctggccaggaaagctgtcgtggtttttgacgaggcccataacattgacaatgtgtgcatcgatagcatgagtgtcaacctcacaaggcggacgctagatcgttgtcagggtaatcttgagactctccaaaaaactgtgctccgcattaaggagactgacgaacagcggctgcgggacgagtaccggagacttgtcgaaggtttgcgcgaggctagcgctgcacgagaaaccgatgcccatttggcaaatcccgtgttacctgatgaagtgctgcaggaagcagtgcccggttccatccgcacggctgagcacttcctgggattcctcagaagacttttggaatatgtgaagtggcgcctgcgggtgcagcacgtcgtgcaagagtctcctccggcattcctgtctgggttggctcagagggtgtgcatccagagaaagccactcagattttgcgcagagcggctgcgaagtctcctgcacaccctggagatcacagatctggctgattttagcccgctgacattgttagccaacttcgccacgctggtgagtacctatgcaaaaggctttactattattatcgagcctttcgacgaccgcactcccacgattgcaaatccaattctccacttttcctgcatggatgcctctctggcaatcaagccagttttcgagcgctttcagtcagttatcataacatccgggactctctcaccgctggacatctaccccaaaatactggactttcatccagtgactatggccacgttcaccatgaccctcgctagagtgtgtctgtgcccaatgatcattgggaggggcaatgatcaggtggctataagttccaagttcgaaaccagggaagatattgcagtgatccgcaactatggaaacttgctgcttgaaatgagcgctgttgtacctgacggtatagttgccttctttacctcttatcaatatatggagtctaccgtagcttcctggtatgaacagggaattctcgaaaacattcagagaaacaagctactgttcatcgagactcaggatggcgctgaaactagtgtcgcccttgagaagtaccaggaggcatgcgaaaacggcagaggcgcaatcctgttgtccgtggcccgtggcaaggtgtctgagggtatcgactttgtccaccactatggcagggccgtcatcatgttcggggtcccatacgtgtacacccaatccagaatcctgaaggccaggttggaataccttagggatcaattccagatccgcgagaacgactttttgaccttcgatgccatgagacatgccgctcaatgcgttggacgggctattcgcggaaaaacggactatggcctgatggtgtttgctgacaagcggtttgctcgtggcgacaagcgaggaaaacttcccaggtggatacaagagcatttaactgacgccaatctcaatttgactgtggacgagggagtccaggtagccaagtatttcctccgacagatggcccagcccttccatagggaagaccagctcggcctctcgctactatctctcgaacaattagagtccgaggagacgctaaagaggatcgagcagatcgctcaacagctctag

SEQ ID NO: 28573 - DNA, 2049 bp, synthetic construct
  misc_feature 1..2049: note = Description of Artificial Sequence: Synthetic coding sequence
  source 1..2049: mol_type = other DNA
atgaagttaaatgtggacggactgctagtgtactttccatatgactacatctatccagagcagttttcatatatgcgcgagctgaagaggaccttggacgcaaagggccacggagtcctcgagatgcccagcggaacaggaaaaaccgtttccttgctcgccttgatcatggcttatcagcgcgcatacccacttgaagttaccaagcttatctattgctcacggaccgtgccagaaatcgaaaaagtgatagaggaactgagaaaattactgaacttttacgagaaacaggaaggtgaaaagttaccatttctggggctggccctttcatccaggaaaaatctctgcattcacccagaaattcttcacgctaatgtggtggtgtattcgtatcactacctgctggatccaaaaattgcagatctggtgagcaaggaactcgcccgaaaggcggtggttgtgttcgacgaggcccataacatcgataacgtctgtatcgactcaatgtccgtcaacctgaccagacgtaccctggaccgctgtcagggaaatctcgagactttgcagaagacggtgcttagaataaaagagacagacgaacagcggcttagggacgagtatcggaggctggtagagggcctcagagaggccagtgctgctcgcgagaccgatgcccatctggctaatcctgtcctacctgatgaagtcctgcaggaggctgtcccgggatcaatccgcaccgccgaacactttcttggcttccttcgacggttactggaatatgtgaagtggcgtcttcgagtgcagcacgtcgtacaagagtccccccctgcgtttttgtcaggcttggcgcagagggtgtgtatccagcgtaaaccgttacggttttgcgccgagcgcctgcgaagcctcttacataccttggagataaccgatctggcagatttctctccacttactctgctggcaaactttgcaaccctggtttccacttatgctaaaggcttcaccataattatcgagccatttgacgatcgtacgccaactattgcaaatcccatcctccacttctcttgtatggatgcttctttagccatcaagcctgtgttcgagcgatttcagtcggtgataattacaagcgggacattgtctcctctagatatttaccctaagatcttggattttcaccctgtgaccatggcgaccttcactatgactctggcgagggtgtgcctgtgccctatgattataggccgagggaatgaccaggtcgcgatttcaagcaagtttgaaaccagggaagatattgcagtgatccgcaactatggaaacctgctccttgagatgtcagccgtagtcccggacggtatagtggctttcttcaccagttatcaatacatggagagcacagttgcaagttggtatgagcaggggatcctggagaatatacagcgaaacaagttgttatttatcgaaacccaggacggtgctgaaacgtcagttgccctcgaaaagtatcaagaggcctgcgaaaacggcaggggagctatcctgctgagtgttgccaggggcaaggtttccgagggtatagactttgtgcatcattacggaagagcagttattatgtttggcgttccgtacgtctacactcagagccgcatcctgaaagcccgattagagtaccttcgcgatcaattccagattcgagaaaacgacttcctcacctttgatgcaatgagacatgcggctcaatgcgtgggccgagcaattaggggcaaaaccgactacggcctaatggtgttcgctgacaaacggttcgcgcgtggcgataaaaggggaaagttacccaggtggatccaagagcacctgacagacgccaatttgaatctcacggttgatgagggagtgcaggtggcaaagtacttcctgaggcagatggcgcagccgtttcatcgagaggaccagctcggattaagtctcctgtcactggaacagttagagtccgaggagacactgaaaaggatcgagcagatcgcccagcagctctag

SEQ ID NO: 28574 - DNA, 2283 bp, synthetic construct
  misc_feature 1..2283: note = Description of Artificial Sequence: Synthetic coding sequence
  source 1..2283: mol_type = other DNA
atgaagctgaatgttgacggcttgctggtctatttcccttacgattatatctatcccgaacagttcagctacatgcgggagttgaagaggactcttgatgctaagggccacggcgtgctagagatgccttctggcacagggaaaaccgttagcttgctggcacttatcatggcctaccagagagcctaccctctggaggtgactaaactcatctattgctctcgaaccgttccagagatagaaaaggtgatcgaggaactgcggaaactgttgaatttctacgagaaacaggaaggagagaagcttcccttcttggggctcgctctgtctagtcgtaagaatctgtgtatacatccggaagtgactcctctgcggttcgggaaggacgtggacggtaaatgccactctctgacagcaagttacgtgagagcacaatatcagcatgacacgagcctcccccactgcagattctacgaagaattcgacgcccatggcagagaggtgccgctgcccgctggcatctataacctggatgatctgaaggctctggggcgacgacagggatggtgcccatattttctcgctcgctactcaatcctgcatgcaaacgtcgtagtctattcataccattacctccttgaccctaagatcgcagatctcgtctctaaggagttagccagaaaagccgtcgttgtttttgatgaggcccataacatcgacaatgtttgcatagactcaatgagcgtcaatctcactaggagaactttggatcggtgtcaaggaaacttggagactcttcagaagactgtactgcgtattaaggaaaccgatgaacagagactgagggacgaatatcggagactagttgaagggctgcgggaagctagcgcagcgcgagagaccgacgcccatctggctaatcccgtgctgccagacgaggttctccaggaggcagttccaggctctattcggactgcagagcattttctcggcttcctgcgtcggttactggagtacgtcaagtggcgtctgcgcgtccaacacgtagtgcaagaatccccacccgcttttctgtctggactggctcaaagagtctgcattcagcggaaaccactcaggttttgtgcagaaagacttcggtctctcttgcatactctggaaattacggatttggccgacttctcccctctgacactgctggccaatttcgcgaccctggtgtctacgtatgccaagggttttaccataatcatcgagcctttcgatgatcgtacaccaacgatcgcgaaccccatactccatttcagctgtatggatgcatccctcgctatcaagcctgtctttgaacggtttcaatctgtaattatcactagcggcacactcagtcccctcgatatatacccaaagatcctggactttcatccagtcaccatggctaccttcacaatgacactggcacgagtctgcctctgcccaatgattataggtcgcggaaacgatcaggtggcgattagcagcaaatttgaaactcgggaggacattgctgtgatcagaaactacgggaacctcctgctggagatgtcggcagtagtacccgatgggatcgtagcatttttcacgtcatatcagtacatggaaagcaccgttgcttcctggtatgagcagggaatcctcgagaacatacaacggaataagctgctattcatagaaactcaggatggcgcagaaacatcggttgccctcgaaaaatatcaggaagcatgcgaaaacgggaggggggctatcctgctctccgtggcgagaggcaaagtctctgagggcatagatttcgtccaccactacgggagagccgtgattatgttcggagtcccctacgtgtacacacagtctaggattctgaaagccagactcgagtacctaagagaccaatttcagattcgggaaaatgactttctcacctttgatgcaatgagacacgctgcacaatgtgtggggagagccatacgcggaaaaactgattatggtctgatggtttttgccgataagcgatttgctcgcggtgacaaaagaggcaagttgcctaggtggatacaggagcacctgaccgacgccaacttgaatcttactgttgacgagggcgtacaggtggctaaatattttctgcgccagatggctcagcccttccatagggaagaccagcttggcttgagtctcctgtctctagaacagttagagagcgaggagacccttaaacggattgagcagatagcgcaacaactttag

SEQ ID NO: 28575 - DNA, 2751 bp, synthetic construct
  misc_feature 1..2751: note = Description of Artificial Sequence: Synthetic coding sequence
  source 1..2751: mol_type = other DNA
atggagtctggacaaccggcacgacgtatcgctatggcaccattactggagtatgaacggcagctcgttctcgagctcttggacacagacggactggtggtctgcgctcgagggctcggagctgaccgccttttataccacttcctgcagctgcactgccaccccgcttgtctggtattggtccttaatacccagccagccgaagaggagtattttatcaatcagctgaaaattgagggtgtggagcatttgcccaggcgggttaccaacgagattacttcaaattctcgatacgaggtgtatacccagggcggagtgatattcgctacctcacgcattttagtggttgatttcctgacagatcgcatcccaagtgatctgatcactggcattctcgtctatagggcccacagaataatcgagagctgtcaagaggccttcattttacgcttgtttcgacagaagaataaaagaggatttatcaaagcatttaccgacaacgctgtagcgttcgatactggattttgccacgtcgagcgtgtcatgaggaatctcttcgtgcggaaattgtacttgtggcctcgattccatgtggctgtcaattctttcctagagcagcacaagcccgaagttgtcgagattcatgtgagcatgaccccgactatgctcgctatacaaacagccatactggatattctgaatgcttgcttaaaagaactcaagtgtcacaacccttccctggaggtagaggatctgtcactagaaaacgctattggaaagccattcgacaagacaatccggcactatcttgaccccctctggcaccagctcggggcaaagaccaagagtctggtgcaggacctgaagatcttgaggacactcttgcaatatctgtcacagtatgattgcgttactttcctcaatctcctggaaagcctacgtgccactgagaaggcgttcggccagaactctgggtggttgttcctcgattccagcacttctatgtttataaacgcacgagcacgggtgtaccacctgccagacgccaaaatgtcaaagaaggagaaaattagcgagaagatggagattaaagagggcgaggagacaaagaaggaattagtgcttgagtcgaacccgaaatgggaggcattgactgaggtgctaaaggaaattgaagccgagaataaggagtccgaggcactggggggacccggtcaggtcctaatctgtgcctccgacgaccggacctgtagccaattgcgagattatatcacactcggagccgaagcatttcttcttagactctatcggaaaactttcgaaaaagattccaaagcagaagaggtgtggatgaaattccggaaagaggattcttccaaaagaatacgaaaaagtcacaagcgaccaaaagacccgcagaacaaggagcgcgcaagtaccaaggagcgcacattgaagaagaaaaaaaggaagctgacactgactcaaatggttggaaagccggaggagttggaagaagagggcgatgtagaagagggctaccggcgtgagataagctcctcccctgagtcttgccctgaagagatcaaacatgaggagtttgatgtgaatctgtcttctgatgctgcgtttggcatactaaaagagcccctcactatcatacaccccctcctgggatgttccgatccttacgccctgacccgcgttctccacgaagttgagcctagatatgtggtcttgtatgacgccgaactaacctttgtcagacaactcgagatctatcgggcttcccggccaggaaagccattgagggtctactttctcatatacgggggtagcacagaggaacagcgatatcttacagcattgcggaaagagaaagaggcatttgagaaattaattcgagagaaagcctccatggtagtgcccgaggagcgggaaggtcgggacgagacaaacctcgacctggtacgcggaacagctagcgccgacgtgagcactgacacccgaaaggctggcggacaggaacagaatgggactcaacaatctatcgttgttgatatgcgggagtttcgaagtgaactgccctccctgatccatcgcagggggatcgacatagaacccgtgaccctggaggtgggagactatattctgacaccagaaatgtgcgtcgaacggaaaagtatctccgacctgattggcagtctgaataatggaagattgtattcacagtgcattagtatgagtcgatattacaaacgccctgtcttgctcatcgaatttgacccctccaagcctttctcactaacatcgcggggagccctgttccaagagatcagtagtaatgacatatctagtaagctcacactgctgacccttcactttccgcgacttaggatcttgtggtgcccctcccctcacgcaacggcggagttatttgaagaactgaaacaatccaagccccaacctgacgccgctactgcccttgccatcacagcagattctgaaaccctgccggaatcggagaaatataatcccggtccacaggactttcttctcaagatgcctggagttaacgcgaagaactgccgctccttgatgcaccacgtaaaaaatatagctgaactcgctgccctttcccaagatgagttgacttccattcttggcaacgcggctaatgcaaaacagctgtacgacttcattcacactagtttcgccgaggtggtctctaagggcaagggaaagaaatag

SEQ ID NO: 28576 - DNA, 2715 bp, synthetic construct
  misc_feature 1..2715: note = Description of Artificial Sequence: Synthetic coding sequence
  source 1..2715: mol_type = other DNA
atggccccactcctggagtacgagcgccagctcgtacttgagctcctcgatactgatggcttggtggtgtgcgccagagggctgggcgctgaccgcctgctgtaccacttcctgcagctacattgccatcctgcctgtcttgtgctcgtgcttaatacgcagccagccgaggaagaatactttatcaatcagctgaagattgagggtgtcgaacacctacctaggcgtgtaaccaatgaaatcacgagtaactcccgatatgaagtctatacacaggggggtgtgatttttgcgacctccaggattctggtggtcgacttccttaccgacaggatcccaagcgacctgattacagggatcctcgtctaccgcgcacacaggattatcgaaagttgtcaggaagcattcattctccggctgtttagacaaaagaacaagcggggattcattaaggcatttaccgataacgctgttgcattcgataccggattttgccacgtcgaacgagtaatgagaaacctgttcgtccgcaaactgtacttgtggccacgatttcatgtggcagtgaatagtttccttgaacagcacaagccagaggtcgtggagattcatgtgtcaatgacacccactatgctggccattcagacagctatcttggatattctgaatgcttgcctcaaggagctcaagtgccacaacccatccttggaagtcgaggatctgagtctggagaacgccattgggaagccattcgataagaccatcagacattacctggaccctctctggcatcaattgggtgctaagacaaagtccttggtccaggatctgaaaatccttaggacactgctccagtacctctcccaatacgactgcgtcacctttctgaatctcctggagagcctgagggctacagagaaggctttcgggcagaactcagggtggttgttcctagactcatctacatccatgttcataaatgctcgcgcaagggtttaccatctccccgacgccaaaatgtctaagaaagaaaaaataagcgagaagatggaaattaaggagggagaggagactaaaaaggagttggtgctggaatctaacccaaagtgggaggcactgacggaagtacttaaggagattgaagccgaaaacaaagagagtgaggccctgggcggtccaggtcaggtactgatctgtgcatcagacgacagaacatgttcccagctgcgggattacataactttgggcgctgaggctttcctgctgagactgtacaggaagacatttgaaaaggatagcaaagctgaggaggtgtggatgaagtttcgcaaggaagacagcagtaaacggatcaggaaaagtcataagcgcccaaaggacccacaaaacaaagaacgggcaagcaccaaggagagaaccctgaaaaagaaaaaaagaaagctcacactaactcaaatggtgggaaaacccgaagagttagaagaggagggtgatgttgaggaaggatatagacgggaaatctctagcagccccgagagctgtcccgaggagatcaagcacgaggaatttgacgtgaatctgagcagtgacgccgctttcggcattctgaaagaaccactgaccatcatccacccactactgggctgctcggacccctacgcactgacaagggtgttacacgaggtggaacccaggtacgtcgtgctgtatgacgcagaactcaccttcgtcaggcaactcgagatttaccgagcttctcgacccggaaagcccctgcgatactttctgatctacggcggatccactgaggagcaaaggtacttgacagccctccgaaaggaaaaagaagcatttgagaaattgatccgggagaaagcaagcatggttgtgcctgaggagagggaaggcagggacgaaacaaatctcgatctggtaagaggaacagcaagcgcagacgtttcaacagacacgcgaaaagccggaggccaggagcagaacggtacccagcaatctattgtagttgatatgagagaattcagaagcgaacttccttccctcatccatcggcgtggtattgacatagaaccggtgacattggaagtcggggattatatcctgacacccgagatgtgcgttgaacggaagtcaattagtgacctgattggcagcctaaacaatggtcggctctactctcagtgtatcagcatgtcgcgttactacaaacgaccagtgttgcttattgagttcgacccaagcaaacctttcagcttgacaagtcgaggcgctttatttcaggagatttcatctaacgacatttcctctaagctgacactgctgaccctccactttcctagactcagaattctttggtgtccaagcccacatgccacagccgaactgttcgaggaattgaagcagtctaaaccgcagcccgatgcagctactgccctcgctatcacagccgattctgagacgcttcctgagtcagaaaagtacaacccaggccctcaggacttcctgcttaaaatgcccggagtgaatgctaaaaattgtaggtctctcatgcatcatgtcaagaacatcgcagaactggctgcactgtctcaggacgaacttaccagcatcctggggaacgccgcaaacgctaagcagctttatgacttcatccatacctctttcgccgaagtcgttagcaagggcaaaggcaaaaaatag

SEQ ID NO: 28577 - DNA, 1071 bp, synthetic construct
  misc_feature 1..1071: note = Description of Artificial Sequence: Synthetic coding sequence
  source 1..1071: mol_type = other DNA
atggcgcctctccttgaatatgagcgacagctggtgctggaactccttgatacagacggactggtcgtctgcgcaaggggccttggggcagaccggcttctttatcactttcttcagctccattgtcacccagcttgcctcgtgctcgtgctaaatactcagccagccgaagaagagtattttattaaccagttgaagattgagggtgttgagcacttacctaggcgtgtcaccaacgaaattactagcaacagtaggtatgaggtgtatacccagggaggcgtgatcttcgcaacctcccggattcttgtcgtagacttcttaacggataggattcccagtgatcttattacaggaattctggtgtacagggcacaccgaattatcgagtcctgtcaggaggcctttattttgcgtctgttcagacagaagaataaacggggattcattaaggcattcactgacaacgcggtagcattcgatactggattctgccacgttgaacgggtgatgaggaatctctttgtcagaaaactctacctctggccccgattccacgttgctgtgaacagtttcctggagcagcacaagccagaagtggttgagatacacgtatcaatgacccctaccatgcttgcgatccagactgctatcttggacatcctgaacgcctgcctgaaggaactgaaatgtcataacccatccctagaggtggaggatctttctctcgaaaacgccatcggtaagcccttcgacaagacaatccgtcactatcttgatccactgtggcatcaattgggcgctaagacaaagagccttgtccaggatcttaagattctccgaacactcctgcagtatctcagccagtatgattgcgtgacctttttgaatcttcttgagtcattaagggcgactgagaaagccttcggccaaaactcaggttggctctttctcgactcctctaccagcatgtttatcaacgctcgggcaagggtttatcacctgccagatgccaaaatgtcaaaaaaggaaaaaataagcgagaagattaaaaaaaaaaagaaaaagtag

SEQ ID NO: 28578 - DNA, 3561 bp, synthetic construct
  misc_feature 1..3561: note = Description of Artificial Sequence: Synthetic coding sequence
  source 1..3561: mol_type = other DNA
atgggcgtgcagggattatggaaactccttgagtgcagcgggaggcaggtatctccagaggcacttgaaggaaagatcctggctgtagatatctcaatctggctaaatcaggcactgaagggagtgagggaccgacatggcaacagcatagaaaaccctcacctgcttaccctgttccatcgtctctgcaaacttcttttttttaggatcaggccaatcttcgtcttcgatggagatgcccctctcctcaaaaagcagactctcgttaagaggcggcagcgtaaggacctggcaagctccgatagtcgtaagaccactgaaaagttgctgaaaaccttcctgaaacggcaggccatcaagacagcttttagaagcaaaagggacgaagccctcccgagcctgacacaagtgcggagggagaatgatctctacgtccttccccctttgcaggaagaagaaaaacactcaagcgaagaggaagatgagaaggagtggcaggagaggatgaatcaaaaacaggctcttcaggaggaattttttcacaatcctcaagctatagacatcgaatccgaggacttttcatctctgccccctgaagtgaagcacgagatcctcactgatatgaaagaatttaccaaaaggagacgtactctattcgaggcaatgcctgaagagagtgacgacttttcccaataccagctgaagggccttttgaagaagaattatctgaatcagcatatcgagcacgtccagaaggaaatgaaccagcagcactccgggcatatcagacgacagtacgaagacgagggaggcttcctgaaagaagtggaatctagacgtgttgtgtcagaggatacgagccattatatcttgatcaaggggatccaagcaaagaccgttgctgaggttgactcagaatcgttgccatcctctagcaagatgcatggaatgtcattcgatgttaagtcttccccatgcgagaagctgaagacggaaaaggaaccggacgctactcccccatcacccaggactctgctagcaatgcaggcagccctacttggctctagttcagaagaggaattggagtctgagaatcggagacaggctaggggacggaatgctccagcagccgtggacgagggctctatctctccacgtacacttagcgctatcaaaagggcactggacgatgatgaagatgtcaaggtatgtgcaggagacgacgtacagaccggcggaccaggtgcagaggagatgcggataaattctagcaccgaaaatagtgacgaaggtctgaaggtcagggatggaaaggggataccttttacagccacactagcctcttcgagcgttaattcagcagaggaacacgtagcatcgacaaacgaaggcagggagcccacagatagtgtaccgaaggagcagatgagtttagttcacgtaggcaccgaagctttcccaatatcagatgagtccatgattaaagacagaaaggacaggctcccgttggaaagcgccgtggtgagacattccgacgcgcctggtctgcccaatgggagggagctcactccagctagccctacatgcacaaattctgtgtcaaaaaacgaaacccacgcagaagtattagagcagcagaatgagctgtgcccatacgagagcaaattcgacagcagccttctgagcagcgatgacgaaacaaaatgcaaaccaaatagtgcctcagaagtgatcggcccagtgagcctgcaagaaacgtcttcaatcgtgtctgtccctagtgaagcagtcgataatgttgagaacgtcgtaagcttcaacgcaaaagagcatgagaactttttggagaccatccaggagcagcagactacagagtcagccggtcaagacctaattagcatcccaaaagcagttgagccgatggagattgactcagaggagagcgagtccgatggttcctttatcgaggttcagtctgtaatcagcgacgaggagctgcaggccgaatttcccgagacaagcaagccaccttcagagcagggcgaggaggagctggtcgggactagagaaggagaggccccagctgaatcagagtcattgttgagagataatagcgaacgcgacgacgttgacggagaacctcaggaggcagaaaaggacgcagaggacagtctgcatgagtggcaagatataaacctggaggaattggagacgctggagagtaacttattggcgcagcagaacagcctgaaagcccagaaacagcaacaggaaagaattgctgctacagttactgggcaaatgttcctggaaagtcaggagcttcttcgtctctttggcatcccatacattcaggccccaatggaggccgaagcccagtgtgccattctggacctgactgatcagacgtctggcaccattactgatgattctgatatttggttgtttggagctaggcacgtgtaccgcaactttttcaacaaaaacaaatttgtggaatattatcagtatgtggattttcataaccagctcggcctcgatcgtaacaaattgataaatctcgcctatttgctgggctctgactacaccgaaggaattcccacagtgggatgcgtcacagctatggaaatactcaacgagtttcccggacacggcctggagccacttctgaaattcagcgagtggtggcatgaggcacagaaaaaccccaagatccgaccaaacccgcatgacacaaaagtcaaaaaaaaacttaggaccctgcagcttacccctggtttccccaatcccgctgtcgctgaagcatatctaaagcctgtggtggatgacagcaagggctcatttctgtgggggaagccggacctggataaaattcgcgagttttgccagagatacttcggatggaacaggactaagacagatgagagccttttccccgtgcttaaacagctggatgcccagcaaacacaattgcggatagactccttcttcagactagcacaacaagaaaaggaggacgccaaaagaataaagagccagcgactcaacagagccgtcacctgtatgcttaggaaagagaaggaagctgcggctagtgagatcgaggcagtcagcgtggccatggagaaggagtttgagctgcttgataaagccaaggggaaaacgcagaagcggggaattactaataccctggaggaaagttcttcgctcaagaggaagcgactttctgacagcaaaggcaagaacacctgtggcggattcttaggagaaacatgcttgagtgaatctagcgatggcagctcgtccgaagacgcggagagttcctccttaatgaacgttcaacgaaggactgccgcaaaagagccaaaaacatccgctagcgatagtcagaacagcgtcaaagaggcccctgtgaagaatgggggtgcaacaacaagttcttcttccgattcagacgatgatggcggaaaggaaaaaatggttttagttacagccagatccgtgttcggcaagaaacggcgaaagctgcgacgggcacggggtcgcaaacgcaagacctag

SEQ ID NO: 28579 - DNA, 1260 bp, synthetic construct
  misc_feature 1..1260: note = Description of Artificial Sequence: Synthetic coding sequence
  source 1..1260: mol_type = other DNA
atgtttcttgagtcacaggagttgctccgattatttggaatcccctatattcaggcaccaatggaggcagaggcccaatgtgcgattctggatctgaccgatcagacgtccggtactataaccgacgacagcgacatctggctgttcggagcaagacacgtgtatcgtaattttttcaacaaaaacaaatttgtggaatactatcagtacgtagactttcacaatcagctgggactggatcgtaataagctcatcaatctggcctacctcctcgggtcagattataccgagggcataccaacagtggggtgtgtaaccgcaatggaaattttaaatgagttccccggacacgggctggagcctcttttaaagtttagcgagtggtggcatgaggcacagaagaatcctaaaataaggcctaacccacacgatactaaggtcaagaaaaagctgcgaactctgcagctcactccaggattcccaaaccctgccgtcgccgaggcataccttaaacccgtcgtggatgattccaaaggatctttcctgtggggcaaacccgatctggacaaaattagagaattttgccaacgatatttcgggtggaacagaactaagaccgatgagtcgctattcccagttctcaagcaattagacgcgcaacagacacagctccgtattgacagcttctttcgactagcacagcaggagaaagaggatgcaaagcgcatcaaatctcagcgactgaatcgagcagtgacctgtatgctccgaaaggagaaggaagccgcagctagcgagattgaggcagtgagcgttgcaatggaaaaggagttcgaactcttggacaaagctaaggggaagactcagaaaagaggaataacgaatacactggaagaatcatcgagtctcaaaagaaagaggctgtccgactcaaagggtaagaatacctgcggaggcttcttgggggagacatgcctatctgaaagcagtgatggaagcagttctgaggatgctgaatcttcttcattaatgaacgtccagaggagaacagccgctaaggaacccaagacgtccgctagcgactcacagaattctgtgaaggaggccccagtgaagaatgggggtgctaccacctcctcaagctcagattctgatgacgacggcggaaaggaaaagatggttctggttacggccagaagcgtgttcggcaagaaaagaaggaagcttcgtagggcccgtggtcgtaagagaaaaacctag

SEQ ID NO: 28580 - DNA, 3057 bp, synthetic construct
  misc_feature 1..3057: note = Description of Artificial Sequence: Synthetic coding sequence
  source 1..3057: mol_type = other DNA
atgaaccagaagcaggccctgcaggaagagtttttccacaacccccaggcaatcgacatcgagagtgaagatttcagcagtctgcccccagaggtcaagcacgaaatcttaaccgacatgaaagaatttacaaaaaggcgcagaacactcttcgaagctatgccggaagagtctgatgatttttcacagtatcagcttaagggcttactcaaaaaaaactatctgaaccaacatatcgaacacgtgcaaaaagagatgaatcagcaacactcaggacacattagaaggcaatacgaagacgagggagggttcctcaaggaggtcgagagtcgacgggttgtctccgaggatacatcacactacattctgatcaagggtatccaggccaagaccgtcgccgaggtcgacagcgaatccttgccctcaagtagcaagatgcatgggatgagcttcgatgtgaagagctctccctgtgagaaactcaagacagaaaaggaaccggacgcaactccaccctcccccagaacactccttgcaatgcaagctgccttgcttggaagcagctctgaagaggaattggaaagtgaaaaccggaggcaagctcgcggaaggaatgcgccagcagcagtcgacgagggctccattagcccacgaacactctctgcgatcaaaagggccctggacgatgatgaggacgtgaaagtatgtgctggggacgacgtgcagactggcggaccaggggctgaagaaatgcggattaatagctctacagaaaactccgatgaagggctgaaggtccgcgacggcaaaggcatccccttcacagccacactggcgagtagcagcgtgaattctgccgaagagcacgtcgcatctacgaatgaggggagagagccgactgacagtgtgcctaaggaacagatgagtcttgtacacgtgggcaccgaggctttcccgataagcgatgagtccatgattaaagacaggaaagaccgactgccattggagagcgctgtggtaaggcattctgatgcgcctggtctgccaaatgggagagagctgacaccggcttctccgacatgcacaaattccgtgagcaaaaatgaaacccacgctgaggtgttggagcagcaaaacgagctctgtccttacgaaagtaagttcgacagtagtctcctttcatctgatgatgagaccaaatgcaagcccaatagtgctagcgaggttattggaccagtgtctcttcaagagaccagctcaattgtctccgtacctagcgaggccgtcgataatgtggaaaatgttgttagtttcaatgcaaaggaacacgagaattttctagagacgattcaggagcaacagaccactgagtcagccggacaagacctgatctcaatcccgaaagcagtagagcccatggagatcgactccgaggagtccgagagtgatggcagttttattgaggtgcagtcagtgatttccgacgaagagctgcaggccgagtttcctgaaacttctaagcctccctctgagcagggtgaagaagagctggtgggaacaagagagggcgaagccccagccgagtcagagtcactccttagagataatagtgaacgagacgacgtagacggcgagccgcaggaggccgagaaggatgccgaagatagcctccatgagtggcaagacattaacctcgaggagctagagaccctggagtccaatctgttggcgcagcagaactcactaaaagctcaaaaacagcaacaggagagaatcgcggcaacagtcactggccagatgtttttggaatctcaggaattgctccgcttgttcggcattccctacatccaggcacccatggaggctgaagcccagtgcgccattctggatttaactgaccagactagtggcaccattaccgacgattcggacatctggctgtttggggcaaggcatgtataccgtaacttttttaataaaaataaattcgtagaatactatcaatatgtagactttcacaatcagctcggtcttgataggaataaactcatcaatctggcttatttactgggctcagactacacagaggggattccgacagtgggctgcgtgaccgccatggagattttaaacgagtttcccggtcacgggcttgagccacttctgaagtttagcgaatggtggcacgaggcgcagaagaaccctaagattcggccaaacccacacgatacaaaggtgaagaagaaactccgcaccctgcagctcacacccggattccccaaccctgctgtggccgaagcctatctgaaaccagtggtggacgactctaagggctccttcctgtggggaaaaccggacctggacaagatcagagagttttgccagaggtacttcgggtggaataggacaaaaactgatgagtctctctttccggtcctcaaacagctggacgctcagcagactcagttgagaattgactcctttttccgactagcccaacaggagaaagaggatgcaaagagaatcaagtcccagcgcctcaacagagctgtcacctgcatgctaagaaaagagaaggaggctgcagcatcggaaatagaagccgtgagcgtcgcaatggagaaagagtttgaactgctggacaaggcaaaaggaaagactcagaaacgaggcattacgaacacattagaggagtcctcgagcctgaagaggaaacgcctaagcgattcaaaagggaagaatacatgcgggggtttcctgggagagacgtgtctttcagaatcatctgacggttcttcctcagaggacgccgagagctctagcctcatgaatgtgcaaagaagaacagcagccaaggaaccaaagacttccgccagcgactcacagaacagcgtcaaggaggcccctgttaagaatggcggagccacgacctcctcttccagcgactccgatgatgatggcggtaaggagaagatggtcctggtgacagctagatcagtgttcggaaaaaagcggaggaaactgcgacgggctcgaggccgaaagcgaaagacttag

SEQ ID NO: 28581 - DNA, 4836 bp, synthetic construct
  misc_feature 1..4836: note = Description of Artificial Sequence: Synthetic coding sequence
  source 1..4836: mol_type = other DNA
caaggggcagtcaagtcgttctgtactagcgcttcaggtgcccctcttggcccaaaaggcgacggccattacccctggtcctgtcccgtgactcacaccagagaaaaaatctacgcaatctgctcagactatgcattcctgaaccaggctactagcatctataaaactccaaatcccagcagatccccctgtctgcctgactctacttctctgagcgcgggaaataattcttcacgctacattggcattccaacctccacctccgagatcatctataatgaggagaatagtctcgagaacctgagtaactctctcggtaagctgccactggcctgggagatcgataaaagcgaattcgatggtgtcaccaccaacagcaagcacaaatctggcaacgccaaaaagcaggtctcgaagaggaaaacgtccgacaaaaaaggcaggtatcagaaggaatgtccccaacattcccctttggaggacattaagcagcggaaggtcctggatctgcgacggtggtactgcatttccagacctcagtacaagacaagttgcggcatctcctccctgatttcatgctggaacttcctgtattcaaccatgggcgctggcaatctgccccctatcacccaggaagaagccctgcacattctggggtttcagcctcccttcgaggacattagatttgggccattcacaggtaatacaaccctgatgagatggttccggcagatcaatgaccatttccacgttaaaggctgtagttacgtcttgtacaagccccacggaaagaataagacagccggtgagactgcaagcggagccctaagcaagttgaccagaggacttaaagacgaatccctcgcatatatctatcactgccaaaatcattatttctgtccaattggatttgaggcgacgccagtgaaggctaacaaagccttcagtcggggacccttaagtccgcaagaagtcgaatactggattcttattggcgaatcgtcacggaaacatccagctattcactgcaaaaagtgggctgacattgtgacagacctcaatacacaaaaccccgagtacttagatatacgacatctggaaagagggttgcagtacaggaaaacgaaaaaagtaggcggtaacttgcactgtattatcgcctttcaacggttaaactggcagagatttggactgtggaatttccccttcgggactataagacaggagtctcagccccctacgcacgctcaaggcatcgccaagtctgagtccgaggataacatttccaaaaaacagcatggccgactcggcagaagcttctctgcctcttttcatcaagactcagcctggaagaaaatgtctaatatcagcatttggttaaaccaagccctaaaaggcgtccgggatagacatggtaattctattgaaaatccccacctcttaaccctgttccatcgattgtgtaaactgttgtttttcagaatccgccctattttcgtgtttgatggcgatgcgcctctcctcaaaaagcagactttggtcaagcggagacagcggaaagacttggcttcgagcgacagcagaaaaaccacggaaaaactcctgaaaactttccttaaacggcaagccatcaaaaccgcatttagaagcaagagggatgaggctctccctagcctcacccaggtgcggagagaaaacgatctttatgtcctgccaccgttgcaggaggaggaaaaacactcttctgaggaggaggacgagaaagagtggcaggagagaatgaatcagaaacaggcactacaggaggagttcttccacaacccccaggccattgatatcgagagcgaggatttcagcagcctcccccctgaggtcaaacacgaaatcttgacagatatgaaggagttcacgaagagacgcaggacactctttgaagccatgcccgaagagtccgatgatttctcacagtatcagctcaagggcttgctcaagaaaaattacttgaaccagcatatagagcatgtgcaaaaagagatgaaccagcagcacagcggacacatacgacgacagtacgaagatgaggggggatttctgaaagaggtggagtcccgccgagtagtgtctgaagacacaagccattacatcttgatcaaggggattcaggccaaaactgtggccgaagtggactcggaaagcctgcctagcagctccaaaatgcatggaatgagttttgacgttaagagtagcccgtgcgagaaactcaaaacagagaaagaaccagacgccactcccccttccccacggaccctgctcgccatgcaagctgcacttctgggttcaagcagcgaggaagaactggaatcagagaaccgacgccaggctagaggacgaaacgcgcctgccgcagtggacgaaggcagtattagtccacgaacactgagcgccattaagcgggctcttgacgacgacgaggatgtgaaagtttgcgccggagatgacgttcagactggaggtcccggtgctgaggagatgcgcatcaactcttccacagagaattccgacgagggcctcaaagttagagatggaaaaggaattccctttaccgccactttggcaagtagcagtgtcaacagtgccgaggaacacgtggccagcactaacgagggccgagaaccgaccgatagtgttccaaaggagcaaatgagcctggttcatgttggcaccgaggcttttccaatcagcgatgagagtatgattaaagaccggaaagaccgcttaccactggaatccgccgttgttcggcacagtgacgcccctggccttcctaatggtagagagctcaccccggcatccccgacatgcaccaatagcgtgtctaagaatgagacacatgccgaggtactggaacaacaaaacgagttgtgtccctatgagtctaagttcgatagctcactgctgtcctctgatgatgagactaaatgtaaaccaaattctgccagcgaggtcattggtcccgtttcactccaagaaacatcatctatagtgtccgtcccatctgaggctgtcgataacgtggaaaatgtagtcagcttcaacgcgaaagaacatgagaactttcttgaaaccattcaagagcagcagacgaccgaatccgccggacaagatttaatcagtatacccaaggccgttgagcccatggagatagattcggaggaatcggagtctgatgggtctttcatcgaagtgcagtcagtgattagtgatgaggagctccaggccgagtttccagaaacctctaaaccacccagcgagcagggcgaagaggagcttgtgggtacgagagaaggagaagccccagctgaaagcgagtcactcctaagagacaacagtgaaagagacgacgtggatggtgagccccaggaagcggagaaagatgcggaagatagtctgcatgaatggcaggacattaacttggaggaattagagactctagaatctaacctgctcgctcagcaaaacagtttgaaagcccagaaacagcagcaggagcgaatcgctgctacagtgacaggacaaatgttcctggaatcccaggagttgctccggctctttggcattccttacattcaagctcctatggaagcggaggcacagtgtgctatccttgacctaaccgaccagaccagtggaacaataacagatgactctgatatttggttattcggtgccagacacgtgtatcggaactttttcaataagaacaagtttgttgaatactatcagtacgtcgactttcataatcagctcggactcgatagaaacaagctaattaatctggcctatttgctgggctcagactataccgaaggaattcctacagtcggctgtgttacagcaatggagatactgaacgagttcccgggtcatgggctcgagcccctgctgaaattctctgaatggtggcacgaggcgcagaagaaccccaaaatccgcccaaatccacacgacactaaagtaaaaaaaaaactgcggaccctgcaattaactccaggcttcccgaatccagccgttgcagaggcatatctgaagcctgttgtggacgactcaaaaggttcattcctctgggggaaaccagatctcgacaaaatccgtgagttttgccagaggtactttggctggaaccggactaagaccgacgaaagtctgttccccgtgctgaagcagctggacgctcagcagactcagctgagaatcgactcatttttccgtctcgctcaacaagagaaagaagacgccaaaaggattaagtcccaacggctgaatcgggctgtgacttgtatgctgagaaaggaaaaagaggccgcagcaagcgaaatagaggccgtcagcgtggcaatggagaaggagttcgaactgttggacaaggccaagggcaaaactcagaaacggggaatcacaaatactttagaagagagcagctcccttaagagaaaacgactaagcgactccaaaggaaagaacacttgcggcggatttctgggcgagacctgcttgagcgagtcttctgatggctcctcatccgaagacgccgagagctcgagcctaatgaacgtgcagcggaggactgcagccaaggagccaaaaacctccgcctctgactctcagaattcggtaaaagaagcccctgtgaagaacggcggtgctacaacaagtagcagctctgacagcgacgacgatggcggaaaagagaagatggtgcttgtgaccgccagatccgtctttggtaaaaagcggaggaagctgaggagagcaaggggccgaaaacgaaaaacatag

SEQ ID NO: 28582 - DNA, 699 bp, synthetic construct
  misc_feature 1..699: note = Description of Artificial Sequence: Synthetic coding sequence
  source 1..699: mol_type = other DNA
atgggtgtccagggcctgtggaagttgctcgagtgcagcggaagacaggtgagccccgaagcactcgagggaaaaatcctcgctgttgatatttccatctggttgaaccaagctctaaagggagtgagggacaggcatggcaattctatcgaaaacccccatctgctaactcttttccatagattgtgcaagctgctattctttcgaattagaccaatctttgtcttcgacggtgacgcacccctcctgaaaaaacagacattggttaagcgacgtcagcggaaggacctcgcctcctctgattccaggaaaactacagagaagctgctcaaaactttcttgaagaggcaggccataaagacagcctttcggtcaaagcgcgacgaggctctgccctcccttacacaggtgagaagagagaacgatctgtacgttctgccacctttgcaagaagaggaaaaacactcctccgaagaggaagacgagaaagaatggcaggaaagaatgaatcagaagcaggccttacaagaggaattcttccacaatcctcaggcgatagacatcgagtcggaggatttcagcagcttgcctccggaggtcaagcatgaaatattgaccgatatgaaagagtttacaaagaggcgccgtaccctctttgaggcaatgcccgaggtgtacctgccactccttcaaccatag

SEQ ID NO: 28583 - DNA, 4482 bp, synthetic construct
  misc_feature 1..4482: note = Description of Artificial Sequence: Synthetic coding sequence
  source 1..4482: mol_type = other DNA
atgccaaacgaaggcatcccccattcttcgcaaactcaggaacaggattgcctccagagccaacccgtgagcaataacgaagagatggctattaagcaggaatctggaggggatggagaggtggaggaatacctctcattccgatctgtgggtgatgggcttagcacttcagcagtgggatgcgcgtcagctgcaccgcgaaggggccctgcgctcttacatatagatagacaccaaattcaggcggttgagcccagtgctcaagcgcttgagctgcagggattgggagtggacgtgtatgaccaggatgtgctcgaacaaggggtcctgcagcaggtggataacgctatacatgaggcgtctcgggcatcccagctggtggacgtggagaaagagtatcgttcagtcctggatgatctgacgagctgcaccacctcactgcgtcagattaataaaataatcgaacagctgtcgcctcaagccgctacaagccgcgacatcaaccggaagttagactcagttaagaggcagaagtataacaaagaacaacagttgaagaaaattacagcgaaacaaaagcatctgcaagccattctcgggggagcagaagtgaagatcgagctggaccacgcctccctggaagaagatgcagagccaggacccagtagtctggggagtatgctcatgcccgtgcaggagacagcatgggaagagctcatccgcactggccagatgacaccattcggcactcaaattcctcagaaacaggagaagaaaccacgcaagatcatgctgaatgaggcttctggctttgaaaagtacctcgctgatcaggctaaactctcctttgaacggaagaagcagggatgcaataagcgagcagctcggaaggcacccgctcccgtgactccacctgccccagttcagaataaaaacaagcccaataaaaaagctagagtcctcagcaagaaggaggagaggttaaaaaaacacatcaaaaaactgcaaaaacgtgcactgcaatttcaaggaaaagttgggctccccaaggcacgccgtccgtgggagtctgatatgcggcctgaagctgagggcgattctgaaggggaggaaagtgagtatttcccaacagaggaggaggaggaggaggaggacgacgaggttgagggcgcagaagcagatctgtctggggacggtacggattacgagcttaagcctttgcctaaaggcggtaagagacagaaaaaggtgccagtgcaagaaatcgatgatgatttctttcctagctctggcgaggaggctgaggctgcaagcgtgggcgaaggtggtggcggagggaggaaagtgggacgctacagagacgacggcgacgaagattactataagcaacgcctgaggagatggaacaagcttcggcttcaggataaggagaagcggctgaaattggaggatgacagcgaagaatctgatgccgaatttgatgagggatttaaggtgccaggattcctgttcaagaaattattcaagtaccagcagacaggcgtgaggtggctgtgggagcttcactgtcagcaggccggtggtatcctaggcgatgagatgggtttggggaaaacaattcaaatcatcgctttcctagctggcctgtcctacagcaagataaggacccgcggatcgaattatagatttgaggggcttggacccactgtcatcgtttgtccaactactgtcatgcatcagtgggtgaaggaattccacacgtggtggccgcctttcagggttgccattctgcatgagactggcagctacacccacaaaaaggaaaagctgatccgcgacgtggcgcactgtcatggaatcttaatcacttcatacagctatattcgcttaatgcaggacgacatatcgcgctacgactggcactatgtgatccttgacgaggggcacaaaatccgcaacccaaatgccgcagtgacactggcctgtaaacaattccggaccccacaccggatcattctctctgggtccccaatgcagaataatctgcgagaattgtggtctctcttcgacttcatctttcctggaaagctcgggacactgcctgtcttcatggagcaatttagcgtgccgatcactatgggtggttactctaatgcttcacctgtacaggtgaaaacagcgtataagtgcgcatgcgtgctgcgggatacaattaacccctacctcttgagaaggatgaaatccgatgtgaagatgtcattatcacttcccgataaaaatgagcaggtgttgttttgtcgacttacggacgaacagcataaagtgtatcagaatttcgtggatagtaaggaagtttatagaattttaaatggagagatgcagattttttcaggcctaattgctctgcggaaaatctgcaaccatcctgacctgttcagtgggggacccaaaaacctcaaaggccttcctgatgacgaactcgaagaggatcaattcgggtattggaagagaagtggtaagatgatcgttgtggagtctttgttaaaaatttggcacaaacagggccagagagtattgcttttttcacaaagtaggcagatgctcgatatcctcgaagtgttcctcagggcccaaaagtacacctacctcaaaatggacggcacgacgactattgccagtcggcagcctctcatcacccgctacaacgaagacaccagtatcttcgtctttctgttaacgactagagtaggcggattgggggtgaacctgactggggcaaacagagtggtgatttatgatcctgattggaatcccagtaccgatacccaagcccgtgagcgggcttggaggatcggtcagaagaagcaagtgaccgtttataggctgttaaccgctggcaccatcgaagaaaaaatataccatcggcaaatcttcaagcaatttctcactaacagagtgcttaaagacccaaaacaaagaaggtttttcaaatctaacgatctgtatgagctctttacactaacctcccctgatgcctcacagtcgactgagacctccgccatcttcgccggtaccggctcagacgtacagactcccaagtgccatcttaaacggcgtattcagccagctttcggcgcagatcacgacgtgccaaagaggaagaaatttcctgcatctaatatcagcgtgaacgatgcaacaagctctgaagagaagagtgaagccaagggggctgaagtgaacgccgtgacttccaaccgatctgaccctttgaaggacgacccgcacatgagctccaacgttacttcaaatgatagactgggggaagagactaacgctgtgtccggaccagaagagctctcagtcatctctggcaacggtgaatgctctaactcgtcgggcaccggcaaaaccagtatgccatcgggcgatgaatctattgatgaaaagctcggtctctcctacaagagggaacgcccatcccaggcccagaccgaggccttttgggagaacaaacagatggagaacaatttttataagcataagtccaagacaaagcaccacagcgttgccgaagaggaaaccttagagaaacacctgcgccctaaacagaaaccaaagaattctaaacactgtcgagatgccaagtttgaagggacacggattcctcatctggtgaagaagcgcagatatcagaagcaggactccgaaaataaatcagaagctaaagaacagtccaacgacgactacgtactagagaaactcttcaagaagtctgtgggggttcacagtgtaatgaaacatgatgcgatcatggacggggcatcccccgattacgtcctggtggaggcggaagctaatcgcgtggcccaagacgcgctcaaggctctgaggctgagtcgccagaggtgtctcggggctgtgtccggtgttcctacctggactggccaccggggtatttccggagccccagcaggaaaaaagagtcgattcgggaagaagaggaatagcaatttttcggtgcagcacccaagctctacctccccaacggaaaagtgccaggatgggatcatgaaaaaggaggggaaggacaatgtgccagagcacttcagtggacgcgctgaagatgcagatagctccagcggcccactagcaagctcttccttgttggctaagatgcgcgctcgaaatcacttgatccttccggagagactcgaatctgagagcggtcaccttcaggaggccagtgctctgctgcctactactgaacatgatgatttactggtcgaaatgagaaacttcatcgcctttcaagctcacactgatggtcaggcctccacgcgtgagatcttgcaagaatttgagtctaagcttagtgctagccaaagctgtgtctttcgagaactcctgcggaacctatgcaccttccatcgcaccagcggcggagaaggtatctggaagttgaagcctgagtactgctag

SEQ ID NO: 28584 - DNA, 2613 bp, synthetic construct
  misc_feature 1..2613: note = Description of Artificial Sequence: Synthetic coding sequence
  source 1..2613: mol_type = other DNA
cagcagcccttccacagacacctgctgatgacgacagctttacactcggaaaagctgatccgggatgtggcccactgccatggcatacttatcacctcatactcctatatcaggctcatgcaggacgatatcagtcggtacgactggcactatgtcatcctggacgaaggacacaagatacggaaccccaatgcggctgtcactttggcttgtaaacaatttagaacacctcatcggatcatcctgagtggtagtccaatgcaaaataatcttcgcgagttatggagccttttcgacttcatcttccccggtaaactgggcaccctacccgtgtttatggagcagttcagcgttccgattaccatgggaggctactccaacgcttcccctgtgcaggtcaaaacagcttacaagtgcgcctgtgtgctgcgagataccatcaacccttacctcctgagacgaatgaaatccgatgtcaagatgagtctgtccctgcccgacaaaaatgaacaaatttttagcggactgatcgccctgcggaagatttgtaaccatcccgacctcttctcaggtggcccaaagaacctgaaaggactccccgatgatgaactcgaagaggaccagtttggctactggaagagatccgggaagatgatcgtggtcgaaagcctgttgaagatctggcataagcaggggcagcgcgtcctcttgttttctcagagcaggcagatgttggacatcctggaggtcttcctgagagcccagaaatatacttacttgaaaatggatggcacgactactatagcaagtaggcagccactaatcacaagatataatgaggataccagcattttcgtcttccttctgaccacacgtgtcggcggtctgggcgtgaacttgacgggggctaacagggtcgtaatatacgaccctgactggaacccatcaacagatacccaggcacgcgaaagagcatggcgaattgggcaaaaaaaacaagtgaccgtgtataggctccttaccgcaggtaccatcgaggaaaagatctaccatcgacaaatcttcaaacagtttctaacgaaccgggtgctaaaggaccccaagcagagacgattcttcaagtctaatgatctctatgagctgtttacattaaccagtccggacgcatcccagtccacagaaacatcagctatcttcgctggaacggggagcgatgttcagacaccgaaatgtcacttaaagaggaggatccagcctgcattcggggcagatcacgatgtgcctaagagaaaaaagttccccgctagtaacatctccgtcaatgatgccacaagctccgaagagaaatccgaagccaaaggcgctgaagtgaatgctgtaacttctaacagaagcgatcccttgaaggatgacccacatatgtcttcaaatgtcacctctaacgacagactgggagaggagaccaatgctgtctccggcccagaagagctgtcagttatttcaggcaacggggagtgctccaacagcagcgggactggaaaaacaagtatgccaagtggggacgaaagcattgacgagaagctgggcctgagttacaaaagagaacgcccatctcaggcccagaccgaggcattctgggagaataaacaaatggagaataatttctacaagcataagtctaagactaagcatcacagtgtggccgaagaagaaactttggaaaagcatcttcgcccaaagcagaaaccgaagaattccaagcactgtcgggacgccaaatttgagggaacaagaatcccccacctagtgaaaaagcgtcgataccagaagcaggattccgagaacaaatcagaagcaaaggagcaatcaaacgacgattacgttctggaaaaacttttcaagaaatctgtgggagtgcattctgtcatgaaacatgacgccatcatggacggggcttcaccagactacgtgttagtggaagccgaagcgaacagggtggcgcaagacgccctgaaggcgctccgattaagtaggcagaggtgcctgggcgcagtttccggggttcctacctggacagggcatcggggtatttcaggggctccagccggaaagaaatctcggttcggaaaaaagagaaactctaattttagcgtccagcatcccagctccaccagcccaaccgaaaagtgtcaggacgggatcatgaaaaaggaaggtaaagataatgtcccagaacacttttccggtcgcgctgaggacgcagattcatcaagcgggccattggccagttcttccctgctggccaaaatgagagctagaaaccacttgatccttcccgaacggttggagagtgaatcaggtcatcttcaggaggcatcagcacttttgcccacaacggaacacgacgacctgctggtcgagatgcgaaactttattgctttccaggcgcatacagatgggcaagccagcaccagggaaatactccaagagtttgaatctaagctgagtgctagccaatcttgcgtgttcagggagttactgcggaacctgtgtacgttccaccgcacaagcggcggagaagggatttggaaactgaagccagaatactgttag

SEQ ID NO: 28585 - DNA, 540 bp, synthetic construct
  misc_feature 1..540: note = Description of Artificial Sequence: Synthetic coding sequence
  source 1..540: mol_type = other DNA
atgcctaacgagggcatcccccattcatcacaaacgcaggaacaagactgtctccagtctcaacctgtgtcgaataatgaggagatggccataaagcaggaatcgggcggtgatggcgaagtcgaggaatatttgagcttcagaagtgtgggggatggcttgtctaccagcgccgtcgggtgcgcttctgccgctccccgacgaggccctgcactgctccacattgatcgccaccaaatccaagcggttgagccatccgcccaagcactggaactccagggcctgggcgtggatgtctacgaccaggacgtcctggaacagggcgtcctgcagcaggtggataatgccatccacgaggcttctcgagcatcccaactggttgatgtcgaaaaagagtaccggtcggtcctggacgacttgacaagctgtacgacttcactgcgtcaaatcaataaaatcattgagcagctcagcccacaagccgctacatcacgcgatattaaccggaaactggattccgtcaagcgccagaagtattag

SEQ ID NO: 28586 - DNA, 318 bp, synthetic construct
  misc_feature 1..318: note = Description of Artificial Sequence: Synthetic coding sequence
  source 1..318: mol_type = other DNA
atgtccctttcccttcccgacaaaaacgaacaggtgctgttctgcaggcttaccgacgaacagcacaaggtgtaccagaactttgtagattcaaaagaagtgtacagaattcttaacggtgaaatgcaagaggtcttgcagagcttcacgagcattcacctgcacgagagccccctaaatttctttcggtcctttcaggtacgcggatcccggagccattaccccggaaaaggcatgcagacaacactaggtatcgtgaattttttagtggtaacattgaaaagaaaaaagaggaatagattttccccagacctgtag

SEQ ID NO: 28587 - DNA, 2592 bp, synthetic construct
  misc_feature 1..2592: note = Description of Artificial Sequence: Synthetic coding sequence
  source 1..2592: mol_type = other DNA
atgcaggatgacatctcccgctacgattggcactacgtaattctggacgagggccacaaaatacggaaccctaatgccgcagtgacactagcctgtaagcagtttcggaccccacaccggattatactctcaggtagccccatgcaaaataatcttcgggaactttggtcactcttcgatttcatctttccaggcaagctgggaaccctgccagtgttcatggagcagttttcggtgcctatcactatggggggttatagtaatgccagccctgtgcaagtgaaaaccgcctacaagtgtgcgtgcgtgctacgagatactattaacccatacctactgagaaggatgaagagcgatgttaagatgtctctgagtctgcctgataagaacgagcaggtactcttctgtcgcttgactgacgagcagcacaaagtgtatcagaatttcgtcgactcaaaggaggtgtacagaatactaaacggcgagatgcaaatatttagtggactgattgcgctccggaagatctgcaaccatcctgacttattcagtggagggcctaaaaatctcaagggtctgcccgacgacgaactcgaagaagaccagttcggatattggaagagatcgggcaaaatgatcgtggtggagagtctgctgaagatttggcataagcagggccagcgagtgctgctcttttcccaaagccggcaaatgttagatatcttggaggtcttcctgagggcccagaagtatacctatcttaaaatggatgggaccactacaatcgcctctaggcagcccttgatcactcgctacaacgaggacactagtatcttcgtgtttttactgaccacaagggtcggcggactgggtgtgaacctgaccggtgctaaccgagttgtaatttacgatcctgattggaaccctagcacagacacgcaagcgcgtgagcgagcctggcggatcggacagaaaaaacaagtaacggtttaccggctgctcacagccggaaccattgaggaaaagatctaccacaggcaaatcttcaagcagttcttgacaaatagagtgctcaaggacccaaaacaacgcagattctttaagagcaacgacctgtacgaattgttcactctgacatcaccagatgcgtctcagtctaccgaaacgagtgccatttttgccggtactggctctgacgtgcagaccccaaagtgccacctcaaacgacgcatacagccagccttcggggctgatcacgatgtgcctaaacggaagaagtttccagccagcaacatctctgttaatgacgccacctcctcggaggagaagtctgaggctaagggcgctgaagttaatgccgtgacctctaaccgaagtgaccctctgaaagacgatcctcacatgagtagtaacgttacatcaaacgataggttgggggaggaaactaacgccgtatccggacccgaagagctatcagtcatttccgggaacggagagtgcagcaattccagcggcactgggaaaacaagtatgcccagcggggatgagtccatcgacgaaaaactgggcctgagttataagcgcgagaggccatcacaggcccaaactgaggcattttgggagaacaaacaaatggaaaataatttttacaagcataagagcaagacaaagcatcattcggtggcagaggaggagacattagagaaacatctgagaccaaagcagaagccaaagaactccaaacactgccgggacgctaagttcgagggaacacgaattccccacctcgtaaaaaaaaggcggtatcagaagcaggattcagaaaacaaaagcgaagctaaggagcagagcaatgacgactacgtccttgagaagctgtttaaaaaatctgtgggggttcactctgttatgaagcacgacgcgatcatggatggagcctctcccgactacgtgctcgtagaagctgaagctaatagggtagcacaggatgcacttaaggctctgaggctctctcgacagagatgtctgggggcagtgagcggcgtccctacctggaccgggcaccggggaatttcaggagctcctgccggtaaaaagagcaggtttggaaagaaacgtaactctaacttcagcgtacaacatccatcatccacaagccccactgaaaagtgccaagacggcattatgaaaaaggaaggtaaggacaatgtccccgaacacttctcaggaagggccgaggacgccgactccagttctgggcctctcgcctcttccagccttctcgccaaaatgcgcgctaggaatcatttaattttacctgaacgtctggaatcagaaagtgggcatctgcaggaagcttccgcgctccttcccaccacagagcatgatgatctactggtcgagatgaggaattttatcgcatttcaggcacacacagacgggcaagcgtctaccagagaaatcctgcaagaatttgagagtaaattgtccgccagccagtcctgtgtgtttagggagctgcttcgcaacctgtgcaccttccatagaacatcagggggtgaaggcatttggaagctgaagcccgagtattgctag

SEQ ID NO: 28588 - DNA, 1191 bp, synthetic construct
  misc_feature 1..1191: note = Description of Artificial Sequence: Synthetic coding sequence
  source 1..1191: mol_type = other DNA
atgctcggtttcctgtcggcgagacagacaggcttagaggaccctttaagactgaggcgcgctgaaagcacaaggagagtcttggggctggagctgaataaggatagagatgtggaacggatccacggcggaggaattaataccctggacatcgaacccgttgaaggtcgttatatgttgtcgggaggatcggatggtgttattgtcctgtacgaccttgagaacagctcccgccaatcatattatacctgtaaagcagtatgctctattggacgtgaccacccagacgtgcatcgttatagcgttgagactgtacagtggtacccccacgacacaggaatgttcacatccagcagcttcgacaaaaccctgaaagtttgggataccaacacactccagacagccgacgtttttaattttgaggagacagtgtatagccaccatatgtcacctgtctctacaaaacactgtctggtggcagtgggtacacggggaccgaaagtacagctctgcgatctaaaatccgggtcctgtagccatatattacaggggcatagacaggagatcttagccgtgtcctggtcccctcgatacgactacatcctggcaacagcctccgccgactcaagagtcaagctatgggacgttaggcgcgcaagtggctgcctgatcactctggaccagcacaatggcaaaaagtctcaggctgtcgagtcggccaataccgctcataatggtaaagtgaacggtctttgttttactagtgatgggctccacttgttaacagtgggtacagataaccgcatgcggttgtggaacagtagtaacggtgagaatactctggtgaattatggaaaggtatgtaataattccaaaaagggcctgaagtttactgtcagttgcggatgctcttcagaattcgtatttgtgccttacgggtcgacaatagccgtgtatacagtctattcgggggagcagattactatgctgaaaggccattataaaactgtggattgttgtgtgttccagtcaaatttccaggagctttacagcggctctcgcgattgtaatatcctcgcttgggtccccagcttgtacgaaccggtgccggatgacgacgaaaccactaccaaatcacagcttaatcctgcatttgaggacgcctggtccagctccgacgaagagggatag

SEQ ID NO: 28589 - DNA, 1017 bp, synthetic construct
  misc_feature 1..1017: note = Description of Artificial Sequence: Synthetic coding sequence
  source 1..1017: mol_type = other DNA
atgctgtccggaggcagcgatggtgtcatagtcctttatgatttggagaatagttcccgccagagttactacacttgtaaagcagtgtgctccatcggtcgcgatcatcctgatgtgcacaggtatagcgtcgaaacggtgcaatggtatccccatgacacaggcatgtttacaagcagcagtttcgataagaccctgaaagtgtgggacactaacaccctgcagaccgctgatgtgttcaatttcgaagaaacggtatactcgcatcatatgagcccagtgagcactaagcactgcctcgtggcggttgggacccgcggtccaaaggtccagttgtgtgatctcaaatcggggagttgttcccacattttacagggacatagacaagaaatacttgccgtgtcctggagtccaagatatgactatatcttggccacggcctcagctgatagccgggtgaaactctgggacgtgaggagagcgagtggatgtctgatcactcttgatcagcacaatggcaaaaaaagtcaggcggttgagtcggcgaacacagcgcataacggcaaagtgaatggcctttgttttacaagtgatggcctgcaccttctgactgtgggtacagataatagaatgagactgtggaacagctctaacggtgaaaacacactggtgaattacgggaaggtctgtaataactccaagaaaggccttaagttcacggtctcttgcggttgtagttctgagtttgtttttgttccttatggaagcaccatcgctgtgtatactgtgtattctggtgaacaaatcactatgcttaagggtcactacaagaccgtggactgttgtgtgttccagtctaatttccaggaattgtattccgggagcagggattgcaacattcttgcttgggtgccgtcgctgtacgaaccagttcccgatgacgacgagacaaccacaaagagtcagctgaacccagcatttgaagacgcttggtcctctagcgatgaggaaggctag

SEQ ID NO: 28590 - DNA, 1188 bp, synthetic construct
  misc_feature 1..1188: note = Description of Artificial Sequence: Synthetic coding sequence
  source 1..1188: mol_type = other DNA
atggcgacgagctcggcccctgcaggcgtccgaacaagatacgccggtgtgtttgtgcgtacacctaacgggttcggagggccttcttctccttcagagagcagggtgaatactgaatcattcggaactggcattaacaccctcgatatcgagccagtagagggcagatacatgttatccgggggatcagacggcgtcatagtgctgtacgatctcgaaaattcaagccgccaaagctattacacgtgcaaagcagtctgctcaataggcagggatcatccggacgtccaccgctactcagtggaaacagtgcaatggtatccacacgacacgggaatgtttactagtagctcttttgataaaaccctgaaagtgtgggacaccaataccctgcaaaccgccgatgtttttaactttgaggagactgtctacagtcatcatatgtctcctgtgtcaactaagcactgtctggtggcagttgggacacggggtcccaaggtgcagttgtgcgacctgaagtcaggctcctgtagtcacattctgcagggccataggcaggaaattctggcagtgagctggagtcccaggtacgattacatcctggccaccgcatccgccgacagcagagtcaagctctgggatgtccggagagcatccgggtgcttgataaccctggatcagcacaatggcaaaaagagccaagcggtcgagtccgctaatacggcccataacggtaaagtaaacggactgtgcttcaccagcgacggcctgcacctcctcacagtcggaaccgacaatcgcatgcggctgtggaacagcagtaatggagaaaacaccctggttaactatggtaaggtgtgcaataatagcaaaaagggactgaaatttacagtgagctgtggttgctcctccgaattcgtgtttgtcccttatggttcaactatcgctgtgtataccgtgtacagtggcgaacagatcacgatgcttaaaggccactataaaacggtcgactgttgtgtgttccagtctaactttcaggagctgtacagtggaagcagggattgcaatatcctggcgtgggtgccctctctttacgagccggtgccggatgacgacgaaactacaacaaagtcccaacttaatccagccttcgaggacgcctggtccagttcagacgaggaggggtag

SEQ ID NO: 28591 - DNA, 732 bp, synthetic construct
  misc_feature 1..732: note = Description of Artificial Sequence: Synthetic coding sequence
  source 1..732: mol_type = other DNA
atgggctacaagtacatcaccatcggtaccagaggccctaaggtacaactgtgcgacctcaaatccggctcctgtagccatatactgcagggacatagacaagagatcctggcagtatcttggagccccaggtacgattacatcctggcgactgcaagcgctgatagcagagtcaaactctgggatgtccgtcgcgcatctgggtgcctcatcactcttgatcagcacaatggtaaaaagagccaggctgtggagtcagcaaacaccgcccataatggcaaggttaacgggttatgttttacaagtgacggattgcacctcctgacggtcggcaccgataatcgcatgcgactgtggaacagctccaacggtgagaacacactcgtaaattacggcaaagtctgtaacaatagcaagaaggggctgaagtttacagtgtcttgtggatgcagctctgagtttgttttcgtcccatacggaagcactatcgctgtctacacggtttatagtggtgagcagatcacaatgttgaaaggccactacaaaacagtggactgttgcgtttttcagagcaattttcaggagctttactccggctcccgtgattgcaacattctcgcttgggtgccgtctctatacgagcctgttcctgacgacgacgaaacaacaacgaagtcccagttgaacccagccttcgaagatgcctggtcaagttccgacgaggagggctag

SEQ ID NO: 28592 - DNA, 2541 bp, synthetic construct
  misc_feature 1..2541: note = Description of Artificial Sequence: Synthetic coding sequence
  source 1..2541: mol_type = other DNA
atgggaatacaaggcctcctccagttcattaaagaggcatcagagccaattcacgtgcgtaaatacaagggacaggtggtcgccgtggacacatattgttggctgcacaaaggggctattgcatgtgcagagaaactggccaagggcgagcctactgatcgctatgtcggcttctgtatgaagtttgtcaatatgctgctttcccatgggatcaaacccattctagtctttgacgggtgcaccctgccgtccaagaaggaagtcgaacggagcaggagagaacgcaggcaggccaacttactaaagggcaagcagctcctacgcgagggtaaagtgagtgaggccagggaatgttttactaggagcattaatataactcacgcaatggctcataaagtcattaaggccgcaaggagtcagggcgtcgactgcctggtggcaccttacgaggccgacgcacagctcgcgtacctaaacaaggccggtattgtgcaggcaataattaccgaggattccgatctgttggcttttggttgtaaaaaggtgattcttaaaatggatcagttcggcaacggtctggagattgatcaggcaagactgggtatgtgccggcaactgggagatgtgtttacagaagagaaattcaggtatatgtgcatcctttctggatgcgattatttatcttctcttcgaggtattgggcttgcaaaggcatgtaaggttctgcgtctcgctaacaacccggatatcgtgaaggtaattaagaaaataggccattatctgaagatgaacattaccgtgcctgaagactatataaacgggtttattcgcgctaataatacatttctgtatcaactcgtgttcgacccaatcaaaagaaagctcataccgctgaacgcgtacgaggatgatgtcgacccagaaacattgtcctacgcgggtcagtacgttgatgacagcatcgcactgcagattgctctgggaaacaaagatatcaatacctttgaacagatagatgattacaatcccgacaccgccatgcctgctcattccaggagccattcgtgggatgataagacttgccagaagtcagccaatgttagctcgatctggcatagaaattacagccccagacctgagagcggcaccgtctctgatgcaccccagctgaaagagaacccctcaacggtgggtgtggagcgtgtgatctcaactaagggcctgaacctgcctcgcaaatccagcattgtaaagaggcccagaagtgctgagctatctgaggatgatctattgagccaatactccctttctttcactaagaagacaaagaaaaacagcagtgaggggaacaagagcctgagtttcagtgaggttttcgtgcctgatcttgtgaatggaccaactaacaagaagtctgtctccaccccacccaggacgaggaataaatttgcaacctttctacagagaaagaatgaagagagtggcgcagtggttgtgccaggcacccgctctcggttcttctgctcatccgatagcacagactgcgtgtcaaacaaggtgagtattcagccacttgatgagaccgccgtgacagataaggagaataacctgcacgagtcggagtacggagaccaagagggcaagaggctcgtcgataccgacgtcgccagaaacagctcagatgatatacccaacaatcacatccccggtgaccatattcccgacaaagccaccgtctttaccgacgaggaatcctattctttcgaaagttcaaaatttaccagaaccattagcccacccactcttggtaccctgcgcagttgcttttcttggtccggtggactgggtgatttttcgcggaccccttccccaagcccatctaccgctctacagcagtttcgccgtaaaagtgacagccctacatcgcttccagaaaacaacatgtccgatgtgtcccaattgaaatctgaggaaagctcggatgacgagtcgcaccctctgagggaggaagcctgttcgagtcagtctcaggagtcaggcgaattcagcctgcagagctctaatgcaagcaaactgagtcagtgctccagcaaggattccgacagtgaggaatctgactgtaacattaagctcttggattcccagtcagatcagacatcgaagctgcggctgtcacacttttccaaaaaggatacacccttaagaaacaaggtgccagggctatacaaatcatcaagcgctgattcactctcaacaactaagatcaaacccttaggcccagccagggcaagtggcctgtctaaaaaacccgcttcaatacagaagcgcaagcaccacaatgcagaaaacaaacccggactgcagattaagctcaacgagctctggaaaaactttgggtttaaaaaggactccgagaagctacccccttgtaagaagccgctctcccctgtaagagacaacattcagctaacacctgaagcagaggaggatatcttcaataagccagaatgtgggagagtgcaacgcgcaattttccaatag

SEQ ID NO: 28593 - DNA, 510 bp, synthetic construct
  misc_feature 1..510: note = Description of Artificial Sequence: Synthetic coding sequence
  source 1..510: mol_type = other DNA
atggggattcagggcttactgcagttcatcaaagaggcctcagagcccatacatgttcggaagtacaagggccaagtggtcgcagtcgatacctactgctggctgcataaaggcgctatcgcctgcgcagagaagttggccaaaggcgaacctacagatcgccgacgtcaggcaaatcttctaaaaggcaagcagctgctgcgcgagggtaaagtatccgaagccagggaatgcttcacaagaagcataaacatcacgcacgccatggctcacaaagttatcaaggcagcacgctctcaaggggtcgactgcttggtggccccatacgaagccgacgctcagctggcctacctgaataaggctggtatcgtgcaggctatcattaccgaagacagtgaccttcttgcgttcggatgcaagaaggtgattttaaagatggaccagttcggcaatggtctcgagatcgaccaggcccgattagggatgtgtcgccagttgggggacgtgtag

SEQ ID NO: 28594 - DNA, 2541 bp, synthetic construct
  misc_feature 1..2541: note = Description of Artificial Sequence: Synthetic coding sequence
  source 1..2541: mol_type = other DNA
atgggcattcaagggctgctccagttcatcaaggaagcttcagagcctattcatgtgcggaagtataagggccaggttgtggcggtcgacacatattgctggctacacaagggggcaattgcctgcgccgaaaagctagccaaaggggaacctactgatcggtacgtcggattttgcatgaagttcgtgaacatgctgcttagtcatgggatcaagcctattctggtgttcgacggatgtacgctgcccagcaagaaagaagtcgaacggtcaaggcgggagaggcgccaagctaatctccttaagggcaaacagttattgagggagggaaaggtgtcagaagctagagaatgttttactcgatccataaatattacccatgcgatggcccacaaggtcattaaagccgcacggagccagggagttgactgtctagtggcaccatacgaagccgacgcacagctggcctatctgaataaggctggcatagtccaagctatcattacagaggactctgacctcctggccttcgggtgcaagaaggtgatactgaagatggaccagtttgggaacggtcttgagatcgaccaggccaggcttggaatgtgcagacaacttggggatgtttttaccgaagaaaagttcaggtatatgtgcattctttcagggtgtgattatttatcctctctgaggggcattggacttgctaaagcctgcaaggtattgcgcctcgcaaataaccctgatatcgtaaaagtcatcaagaagattggccattatctgaaaatgaacattacagttcccgaagactacattaacggcttcataagagcaaataatacattcctgtaccaactcgtgttcgaccccatcaagagaaaattaatcccactgaacgcatatgaagatgacgtggacccagagactttgagctacgccggtcagtacgtggacgactccattgcgctccagattgctttgggcaacaaagacattaacaccttcgagcagattgatgattataatcctgatacggcaatgccagcccactccaggagccattcctgggacgataagacttgccagaaatccgccaatgtgagctctatatggcataggaattatagcccaaggccggagtccggcaccgtttctgatgcccctcagttgaaagaaaatcccagtactgtcggggtggaaagggttataagcactaaaggactgaatctgccaaggaagagttcaatcgtgaagcggcctcgctctgctgaactaagtgaggacgatttgctgagccagtactccctaagttttaccaaaaaaacaaaaaagaattcatccgagggcaacaagagcttgtcatttagtgaagtgttcgtgccggacttagtaaatgggccaacgaataagaaatcagtgtccacccctccaagaacaaggaacaaatttgccacttttctgcagcggaagaatgaagagtctggcgctgtggtggtcccaggtacaagatcccggtttttctgctcatccgatagcacggattgtgtcagtaataaggtttccattcagcctctggacgaaacggcagtgacagataaggagaataacctccatgagtctgaatacggcgatcaggagggaaagagacttgtcgacaccgatgtcgcacgaaactcatccgatgatatcccgaataaccatataccaggcgaccacatcccagataaagccactgttttcacggacgaagagagttactctttcgagtcatctaaatttactcgaaccatctccccacccaccctcgggacactgcgctcatgcttttcttggagcggaggcctcggcgattttagcaggacaccaagccccagcccaagtacagcactacagcaatttcgcagaaaatctgatagtcctacttcccttcccgaaaacaatatgagcgacgtctcccagttgaaatctgaagaatcaagcgacgacgagagtcatcccctccgagaggaagcgtgttcttctcagtctcaggagtccggagaattctccctgcagagtagcaacgcctctaagttgagccagtgtagcagcaaagatagcgactcagaagagtctgactgcaacatcaaactcctagactcacagtccgaccagacatccaagctgcgcctttctcatttctccaaaaaggatacccccctgcgcaacaaagtacccggactgtataagtcttcttcggccgactccctgagtaccacaaaaatcaagcccctcggaccagcgagagcttccggcctgagcaagaagccagcatctatacaaaaacggaagcaccacaacgctgagaacaaacctggactgcagattaaacttaatgaactgtggaagaatttcggatttaagaaggattccgaaaaactacctccctgcaaaaagccccttagccctgtccgagacaatatccaattgaccccggaggcagaggaagatatattcaataaacccgagtgcggcagggtgcagcgtgccatctttcagtag

SEQ ID NO: 28595 - DNA, 408 bp, synthetic construct
  misc_feature 1..408: note = Description of Artificial Sequence: Synthetic coding sequence
  source 1..408: mol_type = other DNA
atgggtatccagggactgttacagttcattaaggaagcttccgaacccattcacgttaggaagtacaaggggcaggttgtggctgtcgatacttactgttggctgcataaaggagctattgcatgtgccgagaaactagcaaagggagaacccacagacaggtatgttgggttctgtatgaagttcgtgaacatgctgctgtcccacggaatcaagcctatcctagtctttgatggatgcaccctgccatccaaaaaagaggtggagcgctccagaagagagaggcgccaggcaaacctactaaagggtaaacagttgctccgggaaggcaaagtctccgaggctagagaatgtttcacccggtctattaatattacacacgccatggcacacaaggtgatcaaatag

SEQ ID NO: 28596 - DNA, 2412 bp, synthetic construct
  misc_feature 1..2412: note = Description of Artificial Sequence: Synthetic coding sequence
  source 1..2412: mol_type = other DNA
atgggcatccaggggttgctgcagttcattaaagaagcgagcgagcccattcacgtccggaagtataaaggtcaggttgtggccgttgacacctactgctggctgcataaaggggctatcgcatgtgccgagaagctggcaaagggcgagccgaccgacagatacgtaggattttgtatgaaattcgtaaatatgctcctctcccatggcatcaaaccgattctggtattcgatggctgcaccctgccatctaagaaggaagtggagcggtcaaggcgggagaggaggcaggctaatctcctgaagggaaagcagctgcttagagaggggaaagtgagcgaggctcgtgaatgtttcactaggagcatcaacataacgcatgctatggcccataaggtcataaaagctgcacggtcccagggtgtagattgcctggtggcgccatatgaggcagacgctcaactcgcctacctgaacaaggccggtatcgtgcaggctatcatcacagaggacagcgatctcctcgctttcggatgcaagaaagtaatcttgaaaatggaccagtttggcaatggacttgagattgatcaagccaggctcggcatgtgtcgccagttgggagatgtgttcactgaggaaaaattcaggtacatgtgcattctctctggctgtgactatctgagtagcctccggggaatcgggcttgcaaaagcatgcaaggtgcttcgtctcgctaacaacccggacattgtgaaggtcataaaaaagatagggcattatctgaaaatgaatatcactgttccagaggactacattaacgggtttattcgggctaacaataccttcctgtaccaactggtgtttgatccaattaagaggaaattaatcccactgaacgcctacgaagatgacgtcgacccggagaccctaagctacgctggccagtatgtcgatgattctattgccctgcagattgccttaggaaataaggacatcaacaccttcgagcaaattgatgattataaccccgacacggccatgcccgctcacagcagatcccactcttgggatgataagacatgtcagaaaagcgctaacgtgtccagcatctggcacagaaactattcacccagacctgagagcgggacagtgtctgatgctcctcagctcaaggaaaaccctagcactgtcggggtcgaacgggtcatatcgacaaaggggttaaacctgccccgaaagtcatccatagtgaagagaccgagatcagccgaactgagcgaggacgatctcctgagtcagtattcactcagcttcaccaaaaagaccaaaaagaacagttccgaaggaaataaaagcttgagctttagcgaggtctttgtgcctgatctcgtgaatgggcctactaataagaagagcgtttccacacctccacggacgcgaaataagttcgctactttcctacagaggaagaatgaggaaagcggggctgtggtcgttcccggaacccgttcacgctttttctgcagcagcgattccactgattgtgtttccaacaaggtgagtatccaacccctcgatgaaacggcggtcactgacaaagaaaacaacctgcacgaatcggagtacggggaccaggaaggcaagcgcttagtggacacagatgtcgctcggaactcctcggacgatatcccgaacaaccacattccaggggatcacatcccagacaaagctactgtgtttaccgacgaggaatcttatagcttcgagtccagcaaattcacccgtactatttccccccctactctggggacactgcgcagctgtttcagctggagcggcggattgggagacttttctaggacaccttcaccaagtcctagtaccgcgttgcagcagttccgccgtaagtctgattctcctacttccctgcccgagaataacatgtcagatgtctcccagctgaaaagtgaagagtcaagtgatgacgaaagccaccccctccgagaggaggcatgttccagtcaatcacaggagtctggagagtttagtctgcagtcttccaacgctagcaaactatcacagtgctcctctaaagactccgactctgaagagtctgactgtaatatcaaattattggatagtcaatcagaccagacaagtaaactccggctctcgcattttagcaagaaagacacccccctgcggaacaaagtcccgggtctctataaatccagctcggcggattcactgtccacaacaaagatcaaacctctaggacccgctcgtgccagcgggctcagcaaaaaaccagcctctatacagaagcggaagcaccataacgcagaaaataagcccggattacaaatcaaactcaatgagctgtggaaaaatttcggatttaaaaaattctag

SEQ ID NO: 28597 - DNA, 36 bp, synthetic construct
  misc_feature 1..36: note = Description of Artificial Sequence: Synthetic coding sequence
  source 1..36: mol_type = other DNA
atgggcattcagggcctcctgcaatttatcaaatag

SEQ ID NO: 28598 - DNA, 2241 bp, synthetic construct
  misc_feature 1..2241: note = Description of Artificial Sequence: Synthetic coding sequence
  source 1..2241: mol_type = other DNA
atgcaggccaaaaaacgatacttcatcctactatccgcgggatcttgcctcgcactgctcttctattttgggggtcttcaatttagggccagtagatcgcacagccggagagaggaacactccggtcggaacggcctccatcacccatctccagaccacttctggcctagatttccagatgccctgcgtccattcgtcccttgggatcagctcgagaacgaggacagctctgtgcatatttctccgagacagaaacgtgacgcaaattccagcatttataaaggtaagaaatgtcggatggaatcctgctttgattttacactgtgtaagaagaatggcttcaaggtctacgtgtatccacaacagaagggagagaagatcgctgagtcttatcagaatatcctggccgctatcgaagggagcagattctacacaagcgatccttcccaggcctgtttgtttgtgttgagtttggatacactggacagggaccagctcagtcctcaatacgttcataatctgaggtcaaaagtacagtcccttcacctctggaacaatgggaggaatcaccttattttcaatctttacagcggaacttggccggattataccgaggatgtggggtttgatatcggccaggccatgctcgctaaggccagcataagtacagagaactttaggcccaactttgacgtgagcatccctttattttctaaggaccaccccaggaccggcggagaacgagggtttctgaagttcaatacaattccacccctgcggaaatatatgcttgttttcaagggcaaaagatatctgactggcatcggcagcgatacgcgaaacgctttgtaccacgtgcataatggggaggacgtagtgttgctcacgacttgcaagcatggcaaggactggcagaaacacaaagattccagatgcgacagggacaacacagagtatgagaagtatgactacagagagatgctgcacaatgcaacgttttgcctcgtacctagaggacggcgtcttggatcttttcggtttcttgaagccttacaagctgcttgtgtgccagtgatgctgagtaacggatgggagctgccgtttagcgaggtcatcaattggaatcaggctgctgtcataggagacgagaggcttctgctgcagatcccctcgacgatccgttccattcatcaggacaagattctggctctcagacaacagactcaattcttatgggaggcttacttttcaagtgtagagaaaatcgttcttacaactctggagataatccaggatcgaattttcaaacacatcagtcgcaactctctcatctggaataaacatccgggagggttgttcgttctacctcaatattctagctacttgggtgatttcccttattactacgccaatctgggcttaaagccacctagtaaattcactgccgtgattcacgcggtgactccccttgtctcacagagccagcccgtgttgaaactcttagtggcagccgcaaagtcccaatactgtgcccagattattgttctttggaactgcgataagccactgccggctaaacaccgctggccggctacagcggtccccgtagtcgtaattgagggcgaatccaaagtgatgtcaagccgcttcctgccctatgataacataatcaccgacgccgttctgtccctcgacgaggacactgtcctgtccaccactgaagtagacttcgccttcacagtgtggcagagtttcccagaaaggattgtcgggtaccctgcccgaagccatttttgggacaattctaaggaacggtggggctacacgtcaaaatggactaacgactactctatggtgttgacaggagctgccatataccataagtactaccactacctttacagtcattatttgcccgcatctctgaaaaatatggtggaccagctggccaactgtgaggatatactcatgaattttctcgtgagcgctgtcactaagctccctcccatcaaggtcacccagaaaaaacagtacaaggaaaccatgatggggcagacctccagagcatcaagatgggctgatccggatcattttgcccagcggcaatcttgcatgaatactttcgccagctggttcggctatatgccattgattcactcccaaatgagactggatcccgtgctcttcaaagaccaagtaagcatccttaggaaaaagtatcgagacatcgagagactttag

SEQ ID NO: 28599 - DNA, 2157 bp, synthetic construct
  misc_feature 1..2157: note = Description of Artificial Sequence: Synthetic coding sequence
  source 1..2157: mol_type = other DNA
atgtgcgcatctgtgaaatataacattcgcggtcccgcactcatcccacgtatgaagacaaagcatcgaatttactacattactctgttttcgatcgtgctgctggggctgattgcaaccggaatgttccagttctggcctcattccatcgagagttctaatgactggaatgtcgagaagagatcaatacgagacgtgcccgtggtgcggttgccagccgattcacctattccagagagaggggatttgtcatgccgtatgcacacctgctttgacgtgtataggtgcggattcaacccaaagaataagatcaaggtatacatttacgcactgaaaaaatatgttgacgacttcggtgtcagtgtgtctaacaccatttcaagggaatataacgagctacttatggccatctcagatagcgactattacacagatgatataaatagggcttgtctcttcgtgccatctatcgatgtgctgaaccaaaacaccctccgcatcaaggagaccgcacaggccatggcccagttaagccggtgggatcggggaaccaatcatctcctctttaatatgcttcctggcggacccccagattataacacagcgctggacgtgccacgagaccgggctctgttagcaggtggcggtttttccacatggacctatagacaggggtatgacgtgtcaataccagtctattctcccctcagcgcagaggtagacctgcctgaaaagggtccgggtccaagacaatatttcctcctgagctctcaggtggggcttcatcctgaataccgtgaggaccttgaagccttacaggtgaagcatggcgagtctgtcctcgtcctggataaatgcaccaacctgagtgagggcgttttgagcgtgcgcaaaagatgtcacaaacatcaggtgtttgactaccctcaggtacttcaagaggccactttttgtgtagttctgcgcggtgcaaggctcggccaagccgtcctctcagacgtgctgcaagccggatgcgttcctgttgtgatcgccgatagctatattttacctttttccgaggtcctggattggaagagggcgagcgtcgtggtcccagaggaaaagatgagcgacgtctactctatcctgcaatctatcccacaaagacagatcgaagaaatgcagagacaagcaaggtggttttgggaggcctacttccagtcaattaaagcaatcgccctggccaccctgcagattatcaatgatcgaatctacccatacgccgcaatcagctatgaagagtggaacgacccacccgcagtaaaatggggatcagtcagcaatcccttgttcctccctttgatcccgccacaatcccagggattcaccgcaatagtgctaacgtacgatagagtggaaagtttgtttcgcgtgattaccgaagtatctaaggtgccgtccctgtcgaagttgttagtggtttggaataaccaaaataaaaacccaccggaggattcactctggcctaaaattagggtcccgctgaaggtggtgaggactgctgagaacaagttgtcgaataggtttttcccatatgacgagattgaaacagaagcagtgcttgccatcgatgacgacattataatgctgacgtcggatgagttgcagtttgggtatgaggtctggcgggagttccccgaccgtctggtcgggtatccgggaaggttacacctgtgggaccatgagatgaataaatggaaatacgagtcagaatggacaaatgaggtaagtatggtactgactggcgctgccttctatcacaagtattttaattacctgtacacttacaaaatgcccggtgatattaaaaattgggtcgacgcccatatgaactgcgaagatatagccatgaacttcttagtagcgaatgtgaccggaaaggcagtcatcaaggtgactcctcgtaagaagttcaagtgtcccgaatgcacagcgattgacggcctgtcccttgaccaaacccatatggtcgagcgttcagagtgcatcaataagtttgccagcgtgtttggaactatgcctctaaaagtggtcgaacaccgcgctgaccctgttctctataaagacgactttcccgagaagctaaagtccttcccgaacatcgggtcgctgtag

SEQ ID NO: 28600 - DNA, 2187 bp, synthetic construct
  misc_feature 1..2187: note = Description of Artificial Sequence: Synthetic coding sequence
  source 1..2187: mol_type = other DNA
atgtgcgccagcgtcaagtacaacattagaggccctgcacttattccaaggatgaaaacaaaacaccggatctactatatcaccctattcagtattgtgttgctcgggcttattgccacaggcatgtttcaattctggccccattccattgagagtagcaacgactggaacgtggaaaagcgctctattagagatgtgcctgtcgtgcgcctgccagcagactcccccattcccgagcgaggggatctcagctgtcgaatgcatacttgcttcgacgtgtaccggtgtggatttaatcctaaaaacaagattaaggtttatatctacgccctcaaaaagtacgtggacgatttcggcgtgagcgtgtcaaatactattagtcgggaatacaacgaattactgatggctatatcagactccgactattataccgatgacatcaatcgggcatgcctcttcgtgccctcaattgatgtccttaaccaaaacaccctccgaatcaaagagactgctcaggcaatggcccagctctcacgctgggaccgaggcaccaatcacttgctgttcaacatgctacccggtggacctccagattacaataccgctttagatgtccccagggaccgagctctcttggccggaggaggctttagcacttggacctataggcagggatacgacgtgagtattccagtgtacagcccattatccgcagaggtggatctccctgagaagggccctgggcctcggcagtattttctgctttcgtcccaagtaggccttcatcctgagtacagagaggacctggaagcattacaggtaaagcatggagagagcgtgctagtccttgacaagtgcactaatctgagtgaaggcgtgttaagcgttagaaaacggtgtcacaaacatcaggtgttcgattacccccaggtgctccaggaggccacattctgcgttgtgctgcggggtgccaggctgggccaggctgtgttgtctgatgtgctgcaggccggttgcgtgccggtcgttatagccgattcttatatcttaccttttagtgaggtgctagattggaagcgggcttccgtggtcgtgcccgaggagaaaatgtctgacgtgtatagtatcctacagagcatcccccagcgccaaatcgaagagatgcaacgccagctctttatggaacccgcacggcgtgagaactggtccgccgcaaatcatcagatgaacagcctgatttggcccagggaacagtgggacagccagatcattaatgaccgcatttacccctatgcggctatctcctatgaagagtggaacgacccgcctgccgtcaagtggggaagtgtgtcgaatccactatttctgccccttatcccacctcagagccagggctttacagctattgtcctgacttacgacagagtcgagtcattattccgggtgattacagaggtgtccaaggtgccttcactctctaaactccttgttgtctggaacaaccagaacaaaaatcctcccgaggactccctatggccgaagataagagtgccgttgaaggtagtgcggactgccgaaaacaagctctccaaccgatttttcccctacgacgaaatcgagaccgaggctgtgcttgccatcgatgacgacataataatgctaaccagcgacgagcttcagttcggctacgaagtctggagggagtttcccgacagactcgttggctatcctgggagactccacctctgggaccatgaaatgaataaatggaaatacgagtcagagtggactaacgaggtttctatggttttaactggagctgctttttaccacaagtacttcaactacctgtacacctataagatgcctggagacattaagaattgggtcgacgcacacatgaattgcgaggacatcgctatgaacttcttagtcgctaacgttacgggcaaggcggtgatcaaggtgactccaagaaaaaagttcaagtgcccagaatgcactgccatcgacggtctgtcactagaccagacacacatggtcgagcgaagcgagtgcattaacaaattcgcctctgtatttggcactatgccactaaaagtggtggagcatagggctgatcccgtcctatataaggacgattttcccgaaaagctgaagagcttccccaatattgggtccctctag

SEQ ID NO: 28601 - DNA, 2256 bp, synthetic construct
  misc_feature 1..2256: note = Description of Artificial Sequence: Synthetic coding sequence
  source 1..2256: mol_type = other DNA
atgagttgcgctagcggaagcggtgggggattaaggcacccactgaggtgccaaaaaccttgggacgaagagtgcgaagaggaggctgtgtgcgtgatcatgtgcgcgtccgtgaaatataacatccggggacccgctctgattcccagaatgaaaactaagcaccgcatttattacataacactgtttagcatcgtgttactggggttgatcgccacaggaatgtttcagttctggccccactccatcgaatcctccaatgactggaacgttgagaagaggtcaatacgagacgtgcccgtagttagactccctgctgattcacctattcccgagaggggggacttatcctgccgaatgcacacttgctttgacgtgtacaggtgcgggtttaaccctaagaacaaaatcaaggtgtatatatacgcactcaaaaaatacgtggatgacttcggcgtgtctgtgtccaataccatctcaagggagtataatgagcttcttatggccattagtgacagcgattattatacggacgacattaatcgggcatgcctgtttgtacccagtattgatgtgctgaaccaaaacacactcagaatcaaggaaacagctcaagcaatggcgcagttgtctaggtgggaccgcggaacaaaccacttgctgtttaatatgctacctggagggccacctgattataacactgctcttgacgtcccaagggatagggcgctgcttgcaggagggggattttccacttggacatacaggcagggttatgacgttagtatccctgtgtactctcctctcagcgccgaagtggatctccccgagaaggggccaggtccgcgacaatacttcctgctttcctcgcaggttggcctacatccagaatatagggaggacctggaggccctgcaggtcaaacatggggagtcggtactggtgctagacaaatgtactaacctcagcgaaggagtgctctctgtgaggaagcgctgtcataagcatcaggtgttcgattacccccaagtactacaggaggctacattttgcgtggtgctgagaggcgcacggctcggccaggccgtgttgtccgacgtgctgcaggccggttgcgtgcctgtggtgatcgcagacagttacatactgccctttagtgaggtcttagattggaagagagccagcgtggtggtgcccgaggaaaaaatgtcagatgtctatagtatcctccagtcaattccccagcgacaaatcgaagagatgcagcggcaggctcgctggttctgggaggcctatttccaatctatcaaagctatcgccctggcaacactgcagattattaatgaccggatctacccctacgctgcaataagctacgaggagtggaacgacccacctgctgtgaagtggggctcggtctctaatccattgtttctgccactcattcccccacagagccagggctttaccgcgattgtgctgacctatgatcgggttgaatcgctctttagggttattacagaggtgagcaaggttccttccctcagcaagcttctcgtcgtgtggaacaatcaaaacaagaacccaccagaggactcactgtggccaaagattcgggtaccacttaaggtggttcgtaccgctgaaaacaagctatccaataggttctttccttatgacgagatagagactgaggcggtcctggctattgatgatgacattataatgttaacgagcgacgagctgcagttcggatacgaggtgtggcgagaatttcctgaccgactcgtgggttatcccggaaggctgcacctatgggatcacgaaatgaacaaatggaagtacgagtctgaatggaccaacgaggtgtcaatggttctgactggcgctgccttctaccataaatattttaattacctctacacctataaaatgcctggggacatcaaaaattgggtggacgctcatatgaactgcgaagatatagccatgaattttctggtggctaacgttaccggcaaggcggtgattaaggtgacgccaagaaagaaattcaagtgcccagaatgtactgccatagacggactcagccttgatcagacacacatggtggaacggagtgagtgtattaataaatttgccagcgtgtttggcaccatgcccctcaaggtcgtggagcatcgcgcagatcccgtcctgtataaggacgactttcctgaaaaactcaaatcatttcctaacatcggctctctgtag

SEQ ID NO: 28602 - DNA, 339 bp, synthetic construct
  misc_feature 1..339: note = Description of Artificial Sequence: Synthetic coding sequence
  source 1..339: mol_type = other DNA
atgtgtgcatcagtgaaatataatatccggggacccgctctgatccctcggatgaaaaccaagcataggatctattatatcactctgttttccatcgtcctgctgggactaattgcaacaggaatgtttcagttttggccccactctatagaatcgtctaatgattggaacgtggaaaaaaggagcatacgcgacgttcccgtggtcagactccctgctgacagtccgattcccgagcgtggggatttatcctgccggatgcacacctgttttgacgtctaccgctgtgggttcaacccaaagaacaaaatcaaagtctatatttatgctttgaaatag

SEQ ID NO: 28603 - DNA, 150 bp, synthetic construct
  misc_feature 1..150: note = Description of Artificial Sequence: Synthetic coding sequence
  source 1..150: mol_type = other DNA
atgtgcgcatcggtgaagtacaacatccgcggtcctgcgttgataccaaggatgaagactaaacaccggatctattacatcacattattctctatcgtgttattagggctgatagccaccgggatgttccagttttggcctcatagttag

SEQ ID NO: 28604 - DNA, 2157 bp, synthetic construct
  misc_feature 1..2157: note = Description of Artificial Sequence: Synthetic coding sequence
  source 1..2157: mol_type = other DNA
atgtgcgcatctgttaaatacaacatccgtggccctgctctcattcctcgcatgaagactaaacatcgaatttactatattaccttattttctattgttctgcttggcttgattgccacgggtatgttccagttttggccgcattccatcgaaagctcgaacgattggaacgtggaaaagagaagtattcgagatgtccctgtggttaggctgccagccgattcccccatccccgagcggggtgatctgtcctgtaggatgcatacttgttttgatgtgtataggtgcggttttaaccccaagaacaagattaaagtttatatctatgcccttaaaaagtacgtggatgactttggggtctcagtctccaatacgatctcgcgtgagtacaacgaattgctcatggccatttcagactctgactattacaccgatgatattaacagagcttgtttgttcgttcccagcattgacgtgttgaaccagaacacactgaggatcaaagaaaccgcacaggcaatggcccagctttcaagatgggaccgcggaactaatcatctgctatttaatatgctgccaggcggacccccagattacaacacggctttagatgtgccccgagacagggccctgttagctggtgggggattttccacatggacgtatagacagggctatgacgtcagtatccccgtttactcccccttgtccgccgaggtagatctgccagagaaaggacccggaccaaggcagtatttccttttgagctcccaagtggggctccacccagaataccgggaggatcttgaggctctccaagtgaaacatggcgagtctgttttggtgctggacaaatgtacaaacctgtccgagggggtgctgagcgtgcgcaaacggtgtcacaagcaccaagtcttcgattatcctcaagtgctccaggaagctacgttctgcgtggtcctgaggggcgctaggctggggcaagccgtgctgagtgatgtgctacaggcaggatgtgttccagtggtcattgcagactcctacatccttcccttctccgaagtgctggactggaaaagggcctctgtggtcgtgcctgaggagaagatgtctgatgtttactctatcctgcagagcattccccaacggcagatcgaagaaatgcaacgccaagcgaggtggttttgggaggcctacttccagtctataaaagccatcgctcttgccaccttgcagattatcaatgatcgcatttatccgtatgccgcaatcagttacgaagagtggaatgacccgcctgctgtcaagtggggaagcgtctcaaacccgctgtttctgcctttgatcccccctcagagccagggctttactgccatcgtcctgacctatgacagggtagagtccctttttagggtgatcactgaagtctccaaagtgcctagcttgtccaaactcctggtggtatggaacaaccagaataagaatcctcctgaggattccctgtggcccaagatccgggttcccctgaaggtggtacgcaccgctgagaacaaactaagtaaccgtttcttcccttacgacgagattgagactgaggcagttctcgctatcgatgacgatatcatcatgctaacatccgatgaactccaatttgggtacgaagtgtggcgggaattccctgaccgcctggtgggttaccctggtcggctgcacctgtgggaccacgagatgaacaagtggaagtacgagagtgaatggacaaacgaagtgtctatggtactgacaggagctgccttctatcataaatacttcaattatttgtacacctacaaaatgcccggagatatcaagaactgggtcgacgcccacatgaactgcgaggacattgcaatgaatttccttgtcgccaacgtgaccggtaaagccgtcatcaaggtcactcccagaaaaaaattcaagtgccccgaatgtaccgccatagacggtctatccctggatcagacgcatatggtcgagcgaagtgagtgcatcaacaagtttgcttccgtgtttggaaccatgccactgaaggttgtagagcaccgcgcagacccagtgctgtataaagatgatttcccagagaagctgaagagctttcccaatatcggcagtctttag

SEQ ID NO: 28605 - DNA, 1761 bp, synthetic construct
  misc_feature 1..1761: note = Description of Artificial Sequence: Synthetic coding sequence
  source 1..1761: mol_type = other DNA
atgccaaaacccatcaacgtgcgggttacgaccatggacgcggagctggagttcgccattcaaccaaacacaacaggcaaacagctgttcgaccaggtggtgaagacaatcggcttgcgagaggtgtggtattttggccttcattacgtggacaacaagggcttccctacctggctgaaactcgacaaaaaagtgtctgcacaggaagtgcggaaagaaaacccactccagttcaaattccgcgctaagttttatccagaagatgtggcagaagagctaatccaggatataacccagaaactattttttctgcaggtaaaagaaggcatcctgagtgatgagatctactgccctccagaaactgccgtcctcctgggttcttatgcggtgcaggccaaatttggagactacaacaaagaagtgcacaaatcgggttatctcagcagcgagcggttaattcctcagagagtcatggatcagcacaaactgacccgagaccagtgggaggaccggatccaggtgtggcacgccgagcaccggggtatgctgaaggacaacgccatgctggaatacctgaaaatagcacaagatctggaaatgtacggcattaattatttcgaaattaaaaacaaaaaaggcaccgatctgtggctgggagtcgatgctctgggactaaatatctacgaaaaagatgacaaactgactccaaagatcggattcccctggagcgagatccgcaacatatccttcaacgacaagaagttcgtcataaagcctattgacaagaaagccccagattttgtcttttacgctccaagactgagaatcaataagcgcattctgcagttatgcatggggaaccacgagctgtatatgcgcaggagaaaaccggacacaatagaggtccagcagatgaaggcacaggctcgggaggaaaagcaccagaagcagctagagagacagcagctcgagactgaaaagaaaagacgagagactgttgagagagagaaagagcagatgatgagagagaaggaagagcttatgctccgccttcaggattatgaagagaagaccaaaaaagcagagcgcgagctttcagaacagatacagcgggcactacagctcgaagaggagcggaagagggcccaggaagaggctgaaagattggaagctgacagaatggctgcgcttagagccaaagaggagctcgaacgacaagcggtagaccagattaaatctcaagagcagttggctgccgaactggcagagtacaccgctaagattgctctattggaggaggccaggcggcgaaaggaggatgaagttgaggagtggcaacacagggccaaagaagcacaagatgacttggtgaagacgaaagaagagctgcatctcgtgatgacggcccctccccctccaccccctcccgtgtatgaacctgtgagctatcacgtacaggaaagtttgcaagacgagggtgccgaacctaccggatactctgcggagctcagttccgagggcataagagacgaccggaatgaggaaaagcggattactgaggctgagaagaatgaacgggtccaaagacagctgctgacactgtcctcagagctaagccaagcaagagacgagaacaaacggacgcacaacgatattatccacaacgaaaacatgagacagggaagggacaagtacaaaacactacgtcaaattcggcagggaaatacgaagcagcgcattgacgagtttgaagccctttag

SEQ ID NO: 28606 - DNA, 1761 bp, synthetic construct
  misc_feature 1..1761: note = Description of Artificial Sequence: Synthetic coding sequence
  source 1..1761: mol_type = other DNA
atgccaaaacccatcaatgtgcgagtgaccactatggatgctgaactagaattcgccatccagcctaataccactggtaaacaactctttgatcaagtggttaaaaccattgggttgagagaagtctggtacttcggcttgcattatgtagataataaaggattccctacttggctgaagctggacaaaaaggtttcagctcaggaggttaggaaagagaatccactgcagttcaagttccgagccaagttttacccggaagatgtggccgaagagctaatacaggatattacacagaagttgttctttctgcaggtcaaggagggaattctatccgacgagatctactgtccgcctgaaaccgcggttctgttaggcagttatgcagtgcaagctaaattcggggattacaataaagaagtccacaagagcggatatttgtcgtccgagagattgatcccacagagggtcatggaccagcataagctgactcgtgaccagtgggaagatagaattcaggtttggcacgccgagcatcgaggaatgctgaaggataacgccatgctcgaatacttaaaaatcgctcaggacttggagatgtacggtatcaattacttcgagataaagaataagaagggaaccgatctatggctaggcgtcgacgctctcggacttaatatatacgagaaagacgacaagctgactccaaaaattgggttcccctggtccgagattcgtaacatctccttcaatgataagaaattcgtcataaagccaattgacaaaaaagccccagatttcgttttttatgccccaagattacgaatcaacaaacgaattctccagctttgtatgggcaaccacgagctttatatgcgcaggaggaaaccagatacaatcgaagtacagcagatgaaagcccaggcccgagaggagaaacaccagaagcagcttgaaagacagcaactggagaccgagaaaaagaggcgcgagacagtagagcgggaaaaggagcagatgatgcgggagaaggaggaactgatgttgcgtctacaagactatgaggaaaagactaagaaagcggagcgggaactgagcgaacagatccagcgggcactccaattggaggaggagagaaaacgtgctcaagaagaagcagagcgactggaggccgatagaatggccgcattacgggctaaggaagagctggaacgacaggcggtggaccagattaaatcccaggagcagctggccgctgaactggctgagtacacagccaaaatcgcactcctggaagaagctcgcaggagaaaggaggacgaggtggaggagtggcagcatagggctaaggaagcccaggatgatttggtgaagactaaagaggaacttcatctggtaatgacagctccacctccccctccacctcctgtgtacgaaccagtgtcctaccatgtccaagaatccctccaggatgaaggcgctgagccaactggctacagcgctgaattgtcctccgaaggcatacgcgacgaccgcaacgaagagaaacgcataaccgaggccgagaaaaacgaacgggttcagcggcagttacttacactgtcaagcgaactctcccaagcaagagatgagaataagcgcacccacaatgacattattcataatgaaaatatgagacaaggcagggacaagtacaaaacactgaggcagatccgccaaggcaatactaagcagaggatagatgaatttgaagccttatag

SEQ ID NO: 28607 - DNA, 1665 bp, synthetic construct
  misc_feature 1..1665: note = Description of Artificial Sequence: Synthetic coding sequence
  source 1..1665: mol_type = other DNA
atgcctaaacccattaacgttcgggtgacgactatggatgccgaactggaattcgctatccagccaaataccacgggcaaacagttgttcgaccaggtttcggcccaggaagtgagaaaggaaaatccacttcagtttaaattcagagcaaagttctatcctgaagatgtggccgaagagctcattcaggacataacacagaagctgttcttcctgcaggtaaaggaaggaatcttatccgatgaaatctactgcccccctgaaacagctgtgctgctgggctcttacgctgttcaggctaaatttggggattataacaaagaggtgcacaaatccggatacctgagcagtgaaaggcttatcccccaaagggtgatggatcaacacaagttgacaagggatcaatgggaagatcgtatccaggtctggcacgccgaacatagggggatgcttaaagataatgccatgctggaatacctgaagatagctcaggacctagaaatgtacggcataaactactttgagattaaaaacaaaaaaggcaccgatctttggttgggagtcgatgccctaggactaaatatttacgaaaaggacgataagctgactcccaagattggcttcccttggagcgagattcggaatatctcttttaatgataaaaaatttgtgattaaaccaatcgacaaaaaagcccctgatttcgtgttctacgcacctcgcctgcgcatcaataagcgcattctgcagctctgtatggggaaccacgagctgtatatgagacggaggaaaccagatacaattgaagtgcagcagatgaaggctcaggctagagaagagaagcaccagaaacaactggaacgccagcaattggagaccgagaagaaacggagagagactgttgagcgcgagaaggagcaaatgatgcgggagaaagaagagctgatgctgaggctacaggactatgaagaaaaaacaaaaaaagcagaaagggagctgagcgagcagattcagagagcactccaactggaggaggagcgcaaacgcgcacaagaagaagccgagaggttagaagcagataggatggccgcactccgcgctaaggaagagctggaacgacaggctgtagaccagattaagtcccaggaacagctagctgctgaacttgctgagtataccgctaaaatcgctctcctggaagaggcacgacgcagaaaagaggacgaggtcgaagaatggcagcatagggccaaggaagcacaggatgatttagtcaagaccaaagaggagctgcatcttgtgatgactgccccacccccaccgcctcccccagtttacgaaccagtgagctatcatgtacaggaaagcctgcaagacgagggcgctgagccaactggttattctgctgagctctcctctgaaggcattagggacgaccgcaacgaagagaagcgaatcactgaagccgagaagaatgagagggtccagaggcagttgctgacactcagcagtgagctctctcaggccagggatgagaataagaggacacataatgatataattcacaacgagaatatgcgccagggcagagacaaatacaagaccctcagacagattcgtcagggcaataccaagcagagaatcgacgaattcgaggcactgtag

SEQ ID NO: 28608 - DNA, 900 bp, synthetic construct
  misc_feature 1..900: note = Description of Artificial Sequence: Synthetic coding sequence
  source 1..900: mol_type = other DNA
atgggcaccaaggcacaggtggaaaggaaacttctgtgtctctttattttagccattctgctgtgctccctagctcttggctccgtgactgtccattcctcagagcctgaggtccggatcccagaaaacaaccctgtgaagctgtcttgcgcatattccggattctcatcgcctcgcgttgaatggaagttcgatcagggggacacgacacggctggtatgttacaataacaagatcactgcctcatatgaagaccgcgtgactttcctgcctactggtattacctttaagtctgtcaccagagaagacaccggaacttatacgtgcatggtttctgaggaaggaggaaactcctacggggaagtaaaggtcaagcttatcgtattggtgcccccaagcaagcccactgtcaatatcccatctagcgctacaattgggaatcgggctgtgctgacctgctctgaacaggacggcagcccccctagcgagtacacatggttcaaggatggtatcgttatgcctactaacccaaagagtactcgggcattctctaattccagttatgtgcttaatccgaccactggggagctggtcttcgaccccctgtccgcgagcgataccggtgagtactcgtgcgaagccaggaacggttatggcacacccatgacttcgaatgccgttcgcatggaagctgttgagcggaacgtgggggtgatcgtggcggctgtactggtaaccctgatactcttgggaatacttgtgttcggcatctggtttgcttactcccggggtcacttcgaccgcactaaaaagggtacctcttctaagaaggtcatctactcgcagcctagtgccagaagcgagggcgaatttaagcaaacaagcagctttctcgtatag

SEQ ID NO: 28609 - DNA, 900 bp, synthetic construct
  misc_feature 1..900: note = Description of Artificial Sequence: Synthetic coding sequence
  source 1..900: mol_type = other DNA
atggggaccaaagcccaggttgagagaaagctgctctgccttttcatcctggccattcttctgtgctccctggcgctgggatcagtgacagtccatagttctgaaccagaggtgcgcatccctgagaataaccccgttaaactctcttgcgcctattcgggcttttcttccccacgggtggagtggaagttcgatcagggtgatacaactagacttgtatgctataacaataagatcaccgcttcttacgaagatcgcgtaacatttctacctactgggatcacattcaaatccgttacaagggaggatactggcacttatacatgtatggtgtccgaggaaggcggtaactcctacggtgaggtaaaggttaagctgattgtgctcgtaccaccatctaagccaactgtgaatatccctagcagcgccactatcgggaatagggctgtactcacctgctcagagcaggatggctcaccaccttctgagtacacatggtttaaagatggtatcgtgatgccaacaaatcctaaaagcacacgcgctttctctaattcctcctatgtgttaaaccccactactggtgaattggtgttcgatccgctgagtgcatctgacacaggggaatatagttgcgaagccaggaatggttatgggacccccatgacatccaacgccgtaagaatggaggctgttgagcgcaatgtgggagtcatcgtggcggctgttcttgtgacactgatcctgctcggtatactggtcttcgggatttggttcgcgtattcacgagggcacttcgataggactaaaaaggggacttcttcgaagaaagtgatatattcccagccttccgcaagatcagagggagaatttaaacaaactagttcatttttagtgtag

SEQ ID NO: 28610 - DNA, 900 bp, synthetic construct
  misc_feature 1..900: note = Description of Artificial Sequence: Synthetic coding sequence
  source 1..900: mol_type = other DNA
atggggactaaagcccaagtagagcgtaagcttttgtgtctgttcatactggctatattgctgtgttcactagcgcttggatctgtgacagtccactctagtgaacctgaagtccgcattccagagaacaaccccgttaagctgagctgtgcttactccggattttcctcacccagagtcgagtggaaattcgaccagggcgatacaaccagactggtttgctacaacaataaaattaccgcctcctatgaagacagggtgacattcttgcccaccggaatcaccttcaagtccgtaactcgggaggacacgggtacgtacacttgcatggtcagcgaggagggtggaaattcttacggagaggtcaaagtcaagctgatcgtgttagtccctccttcaaagcctacagtaaacatccctagtagcgcaactatcggaaacagagcggtcttgacctgttcagagcaggatggctccccgccttccgagtacacatggtttaaggacggaatagtcatgcccaccaaccccaaatctaccagggcctttagcaattctagctatgtcctgaatcctactacaggtgaactagtcttcgatcctctctctgccagcgacacgggggaatacagttgcgaggctaggaacggctacggtacgcctatgacctccaatgccgtgcggatggaagccgtagagcgtaacgtgggagtgatcgtggcggcagttctggttacgctgatacttctgggcattctggtatttggcatctggtttgcttattcccgcggacattttgacagaacgaaaaaaggaacatccagcaaaaaggtaatctattcccagccgtcagcaagaagtgagggggagttcaagcagacaagcagctttctggtctag

SEQ ID NO: 28611 - DNA, 912 bp, synthetic construct
  misc_feature 1..912: note = Description of Artificial Sequence: Synthetic coding sequence
  source 1..912: mol_type = other DNA
atgctgcaggcccctcgagggcgagctcgcgctgctctgaggagactagccgtggcaaccaggactatggcaggtggctcattggccctgggcagtgtgacggtgcattctagtgaaccagaggtcagaatcccagaaaacaatccagtgaaactgtcatgcgcttacagcgggtttagctctccgagggtggagtggaaattcgatcagggagacactacaaggttagtctgttacaacaataagattaccgcaagttacgaagatcgtgtgacttttctcccaacggggataactttcaaaagcgtcaccagggaggataccggcacctatacctgtatggttagtgaggaggggggaaatagctacggcgaggtaaaagtgaaattaattgttctagtacccccttcgaagcccacagtcaacatccccagctctgctaccattggcaatcgggcagttttgacttgtagcgagcaggatggatccccccctagtgagtacacatggttcaaagacggaatcgtgatgcctacgaaccccaagtccactcgggctttctcaaacagctcctatgtactgaatcccactaccggtgaacttgtgtttgaccccttatccgcttccgataccggggagtacagttgtgaagctcgaaatggctacggaactccaatgacctctaacgccgtgcgcatggaggcggtggaaagaaatgtcggtgtaatagtagcagctgtgctggtcaccctcattctgcttggaatccttgttttcggcatttggtttgcttacagtcgtggtcacttcgaccggactaagaaagggacttcttctaaaaaagttatatattcccagccatccgcacgatcagagggggagtttaaacagacctcatccttcctggtctag

SEQ ID NO: 28612 - DNA, 753 bp, synthetic construct
  misc_feature 1..753: note = Description of Artificial Sequence: Synthetic coding sequence
  source 1..753: mol_type = other DNA
atggggaccaaggcgcaagtggaaagaaagctgctgtgcctgttcattctcgccatactgctatgttccctggccctgggctcagtgacagtccatagcagtgagcccgaggtgcgaattcccgaaaataatcccgtgaagctgtcctgtgcctactctggcttttcttctccgagagttgagtggaagttcgaccaaggcgatacaacgaggttagtgtgctacaacaacaagattaccgtccccccatcaaagccgacagtgaacattccctcctccgctacaataggtaaccgggctgtgcttacctgcagcgaacaggacggaagtcccccttcggaatacacctggtttaaggatggtatcgtcatgccaaccaacccaaagtctacgcgagccttttctaactcctcatacgtgctcaatccaacgacgggagaacttgtcttcgatccactgagcgcctctgacacaggagaatatagctgtgaggctcgtaatggttacggtactccaatgacaagtaatgcggtcaggatggaagctgtggagcgcaacgtgggagtcatcgtggccgctgttttggtaacgctgattctcctgggcatcctcgtttttggcatttggttcgcttatagccggggacactttgaccgtacaaagaagggtacctcttctaaaaaagtgatctattcacagccttccgccagatcagagggcgagttcaagcaaacctccagtttcctcgtgtag

SEQ ID NO: 28613 - DNA, 3357 bp, synthetic construct
  misc_feature 1..3357: note = Description of Artificial Sequence: Synthetic coding sequence
  source 1..3357: mol_type = other DNA
atgggcgtgcagggattccaagattacatcgaaaaacattgtccttccgctgtagtgcctgtcgagctgcagaaactggctcgaggatctctggtgggcggtggaaggcagaggccccctcaaacgcccctccgactactcgtggatgctgataactgtttgcatcggctgtacggaggcttttacactgattgggtgagcggcggacagtggaatcacatgttaggctacttagctgccctggcaaaggcctgttttggcggaaatattgagctgttcgtcttctttaacggggctctagaaaaggcaaggttgcatgaatgggtgaagcgccaaggcaacgaacgacagacagcccagcagatcgtgtcgcatgttcagaataaagggacgcccccacctaaagtttggttcctcccacccgtttgcatggcacactgcatcagacttgcgctcatacgatttcacgtgaaggtggctcaatcaattgaggaccatcaccaggaagtaatcggattctgtagagagaacggattccacggccttgtggcatacgactccgactacgctctgtgtaacattccctactatttctctgcacacgcgcttaagctctctcgaaacggaaagagtctgactactagccagtatctgatgcacgaggtggccaaacaattagatctcaatccaaacagattcccaatattcgccgctttgcttgggaaccatatcctccccgacgaggacctggcctcatttcattggagtctgctaggcccagagcaccctctggccagcctgaaggtgcgggcacatcagctggtcctgcctccatgtgatgtggtaattaaggcagtggctgattacgttaggaatatccaggataccagcgatctggacgccattgcaaaagatgtgttccagcactcccagagtagaactgacgacaaggtgatccgctttaagcgcgctatcggttactacagcgctacctccaaacccatgtctttccatccaccccactacttagccgcacgaccgggacctttcggaatgcccggtatggttcctccccacgttccaccccagatgttaaatataccccagacatcccttcaggccaaacccgtcgcacctcaagttcctagccccggaggggctccagggcagggcccatacccctacagcctctccgagccagcacccctaacattggatactagcggaaagaatttgaccgaacagaactcatatagcaatatcccccacgagggaaaacataccccactctatgaacgctcctcaccaattaatcctgcccagtctggaagcccgaatcacgtagactccgcatactttcccggatcctcaactagtagctccagcgataacgacgaggggtccggcggagcaaccaaccacatcagcgggaacaagattggctgggagaaaaccggctctcactctgaaccccaggctcggggagaccctggcgatcaaactaaggcggaggggagcagcactgcttcatccggcagtcaattggccgaaggcaagggcagtcagatgggaaccgtccaaccgatcccctgcctcttgagcatgccaacgcggaatcatatggatatcacgactcctccactccccccagtagcccctgaggttctccgtgtagcagaacatcggcacaagaaggggcttatgtacccctacatctttcatgtactgactaaaggagaaatcaagatcgccgtgtccatagaggacgaggcgaacaaggatctcccacccgctgccctcctctatcgcccagtccgacagtatgtgtacggtgtccttttttcactggccgagtcacgcaaaaagactgagaggctcgcatttcggaaaaataggctgcctcccgagttttcccctgtcataatcaaagagtgggcagcttacaagggaaagagtcctcagacccccgagttggtggaagcccttgcattccgtgagtggacatgccccaacctgaaacgcttatggctcggaaaggccgtggaggataagaatcggagaatgagggctttccttgcatgcatgaggtctgacacacccgcaatgcttaacccggctaatgtgcccacccacctgatggtcctgtgctgtgtcctaaggtatatggtccagtggccaggcgctagaattctgaggagacaagaactggatgccttcctagcacaggcacttagccccaagctatatgagcccgatcagcttcaggagttgaaaattgaaaacctcgatcctagaggcatccagctcagcgcactcttcatgtccggcgttgacatggccttatttgccaacgatgcctgtggacaaccgattccgtgggagcattgctgcccctggatgtattttgacgggaagctgtttcagagcaagctgcttaaagcaagtagagagaaaaccccgctgatcgacctgtgcgacggacaggccgatcaggcggctaaagtggaaaagatgcggcagagcgtcctcgaagggctttccttttctagacagtcccacaccctgccattccctccacccccagcccttccattttatccagcaagtgcttacccccgacatttcggtcctgtccctccaagccaaggccgaggcagagggttcgccggagtctgtgggttcggagggccatacggcgaaactgtggcaaccgggccatatagagcttttcgtgtggcagccgctagtggccactgcggcgctttctcaggtagcgatagtagccgaacatcaaagtcgcaggggggagtgcagcccatcccatcacaaggagggaaactcgagattgctggcacggtggtgggtcactgggcagggtccaggaggggcaggggaggcagaggacctttcccacttcaggtggttagtgtgggtggacccgcacgcggtaggccaagaggagtgatctctaccccagtgattcggaccttcggtagaggagggagatactacggtcggggatataagaaccaggctgccatacaaggaaggcccccttacgccgcttccgcggaagaggtggcaaaagaactcaaaagtaagtctggtgagtcaaaatcctcagccatgagcagtgacggaagtctggcagaaaatggcgtcatggccgaagagaaacccgcaccacaaatgaacgggtccaccggcgacgctagggccccatctcactctgagtctgctttgaacaacgattcaaaaacatgtaatactaaccctcacctgaatgctttatcaaccgatagcgcatgtagaagggaggctgcactggaggctgccgtgctaaacaaagaggaatag

SEQ ID NO: 28614 - DNA, 3441 bp, synthetic construct
  misc_feature 1..3441: note = Description of Artificial Sequence: Synthetic coding sequence
  source 1..3441: mol_type = other DNA
atgggggtgcaaggattccaggactatatcgagaaacactgcccttcagcagttgtacccgtcgagctacagaaactggctcgaggatctctcgtcggcggtggaaggcaaaggccccctcaaacgcccttaaggcttctggtggatgccgacaactgcctccataggttgtatgggggattttacactgactgggtgtcgggcggtcagtggaaccacatgctgggttatctggccgcattagctaaggcgtgctttggtggtaacatcgagctctttgtgtttttcaacggcgctctggaaaaggcacggttgcacgagtgggtgaagcgccaggggaacgagaggcaaaccgctcagcagattgtctcacatgttcaaaacaagggcacaccaccccctaaagtttggtttcttccaccagtgtgcatggcacactgcatccgtctagccctgattagattccacgtaaaggtggcccagtctatcgaggaccatcaccaggaagttattggattttgcagggagaacggctttcacgggctggtcgcttatgactccgactacgctctatgtaatatcccctactactttagcgctcacgctctgaaactctctcggaacggaaagtccctgacaacatcccagtacctcatgcacgaagtggcgaagcagctggatctcaatcccaacaggttccccatctttgcggctttattaggcaaccacattcttcccgatgaggaccttgccagctttcactggagtctgctgggacctgagcatcccttagccagccttaaggttcgtgcacatcagctggtgcttcctccctgcgacgtggtgataaaggccgtggccgactatgtgcgcaatattcaggatacttccgacttagatgccattgccaaagatgttttccaacactctcagagtagaaccgacgacaaagtcatccgctttaagcgagccatagggtactatagcgccacaagtaagcctatgtcattccatcccccacactatcttgcagcacgccctggccctttcggcatgccgggtatggttcctccacacgtacctcctcagatgctgaacatcccccagacaagtctccaggctaagcctgtcgccccacaggttccgtcccccggaggggctcctggtcagggaccatacccctactccctctcagagcctgcccctctaacactggacacgtccggcaagaatttgacggaacagaattcatacagcaatatcccgcacgagggcaaacatacgcccctttacgagagaagttctcctattaatccggctcagagtggctcacccaaccacgtcgacagcgcatatttcccaggttcctctacttcctccagtagtgacaatgatgagggatcgggcggtgccacgaagccatttcaactataccttcagaaaaacttcgtgtttcacaaggagaacagcattgtgctgtgttcaaggattttacgacatgggcatatctctggaaacaaaatagggtgggagaagaccgggtcccacagcgaaccccaagcgaggggcgatccaggagatcagaccaaggccgaaggctcctccactgcttcctcaggcagccagcttgcggaaggcaaaggcagccaaatgggcacagtacagccgattccctgcctcctgtccatgcccactagaaaccatatggatataactacgcccccacttccaccagttgccccagaggtgctgcgagtagccgagcatagacacaaaaaagggctgatgtatccctatatctttcacgttctgacaaagggggaaatcaaaatagcggtatccatagaggacgaagcaaacaaggatctgcctcccgctgctctcttgtatcggcctgtgagacagtacgtgtacggcgtgctcttctcactggccgagtcgagaaagaagaccgagcggcttgcttttcgaaagaatagactgccacctgaattttcacccgttatcattaaggagtgggcagcttacaaaggaaagtccccccaaacacccgaactggttgaagcactggcctttcgggaatggacctgtccaaacctaaaaaggttatggttgggcaaggcggtcgaggacaagaacaggcgcatgcgtgcattccttgcatgtatgcgcagcgacacacctgctatgctgaatcccgcaaatgtgcctacccatctgatggtgctttgctgcgtgcttcgatatatggtgcagtggccaggggctcgcattctgagacggcaggagctagatgcctttctcgcccaagctctttctccaaaactatacgaacctgatcaactgcaggagctgaagatcgaaaacctggatccacgcggaatccaactgtctgccctgttcatgagtggggttgatatggcgttgtttgccaacgatgcctgcggtcaacccattccctgggaacactgctgtccctggatgtactttgatggcaaactgttccagtccaagctcctgaaggcgagtcgagagaaaaccccccttatagatctatgtgatggccaggctgatcaggcagccaaggtggagaagatgcgacagtctgtgctcgaaggcttatccttctcgaggcagtcacacaccctcccattcccaccccctcctgcgctgcctttctaccctgctagtgcatacccaagacactttggccctgtgcctccctctcagggaagggggaggggcttcgcaggagtgtgtggcttcggcggaccatatggcgagactgttgccaccggcccatatcgggcttttagagtcgcagccgcttctgggcactgcggggcttttagcggttccgactcctctaggacatcaaaatcccagggaggtgttcagcccatcccctctcaggggggaaagcttgaaatcgccggtacagtggtgggccactgggccggatccaggagggggaggggcggacgagggccttttccacttcaggtggtgagcgtaggcggtcctgccagagggagacccaggggcgttatttcaacccctgtgatcaggacttttggccgtgggggacgttattatggtcgaggctataaaaaccaggcagccatccagggaaggcctccctatgctgcaagtgccgaagaagtggctaaagagctgaagtccaaatcgggggaaagcaagtcatccgctatgtcgagtgacgggtcacttgccgagaacggcgtgatggcagaggagaaaccagccccacagatgaatgggtcaaccggagatgcgagggcgccaagccactccgagtcagccctcaataatgacagcaagacatgtaataccaacccgcacctcaatgcgctgtccaccgattctgcctgccgaagggaagccgcattagaagccgcagtgctgaataaggaggagtag

SEQ ID NO: 28615 - DNA, 3219 bp, synthetic construct
  misc_feature 1..3219: note = Description of Artificial Sequence: Synthetic coding sequence
  source 1..3219: mol_type = other DNA
atgggggtccagggctttcaggactacattgagaagcactgtccctcagccgtggtgccagttgagctgcaaaagttggcacggggatctctggtcggtggcggaaggcaacggccacctcaaacccctctgcgcttgcttgttgacgctgacaattgccttcaccgcctgtatggtggattttacactgactgggtcagtgggggtcaatggaaccacatgctcgggtatctggctgccttagcaaaagcttgctttgggggtaatatcgaactcttcgtcttctttaacggagcactggagaaagcaaggcttcatgaatgggtcaaaaggcagggtaacgaacgccagaccgcccagcaaatcgtgtctcacgtacagaataaagggaccccaccgcctaaggtgtggtttctgcctcccgtttgtatggctcactgcattcgattagcacttatccgctttcacgttaaagttgcacaaagcatcgaggaccaccatcaggaagtgataggattctgtagagaaaacggctttcatggcctagtggcttacgattcagattatgcgttgtgcaatatcccctactattttagcgctcatgccctgaagctctcacgaaacgggaagtctctgacaaccagccaatatctcatgcacgaggtagcgaaacagctggatcttaaccccaatcggtttcccatttttgctgccctgctgggtaaccacatcctacctgacgaagatttagcttcattccactggagtttactcgggcctgagcatcccctggctagcctcaaagtgcgcgctcaccaactggtcttacctccatgtgacgtcgttatcaaagcagtggcggattacgtgcgcaacatacaggatacttcagacctggacgctatcgctaaagacgtgttccagcactcccaaagtagaacggatgacaaggttatcagattcaagcgggctattggctactatagtgctaccagtaaacccatgtcctttcatcctccccactatctagctgcccgacccggaccattcggcatgccgggaatggtgcctccccatgtcccgcctcagatgctgaatattcctcagacctctctccaagctaagccagtagctccccaggtgccaagtcccggaggcgctccagggcaggggccatacccgtattccctgtctgagccggcaccccttactcttgacacgtcagggaaaaacctaaccgagcagaacagctactccaacatcccccatgaaggtaaacacacgccgctttatgagagaagctctccaataaaccccgctcagagtggtagccccaatcatgttgactctgcttacttcccgggttcttcaacctcatcaagtagtgacaatgacgagggatctggcggagccacaaaccatatctccggaaacaaaattgggtgggagaaaacgggatcacactcagagccacaggctcgcggtgatccaggtgatcagactaaagccgaggggagtagcaccgccagctcaggctcgcagctcgctgaagggaaaggctctcagatgggaactgttcaacctataccctgcctactcagtatgccgacgcgaaatcatatggatataacaactcctccgctgcctcctgtggcccctgaggtccttcgggtggccgagcaccggcacaagaagggcctcatgtacccgtacattttccatgtgctgacgaagggtgagataaaaatcgcggtgtctatagaagacgaggccaacaaggaccttcctccagcagcactcctatatcgtcccgtccgccaatatgtttatggagtgttgttctctcttgccgagagccggaaaaaaacggaacgtcttgcttttcggaagaatagattacctcccgaattttcccccgtcatcatcaaagagtgggctgcttataaggggaaaagtccacaaacccccgagctcgttgaagccctggctttccgggagtggacctgtccaaacctaaaaagactttggctgggtaaggcggtggaggacaaaaacaggcggatgagggccttcctcgcatgcatgagatccgacacccccgctatgttgaaccctgccaacgtgcccacgcacctaatggtgctctgctgcgttctgcgatatatggtgcagtggcctggggctaggatcttgaggcggcaagagctggacgccttccttgcgcaggcactgagcccaaagctttacgaacccgatcaactgcaggaactcaagatagagaatcttgacccacggggtattcagttatcagcactgtttatgtccggcgtggatatggccctgtttgcaaacgacgcctgcggccagcccatcccttgggaacactgttgtccttggatgtatttcgatggcaagctgttccagtccaaattgcttaaagcatcgcgcgagaagactccgttgatcgatctctgcgacggtcaagccgaccaggccgcaaaagtcgagaaaatgagacagagcgtcctggaaggcctgtctttctcccggcaatcccatactctgcctttccccccaccacccgctcttccgttttaccccgcatccgcttaccctaggcacttcggccctgtcccccctagccagggaagaggtcggggttttgccggtgtgcagcctatcccatcgcaggggggaaagcttgagattgccggtaccgtcgtgggccattgggctggctcaagaagaggtaggggtggacgaggacccttccctttgcaggtagtttcagtagggggacccgctagagggagaccacgcggagtgatatcgacaccagtcatccggacatttgggcgtggcggacgttactacggccgtggatataaaaaccaggccgctatccaagggaggcctccctatgccgcttcagctgaggaagtagcaaaagaattgaagagcaagagcggggaaagtaaatcatcggcaatgagctccgacggcagtctggccgaaaacggggtaatggcggaggagaagccagctcctcaaatgaatggttccacaggggacgcgcgagccccttcccacagtgagagtgcgctgaacaatgattccaagacatgtaacacaaatcctcacctcaacgctctctctaccgattcagcctgcaggcgagaggcagctctggaagcagccgtgttgaacaaggaggaatag

SEQ ID NO: 28616 - DNA, 1887 bp, synthetic construct
  misc_feature 1..1887: note = Description of Artificial Sequence: Synthetic coding sequence
  source 1..1887: mol_type = other DNA
atgggagtccaaggctttcaggactacatcgaaaagcactgcccgagtgcggtcgttccagtggaacttcagaagctggctaggggatctctcgtgggcggaggacgacagagaccaccacagaccccactcaggctacttgtcgacgctgacaattgcctccatcgcctctatgggggattctacaccgactgggtatcagggggacagtggaatcatatgctgggctatttggcagcccttgccaaagcatgttttggcggtaatattgagctttttgtgttttttaacggcgctctagaaaaggccagactgcacgagtgggttaaacgccaaggaaatgagcgacaaactgcccaacaaattgtatctcacgttcagaacaaaggcactcctccccctaaagtgtggtttctgccccctgtttgcatggcccattgtatcagactggccttaatcagatttcacgttaaggttgctcaatctatcgaagatcaccaccaagaggttattggcttttgccgtgaaaacggtttccacgggctcgtagcatacgattccgattacgctctctgcaatatcccatattacttctccgcccatgccctcaagctgtcccggaatggtaaatctctcacaacctcgcagtatctcatgcatgaagtggcgaaacagttagatctgaacccaaatagattccccatcttcgcagccctgctgggtaaccacatcctcccagacgaggatttagccagctttcactggtcattgctgggcccagaacaccccctcgccagcctgaaagtgcgcgctcaccaactggtgctgccaccttgtgacgtggtcataaaggccgtggccgactacgtgcgcaatatacaggataccagtgaccttgatgcaattgccaaagatgtgtttcagcattctcagagcaggacagacgataaggtgatcaggtttaaaagagctatcggttattactctgccaccagcaagccaatgagcttccaccctcctcattatctggccgctcggcctggtccattcggaatgcctgggatggtgcctccccacgtccctccacaaatgctaaatataccacagacctccttacaggctaagcctgtggccccacaggttccatctcctggaggggcacccggacaaggcccatacccctattcccttagcgaacctgctcccctgactctcgatacttccggaaagaatctgaccgagcagaactcttacagtaatataccccacgagggcaaacataccccactgtacgagagatccagccctattaatcccgctcagtctggtagtccaaatcacgttgatagtgcttattttcctggttcaagcacctctagttcctctgacaatgacgaaggaagcgggggagctaccaatcacatcagcggaaataagatagggtgggaaaaaactggaagtcactcagagccccaggctcgaggggaccccggagaccagactaaggccgaaggctcgtccacggccagcagcgggtctcaactggcggagggtaaaggtagccagatgggaaccgtccagcctatcccctgtcttttaagtatgcctacccgtaaccacatggatataacaactcctcctctgccccctgtggcccctgaagtgctgagggtggccgaacatcgtcacaaaaagggcctcatgtacccctatatcttccacgtcttaaccaaggtcctgtcgaaaggcccatggagcggattctgctaccttatgagtggacacagttatgggtgttttgttttgctgagcttcttcgagccattcttctgtcttacaaatctcctcgagacaaagtttacattcccttttttaaatattgagtag

SEQ ID NO: 28617 - DNA, 1485 bp, synthetic construct
  misc_feature 1..1485: note = Description of Artificial Sequence: Synthetic coding sequence
  source 1..1485: mol_type = other DNA
ggcgagataaaaatagccgtctcaattgaggacgaagcaaataaggatctgcccccagctgctttattatatcggccagtccgccagtacgtgtacggagtcctgtttagcctcgccgagtcacggaagaaaactgaaagactcgccttcaggaagaaccgactaccaccagagttttctcccgtcatcatcaaagagtgggccgcatacaaaggcaaatcgccacaaacccctgaacttgtggaggcactcgccttccgagaatggacttgtccaaacttgaaaagactgtggttgggaaaggcggtcgaggataaaaacaggcgcatgagagcgtttctggcctgtatgcgcagtgacaccccagccatgcttaacccagctaacgttccaacgcatctgatggttctctgctgcgtcctgcgctatatggtgcagtggccgggagccaggatcctgagaagacaggaactagacgcctttttggcacaggccctgagcccaaagctttacgagccagaccagttgcaggagttaaagattgaaaatctcgaccccaggggcattcagctaagtgctttattcatgagcggggtggatatggctttgtttgccaacgacgcctgcgggcagcccatcccatgggagcactgttgtccctggatgtacttcgacggtaaactcttccagtctaagctgctgaaggctagccgggagaaaacacccttgattgacctatgtgacggacaggccgaccaggccgcaaaggtggagaaaatgaggcaatcagtgctggagggactgtcgttttctcggcagtcgcacaccctgccgttcccgcctcctcccgcacttcccttttacccagcttccgcctatccacgtcatttcggcccagtgccaccctcccaggggcgaggcaggggtttcgccggtgtccagccgatcccatcccaaggtggaaaactcgaaattgccggaacagtggttgggcactgggctggcagtcgaagaggcaggggtggcagagggccatttcctttacaagtggtgtcggtaggtggcccagcacgcggaaggccacgaggagttatctcgactccggtaataagaaccttcggcagggggggacgatactatggtcggggatataagaaccaggctgccatccaagggaggcctccttacgctgcctccgcggaagaggtggcaaaggagctcaagtccaaatccggtgaatctaagtcaagtgccatgagctcagatgggtccctcgcagaaaacggcgtgatggccgaagagaaaccagctccccaaatgaacgggtctacaggtgacgcccgtgcaccaagccattccgagtctgcattaaacaacgatagcaaaacttgtaacacaaatccgcacctgaacgccctctctactgatagcgcttgtcgaagggaagcagctttggaggccgcagtgcttaacaaagaggagtag

SEQ ID NO: 28618 - DNA, 1485 bp, synthetic construct
  misc_feature 1..1485: note = Description of Artificial Sequence: Synthetic coding sequence
  source 1..1485: mol_type = other DNA
taggtggcacagtcaatcgaggaccatcatcaagaagtaattgggttttgcagagagaacggctttcatgggctcgttgcgtatgattccgactacgcactttgcaacattccctactactttagcgctcacgccctcaaactatccagaaatggaaaatccttgacaaccagtcaatacttgatgcacgaagttgccaagcagctcgacctaaatcctaatagattccctatctttgcggcactgctggggaaccatattctgccagatgaggatctcgcttcattccactggtctctgcttggccctgaacaccccttggctagtttgaaggtcagagcgcatcagctggttctgccgccatgtgacgtcgtgatcaaggcagttgcggactacgttcgcaacattcaggacacctctgatctagacgcaattgccaaagacgtttttcagcattcacagagtcgcacagatgacaaagtcatcaggttcaaaagggccattgggtactattcagccaccagtaaaccaatgagtttccacccccctcattaccttgccgcacggcctggccctttcgggatgcccggtatggtcccccctcacgtgccgcctcagatgctcaacataccccagactagtctccaagccaaacctgtcgcccctcaggtaccttcgcccggaggagcgcctgggcaaggaccttatccatactctttatccgagcctgctccgctgacattagacacttcgggcaagaatcttactgaacaaaattcctactccaacattccacacgaaggcaagcacaccccattgtatgagcgaagctcaccaatcaatcccgcacagtctggatcccccaaccacgtggactcagcatactttccgggttccagcacaagcagctcgtctgacaatgacgaagggagtggcggagcaaccaatcacatcagtggtaacaaaatcggctgggaaaaaaccggcagccatagcgagccccaggcccgaggagatcccggagatcagactaaggctgagggttcgagtactgcatctagcggttctcagcttgcggagggtaagggcagccaaatgggcactgtgcaacccataccctgcttactctctatgccaacccgtaaccatatggacatcactacgcctccactccccccagtggcccctgaagtgctgcgggtggccgaacataggcacaagaaaggactgatgtacccatacatcttccacgtcttgaccaaaggtgagatcaagatagcagtgtcaatcgaagatgaagccaacaaagacctcccgcctgcagcactcctgtaccgacctgtgaggcagtatgtgtatggtgtgctgtttagtctagctgagagtcgaaaaaagacggagcggctggcctttcgtaaaaaccgcctgccaccagaatgcatgtactgcaataacccgctgttcgtctttctcggcacttcatag

SEQ ID NO: 28619 - DNA, 969 bp, synthetic construct
  misc_feature 1..969: note = Description of Artificial Sequence: Synthetic coding sequence
  source 1..969: mol_type = other DNA
atggtggccgacttggagctgcagcaggacctgatcgttcccctgggccatactcccagtcaggagcattttcttttcgagatctttagacggaggctacaagccctgacatccggctggtcagtagcggcttccctccagcgacagagggaactcctgatgtataagcgaattctgctgaggctgccttcaagcgtcctgtgtggaagcagttttcaggcggagcagcccattacggcacgatgtgagcagttttttcatctcgtgaattctgaaatgcgcaatttctgcagtcatggaggggcacttacccaagatattacagcgcactttttccggggtttgttaaatgcctgtctccgcagcagagacccaagcctgatggttgacttcatcttggccaaatgtcaaaccaagtgccctctgatcttgacatccgcactggtgtggtggccttctctggaacccgtgctgctatgcaggtggcgccgtcactgccaatctcccctgcctcgtgagctccagaaactacaagaggggcgtcagtttgcatcagattttctctcccccgaggccgctagtccagcccctaaccccgactggttgtctgcagcagccctccatttcgcaatacagcaggttagggaggaaaatatccgcaagcagttgaagaaattggactgtgaaagagaggagctgctcgtcttcctctttttttttagccttatgggactacttagcagccacctgacgtccaatagtaccaccgacttaccaaaggcatttcacgtttgcgcggctatcttggagtgcctggaaaagcggaagatatcatggctcgccctgttccagttaaccgagagcggcaagaagcacgccgctgaggcccagatgcgacgcgcagctctattcaggggtatcctgcagatggtgaagaacgagccatccctgcgcttcctggcaaagtag

SEQ ID NO: 28620 - DNA, 4368 bp, synthetic construct
  misc_feature 1..4368: note = Description of Artificial Sequence: Synthetic coding sequence
  source 1..4368: mol_type = other DNA
atgtcagacagctgggtgccaaattcagcgtcaggtcaggatccagggggacgcaggcgggcatgggccgagctcttagccggtagagtaaaaagggaaaagtacaaccctgaaagggcccaaaagctgaaggagtccgcagttcgtctgttacggtctcaccaagacctcaacgccttacttctggaagtggaaggcccactgtgtaagaagctttctttgtccaaggtgattgactgcgactctagtgaggcctacgctaaccacagctcatcgttcattggatctgcactacaggaccaggcttccagattgggtgtaccagttgggattttatccgcgggaatggtggctagctcagtgggccagatttgcacagcacctgccgagacgtcccaccctgtgctccttactgtcgagcagcggaagaagctctcctccttgttggagtttgcccagtacctgctcgcccatagcatgttttcaagactctccttttgtcaggaactgtggaagatccagtctagtcttcttttggaggctgtatggcatttacacgtgcagggtatcgtgtcactccaggaactactggagagccatcctgatatgcatgcagtagggagctggctattccggaacctgtgctgcctatgcgagcagatggaagccagctgtcagcatgcagatgtcgctagagccatgctcagcgacttcgtacagatgttcgtgctccgaggctttcagaagaatagtgatctcagacgcactgtcgagcccgagaagatgcctcaggttaccgttgatgtcctccagcgcatgctgatatttgctctggacgccctagcggctggcgttcaggaagagtctagtactcataagatcgtccgatgctggttcggtgtgtttagcggacacactctggggtcagtaatctctaccgatcctttaaagcgcttcttcagccataccctcacacagatcttgacccatagtcctgtgctgaaggcgtctgatgccgtccaaatgcagagggagtggagtttcgcccgaacgcaccccctgctaaccagcctataccgcagactgttcgttatgctgagcgcagaggagttggtgggccacctccaggaggtgctggagacacaggaggtgcattggcagagggtgcttagttttgtgtctgccctggtggtctgcttcccggaagctcagcagctgctggaagattgggtcgcccgtctcatggcccaggccttcgagagctgtcagctggatagcatggtgaccgccttcctggtggtgcgtcaggcagctcttgaagggccttccgccttcttatcctacgctgactggttcaaagccagtttcggtagcacacgcggataccacggatgtagcaaaaaggcattggttttcttattcacattcctgtctgaattggtgccttttgagagcccaagatatttgcaggtgcatattctgcaccctcccttggtccctggtaagtaccgaagtttattaactgattatattagtctagccaagacccgcctggcggacctcaaagtttcaatcgaaaacatgggcctgtacgaggatctgtcatccgccggagacatcaccgagccccactctcaggcactgcaggacgtcgaaaaagctatcatggtatttgagcataccgggaatatccctgtgactgtcatggaggccagcatattccgaaggccttactacgttagccactttcttccggctctcctgactcccagggtgctgcccaaggtacctgatagcagggtggccttcatcgaatcacttaagcgcgctgacaagatcccaccaagtttatactctacttattgtcaggcttgctctgccgcagaggaaaagcccgaggacgctgcccttggcgtaagagcagagcctaacagcgcagaagaacccctgggtcaacttactgcagcactgggggagctacgagcatctatgaccgatccgtctcaaagagacgtgatctctgctcaggtggccgtgatctctgagcggctgcgagccgtgctcgggcacaatgaagatgactcatctgtggagatcagcaagattcagctgtcaatcaacaccccgcgactggagcccagagagcacatggccgtcgatttattgctgaccagcttctgtcaaaacttgatggccgcaagctcggtggctccgccagaaaggcaggggccttgggcagccctcttcgtgcggactatgtgtggacgggttttgcctgcagtgttgactcgcctgtgtcagctcttacgtcaccagggaccatccctgagcgcccctcatgtattagggctcgctgcattggccgtccacctgggcgagtcacggtctgcgctacctgaagtcgacgtgggaccacccgcacccggagctggactcccagtgccggcactgttcgatagcctcctcacttgccgcaccagagactccctgtttttttgtttgaagttctgcaccgcggctatctcatatagtctgtgtaagtttagttcacagagccgagacaccttgtgtagctgcttgagccctggattaatcaaaaaatttcaatttctgatgttcagactgttttctgaagccaggcagcccctctcagaggaggatgtggcatccctgtcttggcgcccacttcacctgccctcagctgattggcaaagagctgccctgtccctctggacacacaggacttttcgcgaggtgctgaaggaggaggatgtacacctgacttaccaggactggctccatcttgaactggagatccagcctgaggccgatgcactaagcgacaccgagaggcaggacttccaccagtgggccattcatgagcactttttacctgagagctctgcttcaggaggctgtgatggagatctccaggccgcttgcaccatcctggtgaacgccctgatggattttcaccaatccagcagaagttacgaccactctgaaaactctgacctggtttttggcggaaggacaggtaacgaagatattatctcgagactgcaggaaatggttgcggacctagaactccaacaggatctcattgtacccctcgggcacaccccgagccaggagcacttcctgtttgagatttttcggaggcggctgcaagccctgaccagtggctggagcgtggcagcaagtctacaaaggcagcgtgaactccttatgtacaagcggatcctcttgcggttaccatcttccgttctgtgtgggtcgtctttccaggcagaacagcctattaccgcacggtgcgaacagttttttcacctcgtgaacagcgagatgagaaatttttgttctcacggcggagccctaacgcaggatatcactgctcattttttcagaggtctgcttaatgcctgccttaggagtcgcgatcctagtcttatggtcgattttatcctcgcgaaatgtcagactaagtgccctttgattctgacttctgctttagtctggtggcccagtctcgaaccagtgctgctctgtagatggagacgtcattgtcagtcgccccttccgagagagctccagaagctgcaggaaggcaggcaatttgctagcgacttcctcagcccagaagctgccagtcccgcacccaatccagactggctctccgcggcagcactccatttcgctattcagcaagtacgtgaagaaaatatcagaaaacagcttaagaagttagactgcgagcgtgaggaattgctggtctttctgttcttctttagcctcatggggctgctctcatctcatcttacttcaaattcaactaccgacttgcccaaggcattccacgtctgcgctgctattcttgaatgcttggaaaagcgaaaaatcagttggctggccctgttccaattaacggaatcagacctgaggctgggcaggcttttgttgcgggtagcgccagatcaacataccaggctgctccctttcgcattttacagccttctcagttacttccatgaagacgccgcaataagggaggaggcgttcttgcacgttgccgttgatatgtacctgaagctggtgcagctgttcgtagccggtgatacctctaccgtaagccctccagctgggcgaagtcttgagttgaagggccagggaaacccagtcgagctcataactaaagccaggctgtttctgctgcagttgatcccaaggtgtccaaagaagtcgttttcccacgttgctgagctcctcgcagatcgcggagactgtgaccccgaggtctccgcagcccttcagagcagacagcaggccgcaccagacgctgatctgtcgcaggagccccacctattttag

SEQ ID NO: 28621 - DNA, 894 bp, synthetic construct
  misc_feature 1..894: note = Description of Artificial Sequence: Synthetic coding sequence
  source 1..894: mol_type = other DNA
atgagcgatagttgggtgccaaactcagctagcggtcaggatccgggaggacgcaggagggcctgggcagagctgctggcgggtcgtgtgaaacgggagaagtacaaccccgagagagcccagaagcttaaagagtcggccgttcggctccttcggtctcaccaggacctgaatgccctgcttctcgaggttgaaggcccactgtgtaagaaactgagtctgtctaaagtgatagattgcgattcgtccgaagcctatgcaaaccactccagcagcttcatcggaagcgctctgcaagatcaggcaagtcgccttggcgtacctgtgggaattctaagtgctggcatggtggctagttccgttggccagatatgtaccgcgcctgctgaaactagccaccccgtgctgctgacagtcgagcagcgaaaaaagctgagctctctcctggaattcgcccagtacctgcttgcccatagtatgttttctaggctgtccttttgccaagaactgtggaagatccagtccagcctgctgctagaggcagtgtggcaccttcatgtgcagggcattgtttcccttcaggagttgcttgaatcacaccctgacatgcacgccgtgggtagctggctgtttaggaatctgtgctgcctctgtgaacagatggaggcttcatgccagcatgctgacgtggctagagctatgttgtcagacttcgttcagatgttcgttctacgtggcttccagaaaaactccgacctacggagaactgtagagcccgaaaaaatgccccaggtaactgtggatgtgctccagcggatgctcatcttcgccctcgacgccctggccgctggcgtacaggaagaaagcagtacacacaaaatcgtaaggtgctag

SEQ ID NO: 28622 - DNA, 909 bp, synthetic construct
  misc_feature 1..909: note = Description of Artificial Sequence: Synthetic coding sequence
  source 1..909: mol_type = other DNA
atgagcgatagctgggttccgaacagtgcctctggtcaagaccccggaggtagaaggcgcgcttgggcagaactcctggccggtagagtgaagagagaaaagtataacccagagcgcgctcagaaactgaaagagtcagccgtgagattactgcggtctcaccaggatctaaacgctctcctcctggaagtggagggtccgctgtgcaaaaagctttctctttctaaagtgatcgattgcgattcttcagaggcatatgcaaaccacagcagctcctttatagggtctgccttacaagatcaggctagcaggttgggtgttccagtgggcatcctgagcgcgggtatggttgcatcctcagtgggacaaatttgtactgctcctgccgagaccagtcatcctgttttgcttactgttgagcaaagaaagaaactgtccagtctccttgagtttgcacagtatctcttagcccacagcatgttttctcgtctatcattctgccaggagttgtggaagatacagtcgtccctgttgctggaagcggtatggcacttacatgtgcaaggaattgtgtccctgcaggaactgctagagtcacatccggatatgcatgctgtggggtcttggctcttccggaacttatgttgcctgtgcgaacaaatggaagcaagctgtcaacacgccgacgtcgccagagcgatgctgtccgactttgtgcagatgtttgtgctgagaggatttcagaagaactctgatctgagacgcactgtggaacctgagaagatgcctcaggtgaccgttgatgtcctccagcggatgctgatattcgccctcgacgcactggctgccggagttcaagaggaatcgtcaacacataaaattgtcagagcttccgcagctaggagttag

SEQ ID NO: 28623 - DNA, 798 bp, synthetic construct
  misc_feature 1..798: note = Description of Artificial Sequence: Synthetic coding sequence
  source 1..798: mol_type = other DNA
atgtccgactcatgggtgcccaactccgctagtggtcaagatcctggcggacgaaggagggcgtgggcggagctgctggcagggagagtgaaaagagaaaagtacaaccccgaaagagcacagaagctcaaggagtccgctgtaaggctgcttagatcacatcaagacttgaacgcactgttgcttgaggtggaggggccactgtgtaaaaagctgagcctgtccaaggtgatcgattgtgacagttctgaggcctacgctaaccacagttcatctttcatcgggagcgccctccaagaccaggcctcccggctgggagttcccgtcggaatactgtcagccggtatggtggcaagcagtgtcggacaaatctgcactgccccagccgaaactagtcaccccgtcctgttgactgtagagcagcgctccagtctcctgttagaagcagtgtggcacctgcacgtgcaggggatcgtcagcctacaggagctattagaaagtcatcccgatatgcacgcagttggatcttggctgttcaggaacctgtgctgcctgtgtgaacaaatggaggcgagctgccagcacgctgacgtcgcaagagccatgctcagtgatttcgtgcagatgtttgtgctacgaggattccagaagaactcggatctccgaagaactgtcgaaccggaaaaaatgccccaggtgaccgtggatgtcctgcagcgaatgctgatttttgccttagatgcacttgcagcaggcgtgcaggaggaaagtagtacccacaaaatcgtgaggtgctag

SEQ ID NO: 28624 - DNA, 1869 bp, synthetic construct
  misc_feature 1..1869: note = Description of Artificial Sequence: Synthetic coding sequence
  source 1..1869: mol_type = other DNA
atgtctcgccagaccaccagtgtagggagctcctgtctggacttatggcgggaaaaaaacgaccggctggtccgacaagccaaagtcgcacaaaattcgggtctgacactgcggaggcaacagctagctcaggatgcactggagggtctcagaggcctgctccactcacttcaaggcctcccagcagctgtaccagtccttccactcgaactcacagtgacctgtaactttatcatacttagagcaagtctcgcccaaggatttacagaggaccaggcacaggatatccagagaagcctggagagagtgttagagacccaggaacagcagggtcccagactggagcaggggctgcgagagctgtgggacagcgttttgagggcctcgtgtctgctgccggagttgctctctgccctccatcgattggtaggtctccaagctgccctgtggttgtcagcagaccgtctcggtgatctggcccttcttttggagacattaaatggatcccagtccggtgcaagtaaggatctccttctcctgctcaagacctggagtccgcctgctgaagagctggatgccccactaacattgcaagatgcccagggcctcaaggatgtgctgctgaccgcatttgcttatcgtcaagggctacaagagctgatcaccggtaaccccgacaaagctctgtcttccctgcatgaagctgcgtctggcttgtgccctcgtccagtgttggtgcaagtgtatactgctctcggcagctgccaccggaaaatgggtaacccacaacgggcactgctttacctcgtcgccgcactgaaggaggggagcgcttgggggcctccattacttgaagccagcaggctgtatcaacagttgggcgacaccaccgccgaactggagagcctcgaactcctcgtggaggcactgaacgttccttgctctagcaaggcaccacagtttctgatcgaggttgagttgttgctccctcctcctgacctggcctcgccactccactgtgggacacaatcccagacaaagcacatcttagcctcccggtgtttgcagactggtcgagccggtgacgcagctgaacattacctggacctgctggcgctgctcctggatagttccgaaccacgcttttcgcctcccccttcccctcccggaccatgcatgccagaagtcttcctggaagcagctgtcgccctaattcaggcaggcagggctcaggatgcacttaccctctgtgaggaacttttaagtagaacctcctcactactcccaaagatgtcacggttgtgggaggacgcccgtaagggcaccaaggaactgccctattgtccgctgtgggttagcgctacacatcttctgcagggtcaggcgtgggtccaactcggtgcacagaaggtagctatttccgagttttcacggtgtctcgaactcctgtttcgcgctacacccgaagagaaagagcagggtgccgcatttaactgcgaacaagggtgcaagagtgacgcagccctgcaacaactcagggcggctgccttaataagtcggggattagagtgggtggcaagtggtcaggatactaaagctttacaggacttcttgctgagcgtccagatgtgcccaggcaatcgtgacacatacttccatctactgcaaactctgaagcggttagataggagggatgaggcaactgcgctttggtggcggctggaggctcagaccaaaggatctcatgaggacgctctctggtctctacctctctacttggagagctatctcagctggatacggccttcagacagagatgcctttttagaggagttcagaacaagtttgccgaagtcatgcgacttgtag

SEQ ID NO: 28625 - DNA, 648 bp, synthetic construct
  misc_feature 1..648: note = Description of Artificial Sequence: Synthetic coding sequence
  source 1..648: mol_type = other DNA
atgtcccgtcagacaaccagcgttggcagcagctgcctggatctatggagggagaagaacgatcggctggttagacaggccaaagtggcgcagaactcaggactgaccctgaggcggcagcagctggcgcaggacgctcttgaaggtcttcggggacttctgcacagtctgcagggtttgcccgcagccgtgcctgtcctgcctctggaattgacggtgacctgcaacttcataattctgagggcctccctcgcccagggattcactgaagaccaagctcaggatatccagcgcagcctcgagcgggtcctggagacccaggagcagcaggggccacggctagaacaaggcctgcgggaattgtgggattctgttcttcgggcatcctgcctgctccccgagctgttatccgctttgcacaggctagtcggactgcaggccgcactctggctgtctgctgaccgtctgggagatctggccttattgctggagacgctgaatgggtcccagtccggggcatccaaagacctgttgttacttctcaagacctggagccccccagctgaagagctcgacgcacctctgactttgcaggacgcccagggtttaaaagacgttctgctgaccgcattcgcttaccggcagtag

SEQ ID NO: 28626 - DNA, 1347 bp, synthetic construct
  misc_feature 1..1347: note = Description of Artificial Sequence: Synthetic coding sequence
  source 1..1347: mol_type = other DNA
atgtcaagacagaccacgtcagtggggtcatcttgccttgatctgtggcgagaaaagaatgacagactcgtacggcaggccaaggtggcccagaattcaggccttacactcaggagacaacaactggcccaggacgccctagagggtttgcggggtttactgcactccctacaggggctcccagctgcagttccggtgctcccactggagctgaccgttacttgcaacttcatcatcctccgggcaagtctggcacaaggttttacagaggaccaggcacaggacatccagcggtctctggagagggttctggagactcaggagcagcaaggacctcgtcttgaacaggggttacgggagctgtgggattctgtcctgcgggcttcctgtcttctgcccgagctgcttagcgctctgcatagactggtgggcctccaggccgcactttggctcagtgccgatcgactcggcgacttggcccttctgctagagactttaaacgggagccagtcaggagcaagcaaggatctgcttttgctcctgaagacgtggagccctccagcagaagagctggatgctcccctgacgttacaggatgcccaaggtcttaaagacgtgcttctcacagcatttgcctatcgacagggcctacaggagctgatcacgggcaaccctgacaaagctctatccagcctccatgaggccgcaagtggtctgtgtccgaggcctgtgctcgttcaggtctatactgcattgggcagttgccacaggaagatgggaaatccgcagcgggctctgctctatctcgtcgccgcacttaaggaaggcagtgcctggggtcctcccctcctcgaggctagccggctttatcaacagctgggagacaccaccgccgagcttgaatctctcgaactgttggtggaagccctcaatgtcccttgctccagtaaggcccctcagtttcttattgaggtcgaactgctgttgccgccacccgatctcgctagcccgctgcactgtggcacacagagccaaacaaaacacattctggcgagccggtgcctgcaaactggacgagcaggcgatgccgctgaacattacctggacttgctcgcccttttgctggattcctcagagcccagatttagcccaccgccttctcctcccggaccctgcatgcctgaggtatttctcgaagccgcagtggccctgattcaggcgggacgtgcccaggacgctctgactctttgcgaggaactgctcagccgtaccagctcactgttgcctaagatgagcaggctgtgggaggatgccagaaagcgcacccgtggctcttttcaactgtag

SEQ ID NO: 28627 - DNA, 663 bp, synthetic construct
  misc_feature 1..663: note = Description of Artificial Sequence: Synthetic coding sequence
  source 1..663: mol_type = other DNA
atgctcggcatttggacccttctgccgttagttctcacaagtgtcgcacgcctctcaagcaaaagcgttaacgcccaggttacggacatcaacagtaaagggctggaactgcgcaaaacagtgaccactgtggagactcagaatctcgagggcctccatcacgatggccagttttgtcacaagccatgcccgccaggcgagcgcaaggcacgggattgcacagtaaacggcgatgaaccggattgcgtgccctgtcaggaaggaaaggaatacacggacaaggcccattttagctccaagtgccgcaggtgtcgcctgtgcgatgaaggacatgggttggaagtggagatcaactgtacgcgtactcagaacacgaagtgcagatgcaaaccaaattttttctgcaactccaccgtgtgcgagcactgcgacccgtgtactaagtgtgagcatggtatcatcaaagagtgtaccctaaccagcaacactaagtgcaaggaggagggcagtcggtcaaatttaggatggctctgcctgttacttctgcccatcccactaatcgtgtgggtgaagagaaaggaggtacaaaaaacatgcagaaagcacagaaaggaaaaccagggttcacacgagtctccaactctgaatccaatgttgacatag

SEQ ID NO: 28628 - DNA, 1008 bp, synthetic construct
  misc_feature 1..1008: note = Description of Artificial Sequence: Synthetic coding sequence
  source 1..1008: mol_type = other DNA
atgctcggaatttggaccttgcttccattagtgttaacctctgtggcccgtctaagcagcaaatcagtgaatgcgcaggtgaccgatatcaacagcaagggccttgaactgcgcaagaccgttacgacagttgagacccaaaacctggaggggctgcatcacgacggacaattctgccataagccttgccctcccggtgagagaaaagctcgcgactgcactgttaacggggacgagccggactgtgtcccgtgtcaagagggcaaggaatacacggataaggctcacttttctagcaaatgccgacggtgcagactatgtgatgagggacacggattagaggtcgaaattaattgtactaggactcaaaatactaagtgccgctgcaaacctaattttttttgtaacagcacagtttgcgaacattgcgacccctgtactaagtgcgagcacggcataataaaggagtgcacactcacatctaatactaagtgcaaagaagaaggctcacgatctaacttgggatggctgtgcctattactcctgcccatccctctcattgtctgggtgaagaggaaggaggtgcagaaaacatgccggaaacatagaaaagaaaatcaaggcagtcacgaatcccccaccctgaatcccgagacagtggccattaacctgtcggacgttgatttgtcgaaatatataactaccattgcaggggtgatgaccttgtctcaagtcaagggcttcgtgcgcaaaaacggcgtgaatgaggccaagatagacgaaataaagaacgataacgtccaggatactgccgaacaaaaggttcagctccttcggaactggcaccagcttcacggcaagaaggaagcttacgacactttaatcaaagatctgaaaaaagccaacctatgtacactcgctgaaaagatccaaactatcattctcaaggatattacttctgattccgaaaattcaaattttcgaaatgaaattcagagccttgtgtag

SEQ ID NO: 28629 - DNA, 945 bp, synthetic construct
  misc_feature 1..945: note = Description of Artificial Sequence: Synthetic coding sequence
  source 1..945: mol_type = other DNA
atgctgggcatctggactctcttacctctagtgttaacgagtgtagcaaggctgagcagcaaatcagtgaatgcacaggttacggacatcaacagcaagggcctcgaacttaggaaaaccgtgactacagtggaaacacaaaacctcgagggactacatcacgatggtcagttctgccacaaaccgtgtccgccaggggaaagaaaagcacgagactgtaccgtgaatggtgatgagcccgactgcgttccctgtcaggagggcaaagagtatacagacaaggcacacttctcatctaagtgccggcgttgccgcttgtgtgatgaagggcacggtctggaggttgagatcaactgcaccaggacccagaacactaagtgtagatgtaaacccaactttttctgtaacagcacggtgtgtgaacactgtgatccctgcaccaagtgcgagcacggcattatcaaggagtgcacattgaccagcaacactaaatgtaaggaggaggtcaagaggaaagaggtccaaaagacctgtagaaaacaccgcaaggaaaatcagggatctcacgaatcgcccacgctgaaccccgagactgtggcaattaacctcagcgatgtggacctatcaaaatatattacgacaatagccggagtcatgaccctgtctcaagtcaaaggattcgttcggaaaaatggagtcaatgaggccaaaattgacgaaatcaagaatgacaacgtgcaggataccgcagaacagaaagtgcagctgctgcggaactggcaccaactacatggaaaaaaggaggcctatgataccttgataaaagatctcaagaaagccaacttgtgtactctggcagagaaaatccagaccataattcttaaagacataacttccgattcggaaaactcaaattttcggaatgagatccaatccttggtctag

SEQ ID NO: 28630 - DNA, 735 bp, synthetic construct
  misc_feature 1..735: note = Description of Artificial Sequence: Synthetic coding sequence
  source 1..735: mol_type = other DNA
atgttgggcatttggacgttgctaccattggtgcttaccagcgttgcacggttgagctcaaagtcagtaaatgcccaggtgactgatatcaactcaaaggggttggaactgagaaagacagtgactaccgtcgaaacacaaaacttggagggattgcatcacgacgggcagttttgccacaaaccgtgtccccctggagaaagaaaggctcgcgactgcacagtgaacggtgacgaacccgattgtgtgccatgccaagagggcaaggagtacacggacaaggctcactttagtagtaagtgtcgcagatgccgactatgtgacgaggggcatggcctggaggttgaaatcaactgcaccaggacacagaatacgaaatgtcgctgcaagcctaactttttttgtaactctactgtctgtgaacactgtgatccctgcactaagtgcgaacatggaattatcaaagaatgcactctcacttcaaacaccaaatgcaaagaggaggggtcccgtagtaatcttggttggttatgtctgctactgctacctattcccctcattgtgtgggtgaagaggaaggaggttcagaaaacttgccgaaagcatcgcaaggagaatcagggaagccacgagtcacctactctaaacccggagaccgttgcaatcaacctttcagatgttgatttgtctaaataccaccactattgttggagccacgacacaaagtccagttag

SEQ ID NO: 28631 - DNA, 1089 bp, synthetic construct
  misc_feature 1..1089: note = Description of Artificial Sequence: Synthetic coding sequence
  source 1..1089: mol_type = other DNA
atgcttcgggtgtgcgctcaggggtggcacgcacagggacttcctcacgggaccaactcactgttgaaggggggtaccgagaccagtctgtctactcctacgaggctggtggtgttgacatcggtcgcgcgattgagcagcaagtccgttaatgctcaagttactgatatcaactctaaaggtctggaactgcgtaagaccgttaccactgtggagactcagaatctggaggggctccatcatgatggtcagttttgccacaagccttgtcctcccggagaacgaaaggcccgagattgtacagttaatggggatgaacctgactgcgtgccatgtcaagaaggaaaggagtatacagataaggcccacttctccagtaaatgtcggcgttgcaggttatgtgacgagggtcatggtctggaggtcgagatcaattgcacccgcacccagaacactaagtgtaggtgtaagccaaatttcttctgcaacagcaccgtgtgcgaacattgcgacccctgtacaaagtgtgaacacgggatcataaaagaatgtaccctcacatctaacaccaaatgcaaggaggaaggctcgcgatctaatcttggttggctctgcttgctcctcctgcctatacctctcatcgtgtgggtaaaacgcaaggaggtgcagaaaacctgtagaaagcaccggaaggagaaccaaggcagccacgaatctcccacactcaacccagtggggatcgaaattgacttctcggatgtggacctcagcaaatacattacaactattgcaggagtcatgactctttctcaggttaaagggttcgtgagaaaaaatggtgtcaatgaggctaagatcgatgagataaagaatgataacgtgcaggacactgctgagcagaaggtccagcttctccgtaattggcaccagttacatggtaagaaggaagcctacgatacgctaataaaagatctcaaaaaggccaatctgtgtacactggcagaaaaaattcaaacaattattttaaaggatatcacctccgactcagaaaatagcaattttaggaatgagatacaaagtctcgtctag

SEQ ID NO: 28632 - DNA, 627 bp, synthetic construct
  misc_feature 1..627: note = Description of Artificial Sequence: Synthetic coding sequence
  source 1..627: mol_type = other DNA
atggacccatttctggtgttactccattccgtgagttcctctcttagctcaagcgagctcactgagctgaaatttctttgtctgggcagggtgggaaagagaaagcttgagcgggtgcagtccgggctggacctgttcagtatgctgctggaacagaatgatcttgagcccggtcacactgagttattgagggagcttctggcctctctccggagacatgacctgcttcggcgagtagatgacttcgaagctggtgctgctgctggcgcagccccaggggaagaagacttatgcgcagcctttaatgtgatttgtgacaacgtgggcaaagattggcgccgattggctaggcagctgaaagtctctgataccaagatcgacagtatcgaggaccgctaccccagaaatctcaccgaaagagtgagagaatcgctgagaatatggaaaaacacagagaaggaaaatgccaccgttgcacatctggtcggagccttaaggagctgtcagatgaatctcgtggccgacctggtgcaggaagttcaacaagcgagagatctacagaatcgcagtggagcaatgtcccccatgagctggaatagcgacgcctctacgtcagaggcgagttag

SEQ ID NO: 28633 - DNA, 384 bp, synthetic construct
  misc_feature 1..384: note = Description of Artificial Sequence: Synthetic coding sequence
  source 1..384: mol_type = other DNA
atgcaacaaccctttaactatccctaccctcagatttactgggtggatagcagtgctagctctccttgggcacctccaggaacagtgctgccatgtcctacctctgtccctcgcagacccggtcaacgacgtcctccccctcccccacctcccccacctcttccgcctccaccaccccctccacctttgccacccctgcccctgcctcctctgaaaaaacgcggaaaccattccaccggcctttgcctgctggtaatgtttttcatggtgttagtggcactcgtggggctggggctcggcatgtttcagctgttccaccttcagaaggagctggccgagctaagagaggctacgcccgtccatcccttaaaaaaacggtcctag

SEQ ID NO: 28634 - DNA, 846 bp, synthetic construct
  misc_feature 1..846: note = Description of Artificial Sequence: Synthetic coding sequence
  source 1..846: mol_type = other DNA
atgcagcaacctttcaactatccgtacccacagatttattgggtcgattcaagtgcatcctccccctgggctccacccggaacagtgctcccctgtccgacgtccgtgccacgacggccagggcagaggcgccctcctccacctccccctcccccaccactccctccaccaccgcctcccccacccctgccaccgcttccgctacctcccctgaagaagcggggtaatcattcaaccggtctgtgtctcctggtcatgttcttcatggtgctcgtagccctagtcggcctggggttgggcatgtttcaattgtttcatctccagaaggaacttgctgagctgagagagagcacgtcccagatgcataccgcgtccagcctggagaagcagatcgggcatccaagtccaccacctgagaaaaaagaactgcgcaaagtggcccacctgacaggcaagagcaactctcgctccatgcccctggaatgggaagacacttacggaattgttctgctcagtggcgtcaaatacaagaaagggggacttgtgattaacgagacggggctatactttgtctactccaaagtctacttcagagggcagagttgcaataaccttcccctgtctcataaagtgtatatgcgaaattctaagtacccgcaggacctggtcatgatggaaggaaaaatgatgtcatactgcacgactgggcagatgtgggcccgttcatcatatttgggtgccgtgtttaacctaactagcgccgatcatctatacgtcaacgtcagcgaactgtcgctggttaacttcgaggaatcacaaacgttcttcggactttataaactctag

SEQ ID NO: 28635 - DNA, 13773 bp, synthetic construct
  misc_feature 1..13773: note = Description of Artificial Sequence: Synthetic coding sequence
  source 1..13773: mol_type = other DNA
atgggtagacatctcgcacttttgttacttctgcttctgcttttccagcactttggcgacagcgacggcagccagagactggagcagacacccctgcagtttacccatctggagtataacgtgacggtacaggaaaatagtgccgcaaaaacttacgtggggcatcctgtaaagatgggtgtgtatattacccatcccgcttgggaagtgaggtataagattgtatcaggtgactccgagaatctgttcaaagccgaggagtatattctcggcgacttttgtttcttgcggattaggactaaaggtggcaacactgctatactgaaccgcgaggtgaaggatcattacacgttgattgttaaggccctggagaagaatactaatgtcgaggctcggactaaggtcagagtgcaggtcctggacacgaacgaccttaggccgcttttctcacctacatcttatagtgtatcccttcctgagaacacagcaattcggactagtattgctcgcgtgagtgctacggacgcagatatcggcacaaacggtgagttctactattcttttaaggatcggacagacatgttcgcgatccacccaacctctggcgtgatcgtgttaaccgggagactggactacctggagacaaagttgtacgaaatggaaatactggccgctgaccggggtatgaagttatacggtagcagcggaatttccagcatggcgaaattgactgtccacattgagcaagctaatgagtgtgcccctgtcataactgcagttaccctgtctccctccgagctcgaccgggatcctgcttacgctattgtcaccgtagacgactgtgaccaaggggctaatggtgacatcgcaagcctgagtatcgtcgctggcgacctgctgcaacagtttcgcaccgtgcgatccttcccaggctctaaggagtataaggtcaaagcaatagggggaattgattgggactcgcacccttttggttacaatcttaccctccaggcaaaggacaagggtactccacctcagttttcatccgtgaaggttatacacgtcacctctccccagtttaaggccggacccgtgaagtttgagaaagatgtgtacagagcagaaataagcgaatttgcgcctccaaacactccagtagttatggtgaaggccatccccgcttatagccacctgaggtacgtcttcaagtccacccccggaaaggccaaattcagtttaaattacaacacaggcttgatcagcatcctggagcctgttaaaagacaacaggctgcccatttcgagttggaggtgacaacaagtgaccgcaaggcatctactaaggtgctggtcaaagtgctgggagccaatagtaacccaccggaattcacccagaccgcttacaaggccgcattcgatgagaacgtgcccattggaactacagtgatgtctctctctgccgtcgacccagatgagggggagaacggatatgtgacgtacagtattgcaaatctgaaccatgtcccttttgcaatcgatcacttcactggcgctgtgagcacctccgagaacttggattacgaactcatgcccagggtgtataccctgcggataagggcctctgactggggattgccctaccgcagagaagtggaggtcttggctaccatcacgcttaataacctgaatgataacaccccgttattcgaaaaaatcaactgcgaaggcaccatcccaagggacctgggtgtgggggaacagatcactacggtttccgccatcgacgctgatgagctgcagctcgtgcaataccagatcgaagcagggaacgaactggatttcttctcactaaacccgaattcaggtgtcctctccctaaaaagatctttaatggatggcctcggggctaaggtcagcttccattcactgagaatcaccgcaaccgacggagaaaatttcgctactccactatacatcaacatcacagtcgctgcttctcataagttggtgaatctacagtgtgaagagacaggcgtcgctaagatgctggccgagaaattactgcaggctaacaagttgcacaaccaaggagaagtggaggatattttcttcgacagtcattctgtcaatgcacacattccccaattcaggtcaacactccctacaggaattcaggtgaaggagaatcaaccagtagggtcttcagttatcttcatgaattcgaccgacctggacactgggtttaatggcaaacttgtgtacgctgttagcggtggaaatgaagattcgtgtttcatgatcgacatggagaccggcatgctgaaaattctaagtccccttgatcgggaaacaaccgacaagtacacactgaatattaccgtgtacgacttgggaatcccacagaaagcagcttggagactcctacacgtggtggtagtggatgcgaatgataacccaccagagtttttacaagaatcatattttgtggaggtctcagaggacaaagaggtccactccgaaataattcaggtcgaagccaccgataaagaccttggccctaacgggcacgttacctacagcatcgttaccgatactgacacattctcaatagatagtgtgacgggtgtagtgaatattgccaggcctctggatcgcgagctgcagcacgagcattccttgaaaatcgaggcacgtgaccaggctcgggaggagccacaactcttctctacggtcgttgttaaggtgtccctcgaagacgtgaatgacaatccccctacattcatccctcctaactaccgggtgaaagtgcgcgaagaccttcccgaaggaacagtaatcatgtggctggaggctcacgaccctgatctcggtcagtctgggcaggtgcggtactctcttcttgatcatggggagggcaattttgatgtggacaaactgtctggcgctgtcaggatcgtgcagcaacttgacttcgagaagaagcaggtgtataacctaaccgtgcgtgcgaaagacaaggggaaacctgtctcgctgtccagcacttgttatgtggaggtggaggtagttgacgtgaatgagaacctgcatccacctgtgttcagttctttcgttgagaagggcactgtgaaagaagacgcccctgtgggcagtttagtgatgactgtgagcgcgcatgacgaggacgccaggagggacggggagataaggtacagcattcgcgacggatccggcgtgggtgtttttaagataggcgaggagaccggggtcattgagacgtcagatcggctggatcgagaaagcactagtcactactggctcaccgtcttcgccaccgaccagggagtagtgccgttgtcctccttcatcgagatctatatagaggtggaggatgtgaacgacaacgcccctcagacctccgagccagtctactaccctgaaataatggaaaacagcccaaaggacgtgagcgtagtccagattgaggccttcgaccccgacagctcctctaacgataaattgatgtacaagattactagcggtaatccccagggattttttagtattcatcccaagactgggctgattaccactactagccgaaagctagaccgcgagcagcaggacgaacatatcctggaggttacggtgacagataatgggtcaccaccaaaaagcactattgcgagagttatcgtaaaaatattagacgagaacgataataagcctcaatttcttcagaagttctataagattaggctcccagagagggagaagcctgaccgtgaacggaacgctcggcgtgaacctctataccacgtgattgctaccgataaggatgaaggtccaaacgcagaaatatcttattcgatagaggatggcaatgagcacggtaagttctttattgagccgaaaactggtgtcgtaagctcgaaaaggttttccgcagcgggtgagtacgacatcctgtctatcaaggcggtggacaacggaagaccccaaaagtcgagcaccacccgcttacacattgaatggataagcaagcccaagccttctctggagcctatttcattcgaggaaagtttcttcactttcacagtgatggagagtgatcctgtggcccacatgatcggagtgataagcgtcgagcccccaggtatcccactatggtttgacattaccggtggcaactacgactcccattttgacgtggacaagggcaccgggaccattatcgtcgctaagcccctggatgcagaacagaagtctaactacaatctgacagtcgaagctactgacgggactaccacaattttaactcaagtgttcatcaaagtgatcgatactaatgaccatagaccacagttctctaccagtaagtacgaggtcgttattccagaagatacagcaccagagaccgagattttgcagatatcggctgtggaccaggacgagaagaacaagctgatctacaccctgcaaagctcgagggacccgctgtcccttaagaaattcagactggatcccgctactggttctctgtatactagcgaaaagctggaccatgaagccgtgcccgctcacctcacagtgatggttagggaccaggacgttcccgttaagagaaatttcgccagaatcgtggtgaacgtaagtgacaccaatgatcacgctccatggttcactgcctcatcttataaaggacgagtgtatgaaagtgcagctgtcggcagcgtcgttctccaggttactgcccttgataaagacaagggcaagaatgcggaggtgctatactccatcgagagcggcaccttcggtaacattggtaatagctttatgattgacccggtcctgggctcgataaaaacggctaaggaacttgaccgctcgaaccaggcagaatacgatctcatggttaaggcgacggacaaaggatcacctcctatgtcagaaatcacctccgtaagaatctttgtgactattgccgacaacgcatctcccaagttcacaagtaaggagtattctgtggagctctctgaaactgtcagtattgggagcttcgtaggaatggtgaccgcacattctcagtcgagcgtggtgtacgagataaaggatggaaacaccggtgatgcattcgacattaatcctcactcaggaacaatcattactcaaaaggcattggactttgaaaccttgcctatctacactctgattattcaaggcacaaacatggctggcctctctaccaatacgaccgttttggtacacctgcaggacgaaaacgataacgctccggtttttatgcaagctgagtatacagggctaatcagcgaatcagcatccattaacagcgtggtgttgacagatcgcaatgttcctttggtgatcagagctgctgatgctgataaagattccaatgcactgctcgtctaccatatcgtagaacctagtgtccatacatacttcgctatcgacagttctactggggctattcatacagtactcagtctcgactacgaagagactagtatattccatttcacagtgcaggtgcacgacatgggaactcccagattgttcgccgagtatgcagcgaacgtcactgttcacgttattgatattaatgactgcccaccggtttttgccaaacccctttatgaagcttctctgcttttgcctacgtataaaggcgtgaaggtgatcactgtgaacgctactgatgctgatagtagcgctttcagtcagctgatctactccatcactgaggggaatatcggggaaaagtttagtatggactacaaaaccggtgccttgacagtgcagaataccactcagctgagatctcgatacgagctgaccgtgagggccagcgacggccgatttgctggcctaacttccgttaagatcaacgttaaggaatcgaaggagagccacctgaaatttacacaggacgtgtattccgctgttgtgaaggagaatagcaccgaagcagagactttggccgtcatcacagcgattggaaatcctatcaacgagcccctcttctaccacatacttaacccagatcgcaggtttaagatttcaagaaccagcggagtgttaagcacaaccggcacgcctttcgacagagaacagcaggaggcattcgatgtggttgtcgaggtcacagaagagcacaagcctagtgccgtggctcatgtagtggtgaaggtgattgttgaggatcagaacgacaatgcccctgtatttgttaacctaccttactacgccgtcgtgaaagtggacaccgaagtgggtcacgtgattcgttacgtgacggccgtagacagggactctggtcgcaatggcgaggttcattattatctgaaagagcatcatgagcattttcagattggcccactaggcgaaataagtctcaagaagcagtttgagctagacactctgaataaggagtatcttgtgaccgtcgtcgccaaagatggaggaaatcctgcattttcagctgaggttattgttcccattaccgttatgaataaagctatgcctgtgtttgaaaagcctttttattctgccgaaatagctgagtcgatacaggtacacagccctgtcgtacacgttcaggctaattcccccgagggtttaaaggtcttttatagcatcacagatggcgacccattctcgcaatttactatcaatttcaatacaggcgtgataaatgtgattgccccacttgatttcgaagctcaccctgcttacaaactgtccattagagctactgattccctgacgggcgctcatgcagaggtgttcgtagacattatcgtggatgatatcaacgataatcctcccgtattcgctcagcaatcctacgccgtgaccctgagcgaggcctccgtgattggcacgagcgttgttcaggtgcgcgctactgactctgattccgagcctaatcggggtatctcctaccagatgtttgggaatcattcgaagtcacacgatcactttcacgtcgactcatccaccggcctgatatcattgctcagaaccctggactatgagcaatccaggcaacacactatcttcgttcgcgcagttgacggcggaatgcctactttaagttccgacgtcattgtgactgtggacgtgacagacctgaacgacaacccccctctctttgaacagcaaatttacgaggccagaatatctgagcacgctccccacggacattttgtaacgtgcgttaaagcctacgacgcagattcttctgacatcgacaaactgcagtattcaatcctgtcaggtaacgaccataagcattttgtgattgacagcgctacagggataattacactttccaatctgcacagacacgctctgaagcctttctacagtctgaacctttcggtgagcgacggtgtcttcaggagtagcactcaggttcacgtgaccgtcattggcggaaacctacactctccagcttttttgcagaacgaatacgaagtggaactggcagaaaacgcaccattgcacaccctggttatggaagtcaagaccactgacggcgacagcggcatatatggccacgtgacttaccacatcgtgaatgatttcgctaaagatcgcttctatatcaacgagcggggacagatcttcactctcgaaaagctcgatagggaaacccccgcagaaaaggttatctctgtgcgtctcatggccaaggacgccggagggaaggtggcattttgcacggtcaatgtcatattaaccgatgataacgataatgcgccacagttccgagcaaccaagtatgaggtcaacatagggtcctcagcagccaaagggacctctgtggtcaaggtgcttgcgtcggacgctgatgaggggtccaacgccgacatcacatatgccatcgaagcggattccgaaagtgtgaaggagaatctggagatcaataaactcagcggtgtcatcaccactaaggaatcactgataggcttggagaacgagttcttcacattttttgtgagggccgtcgacaatggtagtcccagcaaggagagtgtcgtcctggtgtatgtgaaaattcttccccctgaaatgcaactccctaaattttctgagcctttctacacttttacagtttcagaagatgtaccgattgggactgagatagatctcatccgagcagaacatagcggcacagtgctgtacagtctggtgaaaggcaacactcccgagagcaatagagacgagagctttgtgatagatcgccaaagcgggcgattgaagctggaaaagtccctcgaccatgagactacaaagtggtatcagttctccatcctggcacgctgcacgcaagacgaccacgaaatggttgcatcagtggatgtgagcatccaagttaaggacgctaatgacaatagcccagtgtttgagtcttctccttatgaggctttcatcgttgaaaacctcccgggtgggtcccgcgttattcagatacgagcttcagatgcggacagtggtacaaatggacaggtgatgtacagtcttgaccagtctcaatccgtggaggtgatcgaatcctttgccattaacatggagaccgggtggattactacgctcaaagagctagatcacgaaaaacgggataactaccagattaaggtggttgccagtgaccacggggagaagattcagctgtcgagcaccgcgatagtcgacgttactgtgaccgatgtgaacgacagcccgccacgcttcaccgcggaaatttataaagggaccgtgtccgaggatgacccacaaggtggtgtcatcgccattctgtctacgaccgatgcagattccgaagagatcaatcggcaggtgacctactttattaccggaggggaccctctggggcagtttgccgtggagactattcagaatgaatggaaggtgtacgtcaagaagccgctcgatcgagaaaagcgggataactatttgctcaccatcacagccactgacgggacatttagcagcaaagcgattgtcgaagtgaaggtgttggatgccaacgataactctcctgtttgtgagaaaactctgtactctgataccattcccgaagatgtgctgcccggaaagcttattatgcagatctccgcaacggacgccgacatccggagcaatgctgagatcacatacactctgttaggaagcggggctgagaagttcaaattgaacccagataccggagagttgaagacatcaactccactcgatcgcgaagaacaggctgtgtatcacctgttagtgagagcgactgacggaggaggaaggttctgccaagccagtatcgtgttaactcttgaggatgtaaatgataacgctcctgagttttcagccgatccgtatgcgatcactgtgttcgaaaataccgaacctggcaccttgctgaccagggtgcaggctactgacgccgatgccggactgaatagaaagatactttatagtctgatagattccgccgatgggcagtttagcataaacgagttgtccggtatcatacagctcgaaaagcccctcgacagagaacttcaggcagtttatacattatcattgaaagccgtggaccaagggctccctcgtaggctaacagccacaggaacggttatagtgagcgtactagacataaacgacaaccccccagtattcgagtacagggaatacggggcaaccgtgagcgaggacatcctagtcggcacagaggtcctgcaagtatacgcggcttctcgtgacatcgaagccaacgcagagattacttatagcattataagcggaaacgaacacgggaaattttctatcgatagtaagacaggcgcagtttttattatagagaatctcgactacgaatcctctcacgagtactatcttaccgttgaagccaccgacggcggtaccccttcactttctgatgtagcaactgtgaacgtgaatgtgacagacattaacgacaataccccggtatttagtcaggatacatatactaccgttatttctgaagacgcggttctggagcagagcgtgattacagttatggcagatgacgccgatggacccagcaatagccatatccattacagcataatagatggaaatcagggctcttcgtttactatcgatccagtgcgcggagaggtgaaggtcacaaaattgctcgacagagaaaccattagcggatatacgctcacagtgcaggcctcggacaacggcagcccccctcgtgtcaacacaaccacagtgaatatcgatgtgagtgatgtgaacgacaacgcccctgtgttcagccgaggcaactattctgtaattattcaggaaaataagcctgtcggtttctccgtgctgcagctggtggtcaccgacgaggattcatcacacaatggaccgccttttttcttcactatcgtgacagggaacgatgagaaagcctttgaagttaaccctcaaggcgttctgctgacctcaagtgcaatcaagcggaaggagaaagaccactacctgttgcaggtgaaagtggcagacaatggcaaaccacagctgtcttccttgacctatattgacattcgggtgatcgaggagtcaatctaccctccggctatattacctctcgaaatcttcattacttcatccggtgaagagtatagcgggggtgttatcggaaagatacatgctaccgaccaagacgtatatgacaccctcacctattcactggatccgcagatggataatctgtttagtgtgagctccaccggaggaaagctgattgcccataagaagctggacattggacaatatctgttaaacgtttccgttacagacggcaagttcaccaccgttgctgacatcaccgtacacattcggcaggtcactcaggagatgcttaatcataccattgccattcgttttgccaatctcacacccgaagagttcgtgggggactactggagaaattttcagagggcactccggaacattctcggggtgcggcgaaatgacatccagattgtgtccttacaatcctccgaaccccaccctcacttagatgtgcttctctttgtagaaaagcccggatccgctcagatctctacaaagcagctgctgcacaagatcaacagcagcgttaccgacattgaggagattatcggagtccgcatattaaacgtgttccagaaactctgcgctgggctggattgcccctggaagttttgcgatgaaaaggtgtcagtagatgagtcagtgatgtccacccactccacagctcgcctgtcctttgtcacgccaaggcatcaccgcgcagccgtgtgcctgtgtaaagaaggcagatgccctcccgtgcatcatggctgcgaagatgatccttgtcccgagggatctgaatgtgtctctgacccgtgggaggaaaagcacacctgcgtgtgcccgagcgggagatttggccagtgccctggaagctcgagtatgacactgaccggtaactcatacgtgaaataccgattaacggagaatgaaaacaagttggagatgaagctgaccatgagattacggacttattccactcacgcagtggtgatgtacgcccgagggactgactactccatcctcgaaatccaccatggcaggctacaatacaagtttgactgtggatctggacctggtattgtttccgtgcagtctatccaggtcaatgacggtcagtggcacgcggtcgctctagaggttaacgggaattacgcacgacttgtgctggatcaggtgcatacggcaagtggaactgcacccggaaccctaaagaccttgaacctggataattatgtcttcttcggtggacatatcagacagcaaggaaccaggcacggtaggtccccacaggtgggtaatggtttcaggggttgtatggactctatatatttgaacgggcaggagttgcccctcaattcaaaaccgaggtcatatgctcacatcgaagagtccgtggatgtgagcccagggtgctttctgaccgcgaccgaagactgtgctagcaacccatgtcaaaatggtggggtgtgcaatccctcccccgctggcggttattactgtaagtgctctgccctttacatcggaacacactgcgagatttcggtcaatccatgctcttccaagccctgcctatacggaggaacctgtgtagtggataatggaggttttgtctgtcaatgccgcggactgtacactggacagcgttgccagctatcaccatattgcaaagacgagccttgtaagaatggcggtacctgctttgattcgctagatggggctgtatgtcaatgtgattccggatttcgcggagaacggtgtcagagtgacattgacgaatgctcaggaaacccatgcctgcacggtgccctctgcgaaaatacccacggaagctatcactgcaattgttcccacgaatacaggggccgtcattgtgaggacgccgcacctaaccagtacgtgtctaccccgtggaacattggtctagccgaagggatcgggatcgttgtctttgtcgctggtattttcctattggtggtggtcttcgtgttatgcaggaagatgatttcccgcaagaagaagcaccaagccgagcccaaggataagcacctgggccctgccactgcgtttctccagcgcccttattttgactcaaagctcaacaaaaatatctattcggatatcccaccgcaggtgcccgtacgcccaataagttatacacctagcatcccatctgatagtcgcaacaatctcgaccgcaattcctttgagggatcggccatacctgaacaccctgagttttcgaccttcaaccccgaaagtgtccatggtcatagaaaggcggtggcagtgtgttcagtagcacccaatttgcctcctccccctccttccaattcccctagtgactctgactccatacagaagccgtcttgggattttgattatgacacaaaggttgtggacctcgacccctgcctttcaaagaagcccttagaggaaaagccttcccaaccctactctgctagagagtcactgagtgaggtacagagcctttccagttttcagtcggaatcctgcgatgacaatggctaccattgggacactagtgactggatgccctccgtgccgcttccagatatccaggaattcccaaattatgaggtgatcgatgagcagacacccctatattcggctgatcctaacgctattgacacagactactaccctgggggatacgatatagaaagcgatttcccccctccaccggaagatttccctgccgcagacgagttgcctcccctgcctcccgagttctccaatcagttcgagtcaatccacccacccagagacatgcctgcagcgggttccctaggttcctcgagccggaaccgtcagcgcttcaaccttaatcagtacctccctaacttctatcccttagacatgagcgagcctcagacgaagggtaccggggagaactcaacctgccgcgagccccacgctccttacccacctggttaccagagacatttcgaggcccctgcagtcgaatccatgcccatgtcggtatacgcctcaactgctagctgtagtgacgtgtcagcctgctgcgaggtggaatctgaagtcatgatgtctgactacgagtcaggagacgacggtcacttcgaggaggtgacaatcccgccactggattctcagcagcacactgaagtctag

SEQ ID NO: 28636 - DNA, 13767 bp, synthetic construct
  misc_feature 1..13767: note = Description of Artificial Sequence: Synthetic coding sequence
  source 1..13767: mol_type = other DNA
atgggcagacacttagcgctgctgttgttgctcctgctcttgttccaacatttcggcgactctgacggctctcagaggctggagcaaacaccactgcagtttacccacctggaatacaacgtgactgtgcaggagaactccgccgctaagacgtacgtggggcacccagtgaagatgggagtgtacattacacacccagcctgggaggtgcgttacaagatcgtcagcggcgactccgagaatctgttcaaagccgaggaatatatcctgggagatttctgtttcctgcgcattcggacaaaaggcggaaacaccgccatcctgaacagagaggtgaaagaccactacaccttaatcgttaaagcccttgaaaagaatactaatgtggaggcaagaaccaaggtccgtgtgcaggtcctcgatacaaatgatctgaggccgttgttcagccctacgagttactctgtgtcactgcccgagaatactgcgatacggactagtatcgctagggtgtcggccaccgatgctgatatcggcacaaatggtgaattttactactcatttaaggatcgcactgatatgttcgctatccaccccaccagcggagtcattgttctgaccggacgtcttgactaccttgagacgaaactgtatgaaatggaaattctggcggctgacagaggaatgaagctgtacggcagttcagggatatcgtccatggccaagctcacggtgcacatcgagcaagctaacgagtgtgctcccgtgattacggctgttaccctgagccccagtgagctggatcgggacccagcgtatgccatcgtgacagtggacgattgcgaccagggagcaaacggcgatatcgcgtcgctcagcatcgttgccggagacctgctgcagcaattccggacagtccgcagtttcccagggtctaaggagtacaaggtcaaagcaatcggcggaatcgattgggactcccatccttttggctacaacctcacattgcaggccaaggataagggcacgcccccacagtttagtagtgtcaaagtgatccacgtcacatctcctcagttcaaggcgggacctgtaaaatttgagaaagacgtttatcgtgcggaaatcagcgagtttgcccctcccaacactcctgtggtcatggtgaaagctatacccgcttactcccatttgcgctatgtatttaaatctacacccggaaaagctaaattctcattgaattacaataccggcctgatctctatcctcgaacccgttaagcgccaacaagccgcacactttgagctagaagttaccaccagtgatcgcaaggcctcaacaaaggtgctggtgaaggtgctgggggcaaatagcaatcctccagagttcacccagaccgcttataaagctgcttttgacgagaacgtccccataggaaccaccgtgatgtcgctttctgcagtggaccccgacgagggtgaaaatggatacgtgacttatagtatagcaaatctcaaccacgtccctttcgcaatcgatcacttcaccggggctgtgtccacttccgaaaacttagactatgaactgatgcccagagtgtacaccttgcggattcgggcatccgattgggggctgccttacagacgggaagtggaggtgctggccacaataacattgaataacctaaatgataatacccccctgttcgagaagatcaattgtgagggaaccatacctcgggatttaggtgtcggagaacaaattacgacagtgagtgctatcgacgccgatgaactgcagctggtacaataccagattgaagcgggtaacgaacttgacttcttcagtttgaaccccaactccggtgtgttatctctcaagcgctctctcatggacggactgggcgctaaggtgtcgtttcattctctgcgcataacggcgactgacggagaaaacttcgcgactcctttatatattaacatcaccgtcgctgcatcccataagctggtcaatttgcagtgcgaagaaactggcgtggcgaaaatgttggctgagaagctgttacaagcaaacaagctgcacaatcagggggaggtcgaagatattttcttcgattctcattccgtaaacgcccatatcccccagttcaggtctactctgcccactggcatccaagtcaaggagaatcaacccgtcgggagcagcgtaatcttcatgaacagcactgatctagacactgggtttaatgggaagctggtgtatgcggtgtcaggtgggaacgaagactcttgtttcatgatcgatatggagaccggcatgcttaaaatcctcagccctctggatcgagagactaccgataaatatactctgaatatcaccgtgtatgatcttggcattccacagaaagccgcatggcggctacttcacgtcgtggtggtcgacgctaacgataatcctccagagttcttgcaggaaagttacttcgtggaggtcagtgaggacaaagaggtccacagtgaaattatacaagtggaggctaccgacaaggacctcggaccaaacggccatgtgacatacagtattgtaaccgacactgataccttttcaattgactccgtgaccggggtggtcaacatcgcaaggccattagacagagaactgcaacacgagcattccctaaagatcgaggctcgcgatcaagcccgagaggagccacagctgtttagcaccgtggtggtgaaggtgagcctggaagatgtgaacgacaacccccctacattcattcctcccaattaccgggtgaaggtgagagaagatctgccagaaggtacagtgatcatgtggctggaggcccacgatccggatttggggcaaagcgggcaggtccgctacagtctcctggaccacggagaggggaacttcgatgtcgataagctctcgggcgcagtcaggattgtccagcaactcgatttcgagaagaaacaggtgtataatctgaccgtgcgagctaaagacaaaggaaagccagtgtctttatcctccacatgttatgtagaggtggaggtggtcgatgtgaatgagaacctgcaccctcccgtcttcagtagtttcgtggaaaaaggcaccgtgaaggaggatgctcccgtaggctccctagtgatgaccgtgagtgcacatgatgaagacgcacgacgcgacggcgaaattaggtatagcatccgcgacggcagcggtgtgggcgtattcaaaatcggggaagaaacaggcgtaatcgagacgtcagaccggttagatagggagagtacctcccactactggctaactgttttcgctaccgatcagggtgtcgtgcccttatcctcgttcatcgaaatctatatagaagtagaagacgtcaacgacaacgcccctcagacctccgagccggtgtattaccccgagatcatggaaaattcaccaaaagatgtttccgttgtgcaaattgaagcctttgacccagacagctcaagcaacgacaaactgatgtacaaaattacttcaggcaaccctcagggctttttttcaatacaccctaaaacaggccttattaccaccacgtctagaaaactggatcgcgaacagcaagatgagcacatcctcgaggttacggtcactgataacggctccccccctaagagcaccatcgctagggtcatcgtcaagatattagacgagaatgacaacaaacctcaatttctgcagaaattttataaaattaggctgcctgagagagaaaagccagaccgagaaaggaacgcccgtagagaaccactgtatcatgtgatcgccactgataaggatgaagggccaaatgctgagatctcctattctatagaggatggcaacgaacacggcaaattctttatcgagccaaagacgggagtggtcagctccaagaggttttctgctgcaggagaatatgacattctgtccattaaggccgtcgataacgggagaccgcagaaatcctccactacccggctccatattgaatggattagcaagcctaaaccttccctggaaccgatctccttcgaagagtctttttttacattcacggttatggaaagtgaccctgtcgcgcatatgataggggtgatctcagttgaacccccaggtatcccgctgtggtttgatattacaggcggaaactatgactcacactttgacgtcgataagggcacaggtacaatcattgtggccaagccactcgacgctgagcaaaagagcaattacaatctcacagtcgaagccacagacggcaccacaaccattctgacccaggtctttatcaaggtaatcgataccaatgatcaccggccacaattcagtacttctaagtacgaggtggtcatccctgaggatactgctccagaaacagagatcctccagatttctgcggtagatcaggacgagaaaaacaagttaatctacactttacagtctagtcgggatcccctctccctgaagaagtttaggctcgatccagccaccgggagtctgtacacaagtgaaaagctggatcatgaggcagtgcatcagcacaccctgacagtcatggtcagggatcaggatgtcccagtcaagagaaacttcgcacggattgtggtgaatgtgagtgacacaaatgaccatgcaccctggttcaccgcctcgtcatacaagggacgcgtctatgagagcgcagccgttggatcagttgtactacaggtgacagcactagataaagacaagggtaagaacgcggaggttctatactcaattgagtctgggaacataggcaattcctttatgattgatcctgttctcgggtctatcaagaccgcaaaggagttggataggtccaaccaggcagaatacgatctcatggtgaaagccacagacaagggcagcccgcctatgagtgagataacttccgttaggattttcgtgaccatcgccgataatgcctccccaaagttcacctctaaggaatactctgttgaactatcggagaccgtgtccattggctccttcgttgggatggtgaccgcccactctcagtcctccgtcgtctacgaaatcaaggatgggaacacaggagacgcctttgatattaacccacactccgggaccatcatcactcaaaaggcgttggacttcgaaaccctccctatttatacccttataatccaaggaacgaatatggccggattatctacgaacacgaccgtgctagtccatctccaggatgagaatgataatgcaccagtgtttatgcaagccgagtacactggcctgatcagtgaatccgcttctatcaattctgttgtactgactgaccgtaacgttccattggttatcagagcagcagacgccgacaaggatagcaacgccttactggtctaccacattgttgaaccaagtgtccacacttacttcgcgatcgatagttctactggcgctatacacaccgtactcagccttgattatgaggagaccagcatatttcatttcaccgtgcaagtacacgatatgggtacaccaaggttgttcgcggaatatgccgctaacgtcacagttcacgtcatcgacatcaacgactgccctcccgtgtttgccaagccgctgtacgaggctagcctgttgctcccaacctataaaggcgtcaaagtaatcaccgtcaatgccactgatgcggactcatcagctttcagtcagctcatttatagcattaccgagggaaacatcggagagaaattctccatggattacaagaccggagcactcacggtgcagaatactacccagctcagatctcgctatgaactgacggtgagggcgtccgacgggaggtttgccggattgacatctgtgaaaatcaacgtgaaagagtcaaaagagtctcatctcaagttcacccaggatgtctatagcgctgtcgtcaaggaaaacagtactgaggccgaaacacttgctgtgattaccgctattggcaaccccatcaatgagccgctgttttatcatatactaaaccccgacaggcgcttcaagatttcccgtacatcaggagttctgagcaccaccggaaccccgtttgaccgggaacaacaggaagcattcgatgtagtcgttgaggtgactgaggagcataaaccctccgcagttgcacacgtcgtggtgaaggtgattgtggaagaccagaacgataatgcaccggtcttcgttaatctcccctactacgctgtggtgaaggtagacaccgaagtgggtcacgtgattagatatgtcactgctgtcgaccgcgattccggcaggaatggagaggtacattattatctcaaagaacatcacgagcactttcaaatcgggccactgggagagatctctctgaagaaacaattcgaattggatacactgaataaggaatacctggtgactgtggttgctaaggacggtgggaacccagccttctcagcagaggtaattgtgccaatcacagtgatgaataaggctatgcctgtctttgaaaagcccttctactcggctgagatcgccgagtcaattcaggtccactcccccgtggtacatgttcaggccaatagcccggagggtttaaaggtgttttattccataacggatggcgatcccttcagccagttcaccatcaacttcaataccggggttatcaatgtgattgcgcctctggactttgaagcccaccccgcatataagctgtcaattagggcaactgatagtctgacaggggctcatgcggaagttttcgtggatatcattgtagatgacattaatgacaatcccccagttttcgctcagcagtcttatgcagtcacgctctcagaggcatctgtgattggtacgtcagtggtacaggtgcgagcaactgattcagactcggaaccaaaccgcggaatctcttatcaaatgttcgggaatcacagtaaaagccatgatcacttccatgtggacagctccaccggacttatcagtctgcttaggacactggattacgaacagagtaggcagcataccatcttcgtgagggccgttgatgggggaatgccaaccctttcctccgacgtaattgtgactgtggatgtgacagacctcaatgataacccgccactattcgaacagcagatctacgaggccagaatatccgagcacgcccctcatggccacttcgtgacctgcgttaaggcatacgatgccgactcctctgatattgacaaactccaatactcaatcctaagcgggaacgatcacaagcactttgttatcgatagcgccaccggaattattacgctgagcaatcttcataggcacgcactgaaacctttctattcactcaacttatcggttagcgatggggtgttcaggtcttccacccaagtccacgtcactgtgatcggcggaaacttgcacagtcccgcttttctacagaacgagtacgaagtcgaactggcagagaacgctccactccacacactcgttatggaggtcaaaaccaccgacggagattccggcatttatggacacgtgacctaccatatagtaaatgacttcgcgaaggacaggttttatattaatgagaggggtcagatcttcaccctcgagaaactggaccgagaaacacctgctgagaaagtaatttccgttcggttaatggccaaggacgcaggagggaaggtggcgttttgcaccgtgaacgtgatcctcaccgacgataacgacaatgccccacagttccgggcaacaaagtatgaggtcaatattgggtcttctgctgcaaaagggacaagtgtcgttaaggtactcgcctctgatgcagatgaggggtctaatgctgacataacatatgccatagaagcagatagtgagagtgttaaggaaaatctcgagattaataagctgtctggagttattacaaccaaagaatctctgatcggacttgaaaacgagttctttacattcttcgtgagggcagtcgataatggttccccatccaaagagtctgtagtgcttgtttacgtcaaaatcctccccccagagatgcagctgccgaagttttccgaacccttctacactttcactgtatctgaagacgtgccaatagggaccgaaatcgatctcatcagagccgaacacagcggtacggtgctgtacagtttggtgaagggcaatactccagaaagcaacagagacgagtcttttgtgatcgacagacagtctggcagactgaaactcgaaaaaagcctcgatcacgagaccactaagtggtaccagttctctatactggccaggtgtacccaagacgatcacgagatggtcgcaagtgtcgatgtcagcatccaggtgaaagacgccaatgataatagtcccgtgtttgaatcctccccatatgaggcttttatagtggagaacctgcctggcggaagccgcgtgatacaaatcagggcaagtgacgctgactctgggacaaacggtcaagtgatgtattcactggaccagagccagtctgtagaagtgattgagtcttttgcgatcaatatggagacaggatggattaccactctgaaagagctcgaccatgagaaaagggacaattaccagatcaaagtcgtagcttctgatcatggcgagaaaattcagctttcgagtacagcaatcgtggacgtgactgtcacagatgtgaatgatagcccaccacgattcacagccgagatatataaaggaaccgtcagtgaagatgacccacaggggggtgtaattgctatcctgagcacaacagatgccgactcagaggagattaaccggcaggttacctattttatcacgggtggcgatcctttgggacagtttgccgtcgagacaattcagaacgaatggaaagtttatgtcaagaagccgctggatcgggaaaaaagagataactacctgctaaccattactgccacagatggtacattctcatcgaaggccatcgttgaggtaaaggtgcttgacgctaatgataacagcccggtctgcgaaaaaactctgtatagcgacacaattcctgaagatgtgctacccggtaaactgattatgcagatctctgccactgatgctgacatacgcagcaatgcagaaataacttacacactcctcggaagcggagccgaaaaatttaagctaaacccagatacaggtgaactcaagacctccactccacttgacagagaggagcaggctgtgtaccacctgcttgtgcgagcaactgatgggggtggcaggttttgccaggcaagtattgtgcttaccttagaggacgtaaacgacaatgcacccgaatttagtgcagacccctacgcaatcaccgtgtttgaaaacaccgaacccggtactttactgacaagggtgcaggctacagatgcggacgccggactgaatcggaagattctctatagcctcattgattcagccgatggacagttcagtataaatgagctgtccggcatcattcaattggagaagcctctggacagggaactgcaagcagtgtatactctgtccctgaaggccgtggatcagggcctaccccgaaggctgaccgccaccggcaccgtgatcgtgtctgttctcgacatcaacgacaacccccctgtcttcgagtatcgggaatatggagccaccgtgtctgaagacatcttggtaggtaccgaggttctccaggtgtatgctgcgtctcgcgatatagaagcgaacgctgaaatcacctactccatcatctccggaaatgaacacggcaaattctccatcgattccaaaactggcgcagtatttattatcgagaatctggactacgagtcatcccatgaatactatttgacagtagaagccacagatggaggtactcctagtctaagtgatgtcgccactgttaacgtgaatgtgaccgatatcaacgataatactcctgtcttttcacaggatacatataccaccgtgatttcagaagatgccgttctagagcaatccgttatcaccgtgatggctgacgacgcagacgggccttctaactcccacatccactactctataattgatgggaaccagggttcgtccttcactatcgaccctgtccggggtgaggtgaaggttactaagttgctggacagggagactatcagcggttatactttgactgttcaggcctcggataacggcagccccccaagagtcaatacgaccaccgtcaacatcgacgtatctgacgtaaacgataatgctcccgtattcagtagaggtaactacagtgtcatcatccaggagaataagcctgtgggatttagcgttttgcagctcgtggttacagacgaagattccagtcacaacgggcctccatttttctttacgattgtgacaggcaacgacgaaaaggccttcgaagtgaatccccaaggcgtactactaacttcttccgctataaagcggaaggaaaaagaccactatctgttgcaggtgaaggtggctgataatgggaagccacagctgtcttctttgacatacatagacattcgcgtcattgaagagagcatctaccctccagccatcctcccccttgagatattcattacctcctctggtgaggagtactccggcggagtgatcggaaagatccacgccaccgatcaagacgtgtatgacacgctgacatatagtctggatccacagatggataatctgttttcagttagctctaccggtggaaagctgatcgcacacaaaaagctggacattggccagtaccttctcaatgtcagcgttaccgacggaaagttcacgaccgttgccgatataactgtgcatatacgacaggtgacccaggaaatgctcaaccacactattgcaattaggttcgccaatctgacacccgaggaattcgtgggcgactactggcgcaatttccagcgggctctcagaaacatcttgggcgtgcgccgtaacgacatacagatcgtatctctgcagagtagtgagccacacccacacctggatgtactgctgttcgtggagaagccgggaagcgcacagatttctaccaaacagctgctccataaaattaatagtagtgttaccgacattgaagaaataatcggcgttcgaatcctgaacgtgttccaaaaactctgtgcagggttagactgcccatggaagttttgtgatgagaaggtctctgttgatgagtcagtgatgtccacccattcgactgccaggctttcttttgtgacacctcgtcatcaccgagctgctgtgtgtctatgcaaggaaggcaggtgtcctccagtgcatcacggctgtgaagatgatccatgtcccgagggtagcgaatgcgtgtctgatccctgggaggagaaacacacatgcgtctgtccttctggcagatttggccagtgtcccggatctagcagtatgaccctgacaggaaatagttatgtcaaataccgactcacagagaatgagaataagttggagatgaagcttacaatgcggttaagaacctatagtacccacgcagtggtcatgtatgccaggggcacggactactccatcctggaaattcaccacggccgacttcagtataaattcgactgtggctccggaccgggtatagtcagcgtccaatcaatacaggttaatgacgggcaatggcatgcggttgcactcgaggtgaacggaaattacgcaaggcttgtgctggaccaagtgcacactgctagcgggactgcccctggaaccttgaaaactctaaacttggataactacgttttcttcggagggcacatccggcaacagggcacacgtcatggcaggtcgccccaggtgggcaatggctttcggggatgcatggattccatctatctgaacggccaggaactgccgcttaattctaagccacggtcctatgcacatattgaagagtcagtagacgttagtcctggatgctttctgacagcaactgaagattgcgcatctaacccttgccagaacggcggtgtgtgcaatcccagccctgcaggcggatactactgcaaatgttccgccctttatataggaacgcactgcgaaatctcagtcaatccatgcagtagcaaaccttgtctgtacgggggtacttgcgtcgttgacaatgggggttttgtatgtcagtgtagagggctgtacaccgggcagagatgccagctcagtccatattgtaaagatgaaccctgtaaaaatgggggaacatgttttgatagtctcgacggcgctgtctgtcagtgcgactctggctttcgaggggagaggtgccagagcgacatcgatgagtgtagtggcaacccatgtctgcacggcgctctctgtgagaatacccatggaagctaccactgcaattgtagccacgaatatcggggaagacattgcgaggacgccgctcccaaccaatacgtctctacaccttggaacatagggctcgcggagggcatcggaattgtggttttcgttgccggaatctttctgttagtagtggtcttcgtcctatgcaggaaaatgatctccagaaagaaaaaacaccaggcggaacctaaggataagcacctcggacctgcaaccgcctttctgcagcgaccctattttgattcaaagctcaataaaaatatatactccgacattccaccacaggtgcccgtgcgacctatcagctacacaccatctatacccagcgattctagaaacaaccttgaccgtaatagcttcgagggatcggccataccggagcacccagagtttagtacattcaacccagaatctgttcatgggcaccgtaaggccgtcgccgtctgtagtgtggccccaaacttaccgccaccccctccaagcaattctccttccgattccgattctatacagaagccttcatgggatttcgactatgacaccaaggttgttgacctggacccctgcctgtccaagaagcccttggaggaaaaaccttctcagccttactccgcgagagagtctctgtcagaggtgcagagtttatcctccttccagtctgaaagttgtgatgacaatggataccattgggatacgtctgattggatgccctctgtgcccctgccggacatccaggagttccctaactacgaagttatcgatgagcagaccccactttatagtgctgatccgaacgctatcgatacagactattatcctgggggatacgatatcgagagcgatttcccgcctcctcccgaggactttcccgctgcagatgagctcccacccctcccccctgagttttctaaccagttcgagagtattcacccgcctcgtgacatgccggctgccggatcccttggctcaagctcacgaaaccgccagaggttcaatctcaaccagtatcttcccaacttctatcccctggatatgagcgaacctcagacaaaagggacaggtgagaattcaacttgccgcgagccccacgcaccatatcctcccggttatcagcgccacttcgaggctccagcagttgagagcatgcctatgtctgtctatgcttccacggcctcttgttcggacgtgtctgcgtgctgcgaagtggagtccgaggtgatgatgagcgattatgagagtggcgacgacggacattttgaagaagtgactatccctcctctcgattcccagcagcacactgaagtgtag

SEQ ID NO: 28637 - DNA, 1467 bp, synthetic construct
  misc_feature 1..1467: note = Description of Artificial Sequence: Synthetic coding sequence
  source 1..1467: mol_type = other DNA
atgggacgccacctggcactgctgctgttgctcctgctgctttttcaacacttcggtgattctgacgggagccagaggctcgaacagaccccactccaattcacccatctggagtataatgttacagtgcaggaaaattccgcagctaaaacatacgtgggacatcctgtcaaaatgggggtgtacattacccatcccgcatgggaagtgaggtataagatcgtgtccggggattccgagaacttattcaaggctgaggagtatattttgggagatttttgctttctcaggattcgcacaaaagggggtaacaccgccatcttgaacagagaggttaaagatcactatacactaatcgtaaaagcgctggaaaaaaacactaatgtagaggccagaactaaggttagggtgcaggtcctcgacactaacgacctaaggccactgttcagccccacatcctactccgtgagccttccagagaataccgccataagaacatccatagccagagtgtctgcgaccgatgcagatataggcaccaatggcgagttctactacagcttcaaggataggaccgatatgtttgctatccatccaaccagcggcgtgatcgtgctgaccggcaggctcgactacctagaaactaagctctacgagatggagatactggctgccgatcgcggaatgaaattatatggaagctcaggcatctcttccatggccaagctcactgtgcacatcgagcaggccaacgagtgtgcgccagttattaccgcggttaccttgtcccccagtgagctggatagagatcccgcttatgctattgtgacagtggacgactgtgaccagggcgctaacggcgacattgcctctctcagtatcgtcgccggagacctgctgcagcaattccggacagtgcggtctttccctgggagcaaggagtataaagtgaaggccatcggagggatcgactgggactcgcacccttttggatacaacctcaccctgcaggccaaagataagggcacacccccacagttttcctcagtaaaggtcatccacgtcacttctccccagtttaaggccggacccgtgaagttcgaaaaagacgtgtacagagccgagatcagcgaattcgcccctccaaacacgcctgtagttatggtgaaggcaatccctgcatattcccatctgcggtacgtattcaagtcaacaccagggaaagccaaattcagcctcaattataatactgggctcatttcgatcttggagcccgtcaaaagacagcaggcagcccacttcgagcttgaggtgacaacatcggatcgaaaggcatctaccaaagtgctggttaaagtcctaggggctaattcaaatccccctgaattcacccaaaccgcctataaggcagcctttgacgaaaacgttccaattggcaccaccgtcatgagcctgtccgctgtgtag

SEQ ID NO: 28638 - DNA, 399 bp, synthetic construct
  misc_feature 1..399: note = Description of Artificial Sequence: Synthetic coding sequence
  source 1..399: mol_type = other DNA
atgtgcgatgctttcgtggggacatggaagctggtctcttcagagaatttcgacgattatatgaaggaagtgggagtgggctttgccacacgcaaggtggccggtatggccaagccaaatatgattatcagcgtcaacggagatgtcatcacaatcaaatcagagagcaccttcaaaaataccgagatatcctttatactcggacaggagttcgacgaagtcacagctgatgaccggaaagttaagtccaccatcacattggacggcggagtgttggtccatgttcaaaagtgggatggaaagtccacaactattaaacgtaaaagagaagatgataaactcgtggtcgaatgtgtgatgaaaggagtgacatccacacgtgtgtacgagcgggcttag

SEQ ID NO: 28639 - DNA, 7536 bp, synthetic construct
  misc_feature 1..7536: note = Description of Artificial Sequence: Synthetic coding sequence
  source 1..7536: mol_type = other DNA
atggaagaagtagtaattgccggaatgtcggggaagctccctgaatcggagaatctgcaggagttctgggacaacttgatcgggggtgtggatatggtcaccgatgatgaccggagatggaaagcgggtttatacggcctaccaagacgctcaggaaaactcaaagatctgagtcgcttcgatgccagcttttttggcgtccatccaaagcaagcacacacgatggatccccaactgcgcttgctgttagaggtgacctacgaggccatcgtagatggagggattaatcccgactcccttagggggacacacacgggggtatgggtgggtgtgtctggcagtgaaacaagcgaagccctgagtagagacccagaaactctcgttggctattccatggtgggatgccagagggccatgatggctaatcgtctgagctttttttttgactttcgcggacccagtatcgccctcgataccgcatgtagctcctcattgatggcactgcagaacgcctatcaggcgatccactctggtcaatgtcccgcagccatcgtgggcggaatcaacgtattgctgaagccaaacactagtgtccagttccttcgccttgggatgctgtccccagaggggacatgtaaagcttttgacacagccggtaacggatactgcagaagcgaaggtgtggtagccgtgctgctaactaagaaatcattagcccgtcgggtgtatgcaaccatcctgaatgccggtacgaataccgacggattcaaggagcagggagtgacattcccttcaggagatattcaagaacagctcattcgcagcctgtaccagtctgcgggagtggcccctgagtcttttgagtacattgaagcccatggcactggtactaaagtcggggatcctcaagagctcaacggaatcacccgagcgttgtgcgcaaccaggcaggaacccttacttataggctcaaccaagtcaaatatgggtcacccagaacccgcttccggactggctgcactcgcgaaggtgctcctctcactggagcacggactgtgggctccaaatctgcactttcactcgcctaacccggagatcccagccctcctggacggtagactgcaggtggtggatcaacccttgccggtcagggggggtaatgttggcatcaatagctttggattcggcggaagcaacgtgcatatcattctcaggccgaacacccaacccccaccagctcccgcaccccacgctacactgccacgacttctccgggcaagcgggcgaacacctgaggccgttcagaaattgctcgaacaaggtctgagacattcacaggatctggcatttctatctatgctgaatgacatagctgccgtgccagccactgcaatgcccttccggggttatgctgttctgggaggcgagaggggcggtcctgaggtgcagcaggttcctgctggcgagagacccttgtggtttatatgctctgggatgggaacccaatggagaggaatgggcctgagcctcatgcgattggatagatttcgtgattctatactaagaagcgacgaggcagtcaagccttttggcctgaaagtctctcagctactcctgagcaccgacgaatcaacctttgacgatatagtacattcctttgtctccctgaccgctatccaaatcggcctgatcgaccttctgagctgcatggggctccggccagacggtatcgtcggccatagtcttggagaggtcgcatgtggctatgcagatggatgcctctcccaggaagaggctgtgcttgccgcatactggagaggccagtgtatcaaggaggcccatctgccccctggggctatggccgctgtcgggttatcctgggaagagtgcaagcaacggtgtccacctggggtggtacctgcatgtcacaattccaaggataccgtgactatttcaggaccgcaggctcctgtgtttgagttcgtagagcagctgcgcaaagagggcgtgtttgcaaaagaagtccggaccgggggaatggcttttcacagctattttatggaggccatcgctcctcctcttctccaggaacttaagaaagtgatacgggagccaaagcctagatccgctcggtggctgtctaccagcatacctgaggcacagtggcattctagcctcgcacgcacttcatctgccgagtataatgtcaacaacctggtatcaccggtactttttcaagaggcattgtggcatgtgcctgagcatgcggttgtattggagatcgcccctcacgccctactgcaggcggtacttaaaaggggccttaagccatcctgtacgattattcctctgatgaagaaggatcacagggataacctggagttctttctggcaggaattggcagactgcatctcagcggcattgatgccaaccccaacgctctgtttccacctgtggagtttccagcgcctagaggcactcccctgatctcacctctcatcaagtgggatcatagccttgcttgggacgtcccggctgctgaagatttcccaaacggttctggatcgccaagtgccgcaatttacaatattgatacttccagcgagtctcccgaccactatttagtggaccacacgttagatgggcgagtcctttttcctgctactggctacttgagtattgtgtggaaaacgttggcacgggctttgggcctgggggtagaacagctcccagttgtttttgaggacgtggtgcttcaccaggcgaccatcctgccaaagactggaactgtgagtttggaagtccgcctactcgaagctagcagagcctttgaggttagtgagaatgggaatttggtagtgtctgggaaggtatatcagtgggacgatcccgatcctaggctttttgaccaccccgaatcaccaacacctaatccaacagagcccctgtttctcgcccaggcagaggtgtataaagaactgagattgcgcggatacgattacggcccacactttcaggggatcttagaagccagccttgagggggattctgggaggctcctgtggaaagataattgggtgtctttcatggataccatgctacagatgtcaatccttggttctgcgaaacatggtctctacctgcccactcgggtgactgctattcatatcgaccctgctacacatcgccagaagctctatacactccaggacaaggcccaagttgccgacgttgtggtgtctcggtggctgcgcgttacggtggctgggggagtgcacatttccgggttacacactgagtctgcccctaggagacagcaggagcaacaggtgcctatattggagaagttttgctttacaccccacaccgaagaggggtgcctgtccgagcgcgcagccctccaggaggagctgcagttatgtaaggggttagtgcaagccttgcagacgaaagttacgcaacaagggctgaaaatggtggtgccaggacttgatggggctcagatacctcgcgacccatcccagcaagagttacccaggctacttagtgctgcatgccgtctccaactcaatgggaatcttcagcttgaactggcccaggtactggctcaagaacgcccaaagctccccgaagaccctctgttgtccggattgctggactcccccgctttaaaggcatgtctcgatactgctgtggagaatatgccctctctgaaaatgaaggtggtcgaggtactggccggtcacggccacttatattcccgtattcccggtctgttaagcccgcatcccctgctacaactctcatacaccgccactgacaggcaccctcaagcgctggaggcagcgcaagctgagctgcagcaacatgatgtcgctcaggggcagtgggaccccgcagacccagctccttcagctctcggctccgcagatctcctcgtttgtaattgtgctgtggccgcactcggtgatcccgcatcagccctgagtaacatggtagcagctctccgcgagggcggatttcttttactgcacactttgctaaggggccatcccctaggcgacatcgtggcctttttgacaagtacagaacctcaatacggccaagggatactctcacaagacgcttgggagtcgttatttagtcgggtgtccttacgcctggtcggccttaagaaaagcttctacgggtccacgttgtttctttgccggagaccaacaccccaggactctcccatatttttgccggtggacgacaccagctttcggtgggtggagtcactgaagggcatcctggctgacgaggattccagcagacctgtttggttaaaggctatcaattgtgctacgagtggcgttgtaggtctcgttaattgtttacgaagagaaccaggaggaaatcgattgcgctgcgtgctcctgtccaatttgtctagtacatctcatgtgccagaagttgaccccggaagtgctgagttgcagaaggtgcttcagggtgatttggttatgaacgtttatcgggacggagcttggggcgcttttcggcattttttattagaggaagataagccggaagagcccactgcccatgcctttgtctccacattgactaggggtgatcttagctcaatccgttgggtatgctccagtctgcgacacgcccagcccacttgtccgggagcacagctgtgcacggtctattacgcatctctcaacttccgtgacataatgttggccacaggaaagctgagccctgacgcaatccctggcaaatggaccagtcaggactcactcctgggcatggaattcagtggtagggacgcctccgggaagagagtgatgggtctggtgccagccaaggggctagccacatctgtcctcctatcccctgatttcctgtgggatgttccttcaaattggacgttagaggaagcagccagtgttccagtcgtatattccaccgcttactacgcgcttgtggtgaggggtcgggtgcgcccaggagaaacactacttattcatagcggatccggcggtgtgggtcaagccgctattgcgattgccctatccttggggtgtcgggttttcacaaccgtcggcagcgctgaaaaacgggcttatttacaggcccgatttccacagctggactccacatcctttgccaacagccgagacacttcgtttgagcagcacgtcctgtggcataccgggggaaaaggcgtcgatcttgtgcttaatagtctggccgaagaaaaacttcaggcgagcgtgcgttgtctcgcaactcacggacgattcctcgaaattggtaagttcgacctgtctcagaaccaccctctagggatggccatttttctaaagaacgtcacctttcacggtgtactgctggacgcattttttaacgagtcttcggctgactggcgcgaagtgtgggcactcgtgcaggcaggcatccgggacggagtcgtgaggccactgaagtgtacggttttccatggggctcaggtggaggatgcttttcgatatatggctcagggaaaacacattgggaaggtagtggtacaggtgttggccgaggagccggaagccgtcttgaaaggagccaagcccaaattaatgagtgccatctccaagaccttttgcccggctcacaagagctacataattgcaggaggcctcgggggtttcgggttagaactggcccagtggctgatccagaggggggtccaaaaactggtccttacaagcaggtctgggataaggacaggctaccaggcaaagcaggtaaggcggtggcggaggcagggtgtccaggtccaggtaagcactagtaatatctccagtcttgaaggggcaaggggtctgatagctgaggccgctcagttgggcccagtgggaggagtatttaacctggccgtggtgctgcgggacggactgctagaaaaccagacccctgagtttttccaggatgtatgtaagcccaagtactccggtacactcaacctggaccgagttacgagagaggcttgcccagagctggattattttgttgtgttttcttcggtcagctgcggccgtggaaacgcaggacagagtaattatggtttcgctaattcagccatggagcgcatatgcgagaagcggagacacgaagggcttccaggcctggcggttcagtggggcgctattggtgacgtgggcattctggtggaaactatgagcaccaacgatacaattgtctccggaaccctgcctcaaagaatggcaagctgtttggaggtcctcgatctttttcttaaccagcctcatatggtcctgtctagcttcgtgctggccgagaaagcagccgcataccgagatcgagatagccagagagacctggtggaggctgttgcacatatccttgggattcgagacttagcagccgtgaacctggacagctctctggcagatcttgggctggattcactcatgtctgtcgaggtgcgccagactctagagagagaactcaatctagttctgagcgtccgcgaggttaggcagctgacccttcgaaagctgcaggagcttagtagtaaggccgacgaggcttctgagctggcatgtcccacccccaaagaagacggcttggcacagcagcagacacaattaaacctgcgctccttacttgtgaatcccgagggacccaccctgatgaggttaaattccgtgcaaagctctgaacgtcccctctttttggtgcaccccatcgagggcagcacaaccgtatttcattctctggccagccggttgtcaattcccacgtatgggctgcagtgtaccagggcagcacccctggacagtatccactccctggccgcttattacatagactgcataaggcaggtccagcccgaagggccttacagagtcgcagggtactcctatggcgcttgcgtcgcattcgaaatgtgtagccaactccaggctcagcagagccccgctccgacacacaattccctcttcctgttcgacggatcaccgacatatgttttggcctacacccagtcctaccgcgcaaaactcacaccaggttgcgaggccgaggcagaaacagaagccatttgttttttcgtacagcagtttaccgatatggaacataatagagtactcgaggcgctactgcctctgaagggtctggaggagagagtcgccgctgctgttgacttaatcattaaatctcaccagggactagatcgccaggaactgagctttgcagcaaggtccttttactataaactcagggccgcagagcaatacacaccgaaggcaaaataccacggtaacgtgatgcttctcagggcaaagacgggtggggcatacggcgaggaccttggcgcagactataatttgtcgcaagtgtgtgacggtaaagtgagcgtgcacgtcatcgagggggaccaccggacccttctggagggatcaggattagaatccataataagcattattcatagctcactagccgagccaagagtttctgtgcgcgagggataa

SEQ ID NO: 28640 - DNA, 2502 bp, synthetic construct
  misc_feature 1..2502: note = Description of Artificial Sequence: Synthetic coding sequence
  source 1..2502: mol_type = other DNA
atgtctatcctcggcagcgccaaacatggactgtacctgccgacacgcgtgaccgctatccacattgaccccgctacgcacagacagaaactgtacacgctccaagacaaagcccaggtcgctgatgttgtggtcagtcgctggcttagagtgacggtagctggcggagtccacataagcggcctacataccgagtccgccccacggcgacagcaggaacagcaagtgcctatcttagagaagttttgctttacccctcacaccgaggagggatgcttgtcagagcgcgctgcactccaggaggagctccagctgtgcaagggcctggtgcaggctctgcagaccaaggtgactcaacaagggctgaaaatggtcgtgcctggccttgacggagcccagatcccccgagatcccagccagcaggaacttcctcgcctattgtccgctgcctgtcgcctccaactcaatgggaatctgcagctcgaacttgcacaggtgctggctcaggagagacccaagctgcctgaggaccccctgctgagtggccttttggactctcctgccctgaaagcatgccttgataccgcggtcgagaacatgcccagcttgaagatgaaagttgtggaagtgttggcaggtcacggacatctgtactctcggattcccggactgttgagcccacatcctctgctgcagttatcctacacagcgaccgatcgccatccacaagccctggaagctgctcaggctgagttgcagcagcatgatgtggcccagggtcagtgggaccccgcagacccagcacctagcgcccttggaagtgcggacctgctggtatgcaattgtgcagttgccgctctgggggacccagccagtgcgctctctaacatggttgctgccctccgcgaggggggtttcctgttgctccacaccctcctgcgaggccatccactgggcgatatcgtcgccttcttgactagtacagaaccacagtacggacaaggcattttgtcacaggacgcttgggagtcactcttcagccgagtttctctcaggctcgtcggtctcaaaaagtcattctacggcagcacattgtttctatgtcggcgaccgaccccccaagatagccctatctttctccccgtggatgacacgtcctttaggtgggtggagagccttaaaggtatccttgcagatgaggattcttccagaccagtgtggctcaaagccataaactgtgccacctctggggtggttggccttgtaaactgtctaagaagggagccaggtgggaaccggctgaggtgcgtgctcctgtcaaacctatcttctacctcccacgttcctgaagtcgatcctggtagcgctgagctccagaaggtcctgcagggggaccttgtcatgaatgtctaccgcgacggagcttggggagcattccggcactttctgctggaggaggacaagcccgaggagccaacggcacacgcctttgtgtctactttgacacgaggggatttatcatctattcgatgggtgtgctccagcctgaggcacgcccagcctacatgccccggagctcagttatgcaccgtgtattacgcctctctgaacttccgggacatcatgctggctacaggaaaactgtcacctgacgctatccctggaaaatggacatctcaagattctctgctgggcatggagtttagtggacgcgacgcgagtggaaagcgcgtcatgggcctggtgccagccaaaggactagctacttcagtgctccttagtccggatttcctatgggatgtgccttcaaattggaccttggaagaagctgcctccgtccccgttgtgtactccacagcctactacgccctggttgtcagaggtagggtccggcctggggaaacgctgctcatccacagtgggagcggcggtgttgggcaggccgcaatcgccatcgcgctgtctcttggttgccgggtcttcacgacggtgggctccgccgaaaaaagggcttacctgcaagcaaggtttccgcagctcgactccacatccttcgctaatagcagggacactagtttcgagcagcacgtgctgtggcataccggcggaaagggggtggacttggtgctgaacagcctagccgaggaaaagctgcaggcctcagtgcggtgtctagccacacacgggcgatttctggagatcggcaaatttgacctgtcccagaaccaccctcttggtatggctatttttttaaaaaacgtgacattccatggagttttgctggatgctttttttaatgagtcctctgcagactggcgtgaggtgtgggctctagtacaggccggaatacgagacggcgtggttcgaccattaaagtgtactgtgtttcacggcgcacaggtggaggacgcattccggtatatggcccaggccaaggcatcgcaggcctggccctgtagtggcgctcctagcgccacatgggccttctggtggcgcaggtag

SEQ ID NO: 28641 - DNA, 1143 bp, synthetic construct
  misc_feature 1..1143: note = Description of Artificial Sequence: Synthetic coding sequence
  source 1..1143: mol_type = other DNA
atgatgttcagcgggtttaatgcagactatgaggcctcttctagcaggtgtagctccgctagtcccgcaggtgatagtctgagctattaccattctcccgctgattcattttcctccatgggtagtcctgttaatgcccaggacttctgtaccgacctggcagtgagctcggcaaattttatccctacagtgacagctatttcgacttcaccggaccttcaatggctggtgcagcccgcactcgtgtcgtcagtcgccccttctcagactcgcgctccccatccatttggcgtgccggcaccatccgccggagcctattcccgcgcaggtgtagtgaaaacaatgactgggggaagagctcaaagcatcggcagacgcggtaaagtcgagcagctttccccggaagaagaggagaagcgaagaatccgcagagagagaaacaaaatggcggcagcaaaatgtaggaacagacggcgagaactgaccgatacccttcaagccgaaaccgaccagctggaagacgagaagtccgcgctgcagacagagattgcaaatttgttgaaggaaaaggaaaagctggagtttatcctggcagcccaccgacctgcgtgtaagattcccgacgatctagggttccctgaggaaatgtctgtcgccagtcttgacttgaccgggggtctgccagaagtcgccacccccgagtccgaagaggcctttacactcccactgttaaacgacccagagcccaagccgtctgtcgagcctgtgaaatcaatttcaagcatggagctgaaaacggaaccatttgacgattttctctttccagcctcttccaggccttcaggatcggagacggcccgtagcgtacctgacatggatctgtccggtagtttctatgccgctgactgggaacctctccacagtgggtcgttaggcatgggtccaatggcaacagagttggaaccattatgtacccctgtcgtgacctgtaccccgtcttgtactgcctatacctccagttttgttttcacgtaccctgaggccgacagcttcccgtcctgtgctgcggcacatagaaaaggatcctcatctaatgagccctcctctgactcactctcaagcccaaccctactggccctgtag

SEQ ID NO: 28642 - DNA, 966 bp, synthetic construct
  misc_feature 1..966: note = Description of Artificial Sequence: Synthetic coding sequence
  source 1..966: mol_type = other DNA
atggaggagggccaatatagtgagatcgaggagctcccccgtcgaagatgttgtaggcggggaacccaaatcgtccttctaggcctggtgaccgccgctctgtgggccggattgctgaccctgttactgctgtggcactgggataccactcagagtttaaaacaactcgaggagagagccgcacgcaacgtttcccaagtgtccaagaatctggagtcgcaccacggagaccagatggcccaaaagtcccaaagcacgcagatcagccaagaactggaggagctgagagctgaacaacagcggctgaagagccaggatttagaactgtcgtggaatttaaacggcctacaggccgacttatcgtcgttcaagtcacaggaattgaacgaacggaacgaggcaagcgacctgcttgaaagactgagggaggaggttacgaagctgcggatggaacttcaggtgtcttcaggttttgtttgcaacacttgcccggaaaagtggattaacttccagcgcaagtgctactattttgggaaaggaaccaagcagtgggtccatgcccgttacgcgtgcgacgacatggaaggccagctagtctctatccactcccctgaagaacaggatttcctcactaaacatgccagtcacactgggtcatggatcggattgagaaacctcgatctgaagggggagtttatttgggtagatggaagtcacgtcgactacagcaattgggcccctggtgagcccacttcccggtcacaaggcgaagactgcgtgatgatgcggggttcaggcagatggaacgatgccttctgtgacagaaagttaggggcatgggtttgcgatcggctggcgacatgcaccccgcctgcttctgagggtagtgccgagagcatgggaccggactcccggcctgatcccgatggaagattgccaactcccagcgccccactgcactcctag

SEQ ID NO: 28643 - DNA, 963 bp, synthetic construct
  misc_feature 1..963: note = Description of Artificial Sequence: Synthetic coding sequence
  source 1..963: mol_type = other DNA
atgaatcctccgtcacaagagattgaagagttgcctcggagacgctgctgcagacgagggacccagattgtactgctggggctggtgacagcggctctgtgggcagggctcctaaccctcctgcttttgtggcattgggacactacccaaagtctgaagcagctcgaagaacgggcagcgagaaacgtgtctcaggttagtaaaaacctggagtctcatcatggggaccaaatggcgcagaagtcccaaagcactcaaatttctcaggaactggaagaattgagagccgagcagcaacgtctgaagtcccaggatctggaacttagctggaacctcaacgggctgcaggcagatctaagctcattcaaaagccaggaactgaatgaacgaaacgaggcttccgaccttcttgaacggcttcgggaggaagtcaccaagctgcggatggagttgcaggtttcttccgggttcgtgtgtaacacatgccccgagaaatggattaattttcagcgcaaatgttattattttggtaagggaactaaacaatgggttcacgcaaggtacgcctgtgatgacatggagggacagctggtgagtatccacagtcccgaggagcaagacttcctcacgaagcatgcatcccataccggaagttggataggactgcgcaacctcgatttaaagggtgaattcatctgggtggatggatcacacgtggactattccaattgggctcctggtgaaccaactagcagaagccagggtgaagactgcgtgatgatgagaggaagtggtagatggaacgatgccttttgcgacagaaagctgggcgcttgggtgtgcgaccgtctggctacctgtactccacctgcaagcgaaggaagtgctgagagcatgggccctgactcccgccctgaccccgatgggcgactgccaactccaagcgccccacttcactcctag

SEQ ID NO: 28644 - DNA, 1125 bp, synthetic construct
  misc_feature 1..1125: note = Description of Artificial Sequence: Synthetic coding sequence
  source 1..1125: mol_type = other DNA
atgtggttcctcaccaccctgctgctgtgggtgcctgtagacggtcaagtagacactacaaaagccgttatcacactgcagcccccatgggtcagcgtgtttcaggaagaaactgtcactctgcattgtgaggtccttcatttgcccggatcctctagtactcagtggtttctgaatgggaccgcaacacaaacatccaccccttcatacagaataacatctgctagcgttaatgactcgggggaatatcgttgccaacgcggattgtctggaaggtccgatcccattcagctcgagattcaccgtggttggctcttgttgcaggtcagtagtcgagtattcacagagggggagccactcgccttacggtgccatgcttggaaggataaactggtgtataatgtcctgtactaccgcaacggtaaggcattcaagttttttcactggaattcgaacctaacaatactgaaaactaacatttcccacaacggtacgtatcactgttccggaatgggaaagcatagatatacttccgcaggcatctccgtcacggtgaaagagctttttccagcccctgtgctgaatgcaagcgttactagtcctctgctcgaaggcaacctggttacactctcatgtgaaacaaagcttcttctccagcgccctggtcttcaactctatttctctttctacatgggctcgaaaaccctacgtggcaggaatacttcctcagaataccagattctgacagccaggcgcgaagactcggggctatattggtgtgaggccgcaaccgaggacggaaacgtactgaagcgctcacccgagcttgagttgcaggtactgggccttcagctgcctaccccagtatggttccatgtgctgttctacctcgcagttggtattatgttcctggtaaacacggtgctatgggttacaatccgcaaggaactgaaaaggaaaaaaaaatgggacttagagatctccctggattcggggcatgaaaagaaagtgatctcaagcctgcaggaagatcgccacctcgaggaggagctgaaatgtcaggagcaaaaagaggaacagctgcaggagggggtccacagaaaggagccacaaggcgcaacctag

SEQ ID NO: 28645 - DNA, 723 bp, synthetic construct
  misc_feature 1..723: note = Description of Artificial Sequence: Synthetic coding sequence
  source 1..723: mol_type = other DNA
atgtggttcctgacgacactgctgctctgggggtggttattgcttcaagtgtctagcagggtcttcacagagggcgaacccctagccctgagatgccatgcctggaaggataaattggtgtacaacgtgctttactatagaaacggaaaggcatttaaatttttccactggaattcaaacttaactattttaaaaactaatatcagccataacggcacttatcattgcagcgggatgggaaagcacaggtacacatctgctgggattagtgtgaccgtgaaggagctgttccccgcacctgtgctcaacgccagcgtgacatcacctctccttgaggggaatctggtcaccctaagctgcgagactaagctcctgctgcagcgccctggactccagctttacttttcgttttacatgggatcgaaaactctgcgcggtcgcaacacttccagtgagtatcaaatcctgactgccaggcgcgaggactccggcctgtattggtgtgaggcagccacagaggacgggaacgttctcaagaggtcacctgagctggagttgcaggtcctgggcttgcagcttcctacccctgtgtggttccacgttctcttctatttggccgtgggaatcatgttcctcgtgaacacggtgctgtgggtgacgatccgcaaagagctgaagcggaaaaagaagtgggacttagagatctctctggactcgggatag

SEQ ID NO: 28646 - DNA, 2469 bp, synthetic construct
  misc_feature 1..2469: note = Description of Artificial Sequence: Synthetic coding sequence
  source 1..2469: mol_type = other DNA
atgggattttcgagcgaactgtgcagccctcagggtcacggggtgctccagcagatgcaggaagccgaactgaggttgctagaagggatgcggaaatggatggcccaacgagtcaagtccgatcgcgagtacgcaggcctgctgcaccatatgtccctgcaagactcaggtggccaaagcagggccatatcgccagatagccctatcagtcagagctgggcggagatcacctcacagacagaggggttgtcgaggctactccggcagcacgccgaggatctcaattctggacccctgagtaagctgagcctgctgattcgagaaagacagcagctgcggaagacctattctgagcaatggcagcagctgcagcaagaattaacaaagactcattcacaggacattgagaaactgaaatcgcagtacagggcacttgcgcgtgactccgcgcaggcaaagcggaaatatcaggaggcgtctaaggacaaagaccgcgataaagccaaggataaatacgtccgttcgctctggaagctatttgcccaccataaccgctacgtgcttggagtgcgcgcagcacaattgcatcaccagcatcaccatcagctcttactgccagggctgctacgttccctccaggatcttcatgaggagatggcatgcatattgaaagaaattctacaggagtacctggagattagttctctcgtgcaggacgaggtcgtcgctatacatagagagatggctgccgcagcagccaggattcagcccgaagctgaataccaggggttcctgcgtcaatacggctccgcacctgatgtcccaccttgtgtcacgtttgatgagtcccttcttgaggagggagaaccgttagaacctggagagttacagctcaacgaacttactgtggaatcagttcaacataccttgacctcagtgaccgatgaactggccgtggcaaccgaaatggtattcagacgtcaagaaatggtgactcagctccaacaagagctgcgcaacgaggaggagaatacccaccccagagaaagagttcagctgctggggaaacggcaggtcctgcaggaggcactgcagggactccaagtagctttatgctcccaggctaagctacaggcccagcaagaactgctgcagactaaactggagcacctggggcctggggagcccccacctgtattgttattacaggacgacagacacagtacgagttctagcgagcaagaacgggaaggaggacgcacgcccacactggagatcctcaagtcgcacatttctgggatcttccggcctaagttcagcctgccgccaccactgcaactgattccagaggtgcagaagcctctccatgagcagctctggtatcacggcgcaattccgagggcagaagtggccgagctgcttgtgcacagcggtgactttttggtgcgcgaatcgcagggcaaacaggaatatgtgttatcagtgctgtgggacggcctgcctagacacttcattattcagtcactggacaatctctaccggttggaaggcgaggggttccctagcatcccactcctcatcgaccatctgctaagtacccagcaacccctgactaaaaagtctggcgtagtgctacaccgggctgtgcctaaagataagtgggtgctaaaccatgaggatcttgtattaggggaacagatagggaggggcaacttcggcgaggtttttagcggtagattgcgtgccgataataccctcgtggctgtgaagtcatgccgcgagactctgccccctgacctgaaggcgaaattcctacaggaggcccgaatattgaagcagtatagccatccaaacatcgtccgcctcatcggcgtatgcacgcaaaagcagcctatatacatagttatggagttagtccaaggcggagactttctaacttttcttcggacggagggggcacgcctgcgagtgaagactctactccaaatggtgggggatgccgctgcgggaatggagtatttggagagcaagtgctgtattcaccgggacctggctgctagaaattgcctggttactgagaagaacgtgttgaagatttctgattttgggatgtctagagaagaggccgacggggtgtacgccgcaagtggcggattgaggcaggtaccagtaaaatggaccgccccagaggccctcaattacggtcgctatagctcggagtccgacgtgtggagttttggaatccttctgtgggagactttctccctcggcgcatcaccctaccccaatctgtctaatcaacagactcgcgagtttgtggaaaaaggcggaaggctaccctgccctgagctgtgcccagatgcagtgtttcgactgatggagcaatgttgggcttatgaacctgggcagcgcccttcatttagtaccatttatcaagaattgcagtccatacggaagcgtcaccggtag

SEQ ID NO: 28647 - DNA, 2295 bp, synthetic construct
  misc_feature 1..2295: note = Description of Artificial Sequence: Synthetic coding sequence
  source 1..2295: mol_type = other DNA
atgggcttcagctctgaactgtgttcacctcaaggccatggggttttgcagcagatgcaagaggcagaacttcggctcttagaaggaatgaggaagtggatggctcagcgggtaaaatccgacagagaatacgccggtctcctacaccacatgtcactgcaggactcaggagggcaatcaagggccatcagtcccgatagccctatatctcagacccactcccaggatatcgaaaaattgaagtctcagtacagagcactggccagggatagcgctcaggccaagcgtaagtaccaggaggctagcaaggacaaggacagagacaaggcaaaagataaatacgtgagatcactttggaagctgtttgcccaccacaatcggtatgttctaggagtgagggcagcccaattgcatcaccaacatcaccaccaactgctgttgcctggcctgctgaggtcacttcaggacctgcatgaggagatggcatgcatcctgaaggagatcctccaggagtacctggaaatcagctctctggttcaggatgaagtggttgccatccatcgggagatggcagccgctgccgcacgcatccagcctgaggccgaataccagggattcctgcgtcagtacggatcagctccggacgtccccccttgtgttacctttgacgagagcctcctggaggagggcgaacccttagagccgggtgaactccaactgaatgagctgactgttgagagcgtccagcataccttaacttccgtcaccgatgagctggccgtcgcaaccgagatggtgtttcgacgccaggaaatggtcacacaactgcagcaagagctgcgcaacgaagaagagaatactcatccccgtgaacgggtccaactgttggggaaacggcaagttctgcaggaagccctacagggattgcaggtggcactgtgcagtcaagctaaactccaagctcagcaggagctgctccagactaaactcgaacatctcgggccaggcgaaccaccgcctgtgcttctgcttcaagacgaccggcactccacgtctagcagcgaacaggaaagagaaggcggacggaccccaactctcgaaatcctaaaatctcatatttccgggatttttcggccaaaattctccctgcccccaccgctacagcttattcctgaagttcaaaagccccttcatgagcagctctggtatcacggggctataccaagagccgaggtcgccgagttgctggtgcactccggagatttccttgtgcgggaatcacagggtaaacaagaatacgtccttagcgtcctctgggatggactgccacgacacttcataattcagtcacttgataacctgtatcgtttagaaggggaagggtttccaagcatccccttattgattgaccatctgctttcaactcagcagcctcttactaaaaaaagcggagtggtgctgcacagggcagtgcccaaagataaatgggtgctgaatcatgaggatttggttttgggtgaacagattgggaggggcaacttcggagaagttttcagtggacgtctgagagccgacaacaccctggtagctgtgaaatcctgtagggaaactctgccaccagacctaaaggccaagtttctgcaagaagcccgtattctgaagcagtacagccaccctaacatcgttcggcttattggcgtttgtacccagaaacagcctatttatattgtcatggaattagtccagggcggtgactttctcactttcttacggaccgaaggagcacgcctcagggtgaaaacattgctccagatggtcggcgatgcagccgctggcatggaatatctggaatcaaaatgctgcatccatagggacctcgccgctagaaattgcctggttactgagaaaaacgtgctcaagatctcagactttggaatgtccagggaagaggcagacggggtgtacgcagctagtgggggtttgagacaagtgccagttaaatggactgcgcctgaagctctgaattatggcaggtattccagcgaatcagacgtttggtctttcggtatccttctttgggagactttctcacttggcgctagtccatatccgaacctttcaaatcagcaaactagagagttcgtggaaaaggggggaaggctgccttgtcccgaactctgcccggacgctgtctttaggctcatggagcagtgttgggcttacgaacccggtcaaagaccatccttttctacaatctaccaagaactgcagtctatccggaagcgacacagatag

SEQ ID NO: 28648 - DNA, 2046 bp, synthetic construct
  misc_feature 1..2046: note = Description of Artificial Sequence: Synthetic coding sequence
  source 1..2046: mol_type = other DNA
atgggtttttccagtgagctgtgtagtccccagggccacggagtcctgcagcaaatgcaggaagctgaactgagacttttggagggcatgaggaaatggatggcccaaagagtcaaatctgacagggagtacgctgggcttctgcatcatatgtccttacaggactctgggggtcagagccgggcaatcagtcctgatagtccaatttctcagacacattcgcaagacatcgagaaattgaaatcccaataccgcgctctggccagagactctgcacaggctaaacggaaataccaggaggcttctaaagataaggatcgcgataaggcaaaagacaagtacgttaggtctttgtggaagcttttcgctcaccacaatcggtatgtcctgggggtgagagctgcgcaactgcaccaccaacatcatcaccagctgttactgcccggtctcttacgcagtctgcaggaccttcacgaagagatggcttgtattttgaaagagatcctacaagagtatttagagatctcctccctcgtccaggatgaagtagtggccattcatcgggaaatggcagcagcagcagcacgcattcagccggaagcagagtaccaagggtttctgcgacagtacggatcagcgccagatgtgcctccatgcgtgacatttgacgagtccctgctggaggagggtgagccccttgagcccggagaactccaattgaatgagctcactgtggagtccgtgcagcatacccttacgagcgtcactgacgagctggcagtggccacagaaatggtattcagacgccaagaaatggtgacgcaattgcagcaagaactacggaacgaggaagaaaatacgcatcctagggagagagtccagctcctgggtaaacgtcaggtcttgcaggaagctcttcaggggttgcaagtggctttatgctcgcaggccaaactgcaggcacagcaggaactgctgcaaactaagcttgagcacttgggaccaggagagccccctcctgttctgctccttcaagatgataggcacagcaccagctctagcgagcaagagcgggaagggggaagaaccccaaccctggaaatcctgaagagccatatcagcggcattttcagacccaagtttagtaacctatatagactcgaaggcgagggattcccatcaattcccctgcttattgatcatttgctctctacacagcaacccctgacaaaaaagtccggggttgtcctgcatcgcgcagtgcccaaggacaaatgggtgctcaaccacgaagatctcgtccttggtgagcaaattggacgtggtaactttggcgaggtattctccggcaggctgcgcgcagacaacactctcgtggcagtgaagtcttgccgtgaaaccttgccccctgacctcaaggccaagttcttgcaggaagccagaagcagcccatccacctcgtcatggagtctgtgcagagggtcttcacctcctgcaggtggcgatttccttaccttcctccgcacggagggcgctaggttacgggtgaagactttgctgcagatggttggcgatgccgctgcgggaatggagtacctagagtccaagtgctgtatccatcgggacctggccgctcggaattgtctcgtcactgagaagaatgttctcaaaatctctgattttggtatgagtcgagaggaagctgatggcgtttatgccgcatccggtggactgagacaagtgcctgttaaatggacggcaccagaggcactcaattacggtagatacagcagtgaaagcgacgtctggagcttcgggatactgctttgggagacttttagcctcggcgctagtccctatcccaatctctctaatcaacagactcgcgagtttgtggaaaaaggagggaggttgccatgcccggaactgtgccccgacgccgtgttccggttaatggagcagtgttgggcatacgagccaggacaaagaccaagcttctcgaccatctaccaagaacttcagtctattcgcaagcgccaccgctag

SEQ ID NO: 28649 - DNA, 2085 bp, synthetic construct
  misc_feature 1..2085: note = Description of Artificial Sequence: Synthetic coding sequence
  source 1..2085: mol_type = other DNA
atgggtttctccagcgagctatgcagcccacaggggcatggagtcttgcaacagatgcaagaagccgaactgcgcttgctcgaggggatgcgcaagtggatggcccagagagtgaaatcagatcgggaatacgctggactgttacaccatatgagcttacaagattctggcggtcagtcgcgcgctatcagcccggactctccaattagccaaacgcatagccaggacatcgagaagttgaagagccagtacagggctctggctcgggactcagcccaggctaagcgaaagtaccaggaggcttcaaaagacaaggatagagacaaggccaaggacaaatatgtgcgctccctgtggaaactctttgctcaccacaacaggtacgtgctgggggttcgagctgcccagctgcaccaccagcaccaccatcaactgttgctcccgggattgctgaggtcactacaagatctgcatgaggagatggcctgcatactgaaagagatcctgcaagagtacctggagatctctagcctggtccaggacgaggtggtggcgattcacagggagatggctgccgctgctgctcggatccagccagaagccgagtaccaggggtttctgcggcagtatggatccgcgccagacgtcccaccgtgtgtgaccttcgatgagagtctgctcgaagagggcgagccactggagccaggtgagctccagttaaacgagttaacggtggagtctgtgcagcacactctcacgagcgtgaccgacgagttggccgtagccaccgaaatggtttttcgccgacaggaaatggtaacacagctacagcaggagttgcgcaatgaggaagagaatacgcacccacgtgagagggtgcagctgttggggaagcgtcaagtcctgcaagaagctctgcagggactccaggttgccctgtgtagtcaggcgaaattacaggcccagcaggaactgctgcagacaaagctcgagcatcttggccctggtgagcccccacctgtcttattacttcaggatgatcgccatagcacctcctcatcagaacaggagcgagaaggcggaagaaccccaacactggagatcttaaagagccacatcagcggtatatttaggcccaagttctccaatctttaccggctggagggcgaggggttccccagcatccctctcctcatcgatcatctgctcagcacacagcagcctctgacgaagaagtccggcgtggtcctacaccgagccgtgcccaaagacaagtgggttctcaatcatgaagaccttgtgctcggcgaacaaatcgggagaggcaattttggagaagtcttctccggacggctgagggcagacaacacgctggtggcggtgaagtcctgcagggagaccctccctccggaccttaaagccaaattcctgcaggaagccaggatactgaagcagtactcccatcctaatatcgtgaggctgattggagtctgtacccaaaagcagcctatatatatagtgatggagctggtgcaagggggtgattttctgacatttcttcgtactgaaggggctcgacttcgagttaaaactctactacaaatggtaggtgacgcagctgcaggcatggaatatctggaaagcaagtgttgcattcaccgtgatctcgccgctagaaactgtctggtcactgaaaaaaatgtacttaagatcagcgactttgggatgtccagggaagaggcggatggcgtctacgctgccagcgggggactgagacaggtgcccgttaagtggacagcaccggaagcgctgaattacggaaggtatagcagtgaatcggatgtctggtcatttggtattctcttatgggaaactttctcgctgggcgcaagcccctatcccaacctgtccaatcagcagacacgggagtttgtcgaaaagggcggacgtctcccttgccccgaactgtgtcccgacgccgtgttccgtctcatggaacaatgttgggcctacgagcccggacaaaggccctctttctccaccatctatcaggagctgcagtcaatccgaaaaagacataggtag

SEQ ID NO: 28650 - DNA, 129 bp, synthetic construct
  misc_feature 1..129: note = Description of Artificial Sequence: Synthetic coding sequence
  source 1..129: mol_type = other DNA
atgggcttcagcagtgaactgtgctcccctcagggccacggggtgctgcaacaaatgcaggaggcagagctgcggctcctggagggtatgaggaaatggatggctcagcgagtgaaaagcgatagatag

SEQ ID NO: 28651 - DNA, 348 bp, synthetic construct
  misc_feature 1..348: note = Description of Artificial Sequence: Synthetic coding sequence
  source 1..348: mol_type = other DNA
atgggcttctcgtcggaactctgcagccctcagggacacggcgttctgcagcagatgcaggaggccgagctgcgattactcgagggtatgaggaaatggatggcccagcgggttaagagcgacagggagtacgcagggctgctacaccacatgagccttcaagatagcgggggacagagtcgtgccataagccctgattctccaatctcccagtcgtgggccgaaataactagccagaccgaggggctcagtaggcttctgaggcagcacgccgaggatctaaattcagggcctctgtcaaagcttagtcttctaattcgggagcggcaacaacttcgtaagacatag

SEQ ID NO: 28652 - DNA, 2259 bp, synthetic construct
  misc_feature 1..2259: note = Description of Artificial Sequence: Synthetic coding sequence
  source 1..2259: mol_type = other DNA
atgggctttagttccgaactgtgctcccctcagggtcacggtgttctgcagcagatgcaggaagcagaactccgcttgttggaagggatgcggaaatggatggcccaacgtgtgaagagcgaccgggaatacgcaggcctgctccatcatatgtcgcttcaggacagtgggggacagagtagagccatttcccccgactcaccgatttctcagagctgggctgagattacctcccagacagaggggctgagtcgactactgcggcagcacgctgaagacctcaattctgggcctttatctaagcttagtctgcttatccgggagaggcagcagctgaggaagacgtattcagaacaatggcagcaacttcagcaggagttgaccaagacacattctcaagacattgaaaagctaaagagtcagtaccgcgctctggccagggatagtgcacaagcaaagaggaagtaccaggaggcctcaaaagacaaggaccgcgacaaagctaaagataaatacgtcaggtccctgtggaaactattcgcacatcacaaccggtacgttctaggcgtgagagctgcacagcttcaccatcagcaccatcaccagctccttcttccaggcttgctgcgaagcctgcaggacttgcatgaagagatggcttgcattctcaaggagatactgcaggaatatcttgagatctccagcctggtgcaggatgaagtagtcgccatccaccgagaaatggcagctgccgctgcacgaattcaacctgaggcagaataccaggggttcctcagacagtacggctcagcacctgacgttcctccctgcgtgacattcgacgagtctctgttagaggaaggtgagccactcgagcctggcgagttgcagctgaatgaacttacagtggaatccgtacagcacacactgacttcagtgaccgatgaactggcagttgctaccgagatggtgttccgcagacaggagatggtcacacagctgcagcaggaactgcgcaacgaggaggaaaatacccatccaagagagcgtgttcagctgctgggcaagcgacaggtcctccaagaggctctgcaggggctgcaggtagctctctgctcacaggccaagttacaggcgcagcaggagctgctgcagacgaagctggagcacctgggccctggggaaccgcctcccgtgctgctgctccaagacgatcgccacagtacatcatcatcagagcaggagagggaaggaggcaggacccccacactggaaatcctgaagtcgcacatttccggcatatttcgaccaaaattttcaaacctctaccggcttgagggtgaggggttccccagtattccgctgttaatcgaccatttgctgagcacccagcaaccattgaccaagaaaagcggcgtggtgttacatcgagccgttcctaaggacaagtgggtgttgaatcacgaggatctcgtcctaggagagcaaatcggccgaggtaattttggtgaggtgttcagcgggcgactgagggctgacaatacactcgtggcagttaaatcgtgcagagagacattgcccccagacctcaaggccaagttccttcaggaagctcgaatcttaaaacagtactcccaccccaacatagttcgactgattggggtgtgcacacagaagcagcctatctacatcgtaatggaactggtgcaggggggagatttcctgacatttctgcgaaccgaaggtgctagactgagggtgaagaccttattgcagatggtaggggatgctgccgcaggcatggagtatctggaaagcaaatgctgcatccaccgcgacctcgctgcccgaaactgcctcgtcaccgaaaagaatgttctgaagatttcagatttcggcatgagccgtgaagaggcggacggggtgtacgcagcctccggcggtctgagacaggtgccagtgaaatggactgcacccgaagccctgaactatgggagatacagtagcgagtccgatgtctggtctttcgggatattactgtgggaaactttctcattgggtgcaagtccctatcccaacttaagtaatcagcagacccgtgagttcgtggagaaagggggtaggctgccttgccccgaactgtgcccagacgcagtctttcgccttatggaacagtgctgggcctacgagcctggacagaggcctagcttcagcaccatttatcaagaactccagtcaatcagaaaaaggcatagatag

SEQ ID NO: 28653 - DNA, 2085 bp, synthetic construct
  misc_feature 1..2085: note = Description of Artificial Sequence: Synthetic coding sequence
  source 1..2085: mol_type = other DNA
atgggcttttctagtgagctatgcagccctcagggtcacggcgtgctgcagcagatgcaggaagctgaactccggctgctggaaggaatgaggaagtggatggctcagagagtgaaaagtgatagagagtacgctggtctactacaccatatgtctctccaggattctggcggacagtcaagagccatctccccggattccccaatttctcagacccacagccaggacattgagaagctgaaatcccagtaccgagccctcgcgagggacagtgcccaggccaaaaggaaataccaggaggccagcaaagataaggatcgggataaggctaaggataagtacgtgcgatctctgtggaaactgttcgctcatcataataggtacgttctgggagtgagagccgctcagcttcaccaccagcatcaccatcagctgctgctccccggtcttctgagatctctgcaggatctccacgaggagatggcatgcatactgaaggaaatactccaggagtatctggaaatctcgtctctagtccaggatgaggtcgtagctattcaccgcgaaatggccgctgctgccgctcggatccagcctgaggcagagtaccaaggattcctgcggcaatatggatcagctcccgatgtacccccatgcgtgacattcgatgagtctctgttagaggagggtgaacctctggagcccggagaactgcaactgaatgaattaacggtcgagtccgtccaacacacactgacaagcgtgactgatgaactggctgtggccacggaaatggttttccgaagacaagagatggttacccaactgcagcaggaactgcggaatgaggaggagaacacacatcctcgcgagcgcgtgcagctcctgggtaagcggcaggtcctccaggaggcgctccagggcctgcaagtggccctctgtagccaggctaagcttcaagcccagcaggaactgctgcaaactaagctagagcacttgggtcccggagagcccccaccagtactgctcctgcaggacgaccgccattcaacatctagctcggaacaggagagggagggtggaaggactccaaccttggaaatactcaaatcacacattagtgggatctttcgacccaagtttagcaatctgtacagactggagggcgaagggttccctagcatccccctgttaatcgatcacctcttgagtacccagcaacccctcaccaagaaatcaggggttgtgctacatcgagctgtgcccaaggacaaatgggtcttgaatcacgaggatcttgtcctgggtgagcagattggacgtggaaactttggcgaggtgttctcaggacgtctacgcgctgacaacacacttgtggcggtcaaatcatgtagagaaacgctgccccctgatcttaaggcaaagttcctgcaggaggccagaattctgaaacagtattctcacccaaatattgtaagattgataggcgtgtgtacccagaagcaaccgatctacattgttatggaattggtgcaaggaggagattttctgacttttttgcgcacggaaggtgcccgactgcgggtcaagacccttctgcaaatggtgggagatgcagccgctggcatggaatatcttgagtccaaatgctgcattcatcgcgatttggccgctagaaattgtctcgtgacagagaaaaatgtactgaaaatctccgattttggcatgagtcgtgaagaggctgacggtgtatacgcagcatctgggggactccgacaggtgcccgtcaagtggaccgctccagaagccctcaactacgggagatatagctccgagtccgacgtctggagtttcggaattctgctctgggaaaccttctctctgggagctagcccgtaccccaacttatcaaatcagcaaaccagagaattcgtggaaaaggggggacggctgccgtgtcccgagctgtgccctgatgctgtgtttcgcctcatggagcagtgctgggcctacgagcccggacagagacctagtttctccacaatataccaggagcttcagtcaattaggaaaagacatcgatag

SEQ ID NO: 28654 - DNA, 444 bp, synthetic construct
  misc_feature 1..444: note = Description of Artificial Sequence: Synthetic coding sequence
  source 1..444: mol_type = other DNA
atgggtttctccagcgagctatgttcaccacagggccacggtgtgttacagcaaatgcaggaggcagaattacgcttgcttgaaggcatgcgtaaatggatggcacaaagagtgaagtccgacagggagtatgctggactccttcatcatatgagccttcaagacagtggagggcagtcccgggctatttctccagattcgcctatcagccagtcttgggctgaaatcacaagtcagacggaggggctgagtaggcttctccgacagcacgccgaagacttgaactccgggccattaagtaaactgtcacttttgataagagaaagacaacagctgcggaagacctacagtgagcagtggcaacagttacagcaagaactgactaaaacccactcccaggacatcgagaaactcaagtcccagtacagagcccttgcccgatag

SEQ ID NO: 28655 - DNA, 1638 bp, synthetic construct
  misc_feature 1..1638: note = Description of Artificial Sequence: Synthetic coding sequence
  source 1..1638: mol_type = other DNA
atgggtttttcctccgaactctgctccccacaggggcatggcgtgctgcagcaaatgcaggaggccgaactccgcctactggaagggatgaggaaatggatggcacagcgcgtgaagtcagatagggagtatgccggattactccatcatatgtccctacaagactctggaggccagtcgcgcgctatcagccccgacagccctatcagtcaaagctgggccgagatcacctctcagactgagggcctgagcaggcttcttcgccaacacgcagaggacttgaactcaggacccctctccaaactcagtctgttgatccgggagcggcagcaactgcgcaagacgtattcagagcagtggcaacagttgcagcaggagctaacaaagacccacagccaggacatagagaagctgaagtctcagtaccgggcactggctcgggactccgctcaggctaagagaaaatatcaagaggcttccaaagataaagacagggacaaagctaaagacaagtacgtgcggtctctttggaaattgtttgcgcatcataaccgctatgtactaggggtaagggccgctcaactgcatcatcagcatcatcatcagctgctgctccccggtctgctgagatccctgcaggacctccacgaagaaatggcctgtatcctgaaagagattctgcaggagtaccttgagatttcaagtctggtccaagatgaggtggtagccattcaccgagaaatggcggcagccgctgccagaatccagccagaagcagagtatcaaggcttcctacggcaatacggctctgctcctgacgtgcctccttgcgtgaccttcgatgagagtcttctggaggaaggtgaacccctcgagcctggggagctgcaacttaatgaactgacagtcgaaagcgtgcagcacacgcttaccagcgtaacagatgagttggccgtagctaccgaaatggtattcaggagacaggagatggtgacacagctgcagcaggaactgcgtaacgaggaagagaacacccatcccagagagagagtgcaactgctggggaagagacaggttctccaagaagctctgcagggactacaagtagctttgtgttcacaggcaaagttgcaggcccagcaagagctgctccagacaaagctggagcacttggggccaggagaacctccccctgtactgctgctccaggatgaccggcattccaccagctcgtcagaacaggaacgcgaagggggaaggacccccacactagaaatactcaaatctcacatcagtggcatttttagacctaagttttctctaccacctcctctgcaactgattcctgaagttcagaagccactgcatgaacagctttggtaccatggcgcaatacctcgcgcagaggtggcggaacttctcgtgcactccggtgattttctggtcagggagagccaaggcaaacaggaatacgtcctgtccgtgctatgggacgggctgcccaggcactttattattcaggcccacgccccttctgaatggagattgttgactcccggtccgcttccctgccgaacatgcaccgattggaaaggcaaagcctttctcgctttcctgtgctcctccacaacatattag

SEQ ID NO: 28656 - DNA, 366 bp, synthetic construct
  misc_feature 1..366: note = Description of Artificial Sequence: Synthetic coding sequence
  source 1..366: mol_type = other DNA
atggggttttcctcagagctttgctctccacaggggcacggggtgctccagcagatgcaagaggcggaattgcgtctcttggaaggcatgaggaaatggatggcccagcgcgtaaagtcagatcgggagtacgcaggcctgcttcaccatatgtcgcttcaggacagcggcggacagagccgggctatcagtcccgattctcctatatcacaggtagggctgtatgggacactggtgggcgctggatgcatctgcttactgctgccattgttgggagccctgtggggaagcgggtggaggtccggcagacctatgcttggctcacattgtgctccactgcctgcgtcccctatctgcgccgtatag

SEQ ID NO: 28657 - DNA, 510 bp, synthetic construct
  misc_feature 1..510: note = Description of Artificial Sequence: Synthetic coding sequence
  source 1..510: mol_type = other DNA
atgggattctcatctgagctgtgtagtccccaggggcacggcgtgctgcaacagatgcaggaggccgagttacgcctgctggaaggcatgaggaaatggatggcgcagagagtgaagagcgacagggagtatgcaggcctccttcatcatatgtccctccaggactccggcggacagagccgagccatttctcccgattcccctattagtcaatcctgggccgagattacaagccagacagaaggtctgtcgcgacttctgcgccagcacgctgaggacctcaattctggcccattgtcaaaattatcactgcttatcagagagcgccagcaacttcggaagacttattcagaacaatggcaacagctgcagcaggagctcactaagacccacagtcaggatattgagaaactgaagagtcagtatagagccctggcccgtgattcagcccaggcaaaaagaaaataccaggaggcaagcaaagataaggatcgggacaaagctaaatag

SEQ ID NO: 28658 - DNA, 2283 bp, synthetic construct
  misc_feature 1..2283: note = Description of Artificial Sequence: Synthetic coding sequence
  source 1..2283: mol_type = other DNA
atgaaaacttgggtgaagatagtatttggtgttgcaaccagcgcagtgctggctctgctcgtgatgtgcatcgtgctgagacccagccgagtgcataactccgaggaaaacacaatgagggccctcacattgaaggacattctgaatgggacctttagttataagacttttttccccaactggatttcgggtcaggagtacctacatcagagtgccgataataacatcgtgctttacaacatcgagacgggtcagagttacaccatcttgtccaacaggaccatgaaatcagtcaacgctagcaactatggcctctcgccggacaggcagtttgtgtacctcgagtctgactactcaaaactctggcggtacagctatacagccacctattacatttacgacttgtctaacggtgaattcgtaaggggcaacgagctgccacggcctattcagtacctgtgctggagtcctgttgggtccaagttggcttacgtttaccagaataacatttacctgaagcagagacctggagacccaccttttcaaattacattcaatgggagagaaaataaaattttcaatgggatccccgactgggtctacgaagaagagatgctcgcgacaaaatatgccctgtggtggtctccgaacggaaagtttctcgcgtacgccgagttcaacgatactgacatccctgttatcgcctatagttactatggagacgagcaatatcctaggacaattaacatcccttatccaaaagccggagcgaagaacccggtcgtgcgcatcttcatcatagataccacctacccggcttacgtgggaccacaggaggtccccgtccctgctatgatcgcctcttccgattactacttttcctggctaacatgggtgacagacgaaagggtgtgtttacagtggctcaagagggttcagaatgtctccgtcttatcaatttgcgacttcagggaagattggcaaacctgggattgtcccaagacccaggaacatattgaagagtcccgcactggatgggccggagggttcttcgtctctacccctgtcttcagttacgacgctatctcttactataagatcttctctgacaaggacggctataaacatattcactatataaaggacactgtcgagaacgctatccaaattacaagtgggaaatgggaggcaatcaatatcttcagggtgacacaggactctttattctactcctcaaatgaattcgaagagtaccccggacgaagaaatatctatcgcatttcaattggctcttaccccccatcaaaaaaatgcgtgacctgccacctgaggaaagaacgatgtcaatattatacagcttccttttcagattatgcgaagtactatgctctggtctgttatggaccaggcatccccatctccacactgcatgacgggcgtacagaccaggaaattaagatcttggaagagaacaaggagttagaaaacgctcttaaaaacatccagctgcccaaagaggagataaagaaactagaggttgacgagattacactgtggtacaagatgattctgcctcctcagtttgacagaagtaagaagtaccccctgcttatccaggtctacggtggcccatgtagccagagcgtgcgcagcgtctttgccgtgaactggatctcttaccttgcctccaaggaaggaatggtaatagccttagttgatggtcgcggtactgcttttcagggagacaagctgctttacgccgtgtatcgcaagcttggggtgtatgaggtcgaggaccagatcactgcagttcgtaaattcattgaaatgggcttcatcgacgagaagcgcatcgccatttggggatggtcatatggaggctatgtgagcagcctagctctcgcctctggtactgggctcttcaaatgcggcattgcagtagcgcctgtatcctcctgggagtattatgctagcgtgtataccgagagatttatgggattgcctaccaaagatgacaatttggagcattataaaaactccacagtaatggccagagccgagtacttcaggaacgtcgattatctgctgattcacggcactgcggatgacaatgtgcactttcagaactccgcgcagatcgccaaagccctggttaatgcccaagtcgactttcaggccatgtggtactccgaccagaatcatgggctgtccggcctttcgactaatcacctgtacacccacatgacacactttttgaagcagtgtttcagcttaagcgactag

SEQ ID NO: 28659 - DNA, 2208 bp, synthetic construct
  misc_feature 1..2208: note = Description of Artificial Sequence: Synthetic coding sequence
  source 1..2208: mol_type = other DNA
atgaagacgtgggttaaaattgtgtttggggtggcaacgtcagccgtgctggcactgctcgtaatgtgtatcgttcttagaccgagccgagtgcacaatagtgaggagaacaccatgcgcgcacttacgctgaaggatatcctgaacggtactttcagctacaaaacattctttccgaactggatctctggccaggagtaccttcatcagtccgccgacaacaacattgtactttataatatcgagacaggccagagctatacaattctgagcaatagaaccatgctgtggcggtactcatacacggctacatactatatctatgatctatctaatggggaatttgtaagagggaatgagctgcctcgtcccatccaatatctttgctggtctcctgtgggcagtaaactggcgtacgtgtaccaaaataatatatacctgaagcagaggcccggagaccctcctttccagatcacctttaatggacgagaaaacaaaatttttaatggtattcctgactgggtctatgaggaggagatgctcgctacaaagtatgctttatggtggagtcccaacggaaagttcttggcttatgctgaatttaatgatacagacatccccgttatcgcttactcttactacggagatgagcaatacccccgaactataaacatcccataccccaaggcgggtgctaagaaccctgtggtgcggatattcattatcgacacaacatacccagcctacgtggggccacaggaggtccccgtgcccgcaatgattgcctctagcgactattatttcagctggctgacctgggtgacagacgaacgcgtgtgcttacaatggctgaaaagagttcagaatgtaagcgttcttagcatctgcgacttccgcgaggactggcagacttgggactgcccaaaaacccaagaacatattgaggaaagcagaaccgggtgggctggtggttttttcgtgagcaccccagttttctcttacgacgcaataagctattataaaatattctcagacaaagatggttacaaacacatccactatatcaaagatacagtggaaaatgccatccagataaccagtggcaagtgggaagccatcaacatctttcgcgtcacacaggatagtttattctattcttcaaatgaatttgaagaatacccaggaagacgcaatatctaccggatcagtatcggctcttaccctcccagtaagaagtgtgttacctgccaccttcgaaaggaaaggtgccagtattacacggcgtcattcagcgattacgctaaatattatgctctggtgtgttacgggccaggaatacctatttcgacgctgcacgacggtcggacagatcaagaaattaagatcctcgaggaaaataaggagttggagaatgccttgaaaaatattcagcttccaaaggaggagatcaaaaagttggaggtggatgagattaccttgtggtacaagatgatacttccaccacagtttgaccgctcaaaaaagtaccccctgcttatacaggtttacggaggcccttgtagccagtcagtccggtccgtcttcgccgttaactggatttcctacttggcctccaaggaaggaatggtaatcgccctcgttgacggtcgcggaacggccttccagggagataagttgctctacgctgtctaccgcaaactcggtgtgtatgaagttgaggatcagatcactgcagtccgaaagttcatagaaatggggttcatagacgagaaaagaattgccatctggggatggtcctatggcggttatgtttcttctctggccctagcctctggaacggggttgttcaagtgtggaattgctgttgcccctgtgtccagctgggaatattacgcatccgtgtatactgaaaggtttatggggttaccaacaaaggacgacaaccttgagcactacaagaacagcaccgtcatggcccgtgccgagtacttcagaaacgtggactatctactgatccatggaacggcagatgataatgttcattttcagaactctgcccagatcgccaaagccttggttaatgcccaggtagacttccaagccatgtggtactctgatcagaatcacggattgtcagggctgtccaccaaccatctttatactcacatgacacactttttgaaacagtgcttctctctgtctgattag

SEQ ID NO: 28660 - DNA, 468 bp, synthetic construct
  misc_feature 1..468: note = Description of Artificial Sequence: Synthetic coding sequence
  source 1..468: mol_type = other DNA
atggccgaaggcgaaataaccacatttacagcgctcactgaaaagttcaacctgccacctggcaattataagaaaccgaaactcctgtattgttccaacggcggacattttctgcgcatccttcccgacgggacagttgatggcaccagggataggagtgatcagcatattcagttgcagctcagcgcagaaagcgtcggagaggtttacatcaagtcgacggagacgggccagtacctggcaatggacacagatggattactctatggctcgcagactcctaatgaagagtgcttattcctcgaaaggctagaagagaatcattacaacacttacatatctaaaaaacatgccgagaagaattggtttgtaggtctgaagaaaaacggatcctgtaaaagaggaccccgaacccactacgggcagaaggcaatcctgtttctgccactcccggtctcctctgactag

SEQ ID NO: 28661 - DNA, 468 bp, synthetic construct
  misc_feature 1..468: note = Description of Artificial Sequence: Synthetic coding sequence
  source 1..468: mol_type = other DNA
atggccgagggagagattacaacttttacagctttaacagagaaattcaacctcccgcctgggaactataagaaacccaaactcctttactgcagcaatggaggccattttctaaggattctgccggatggaaccgtagacggaacccgcgataggagcgaccagcatatccagcttcagttgtctgctgagagcgttggtgaggtctacattaaaagtacagagactggacagtatttagccatggataccgacggtctgttgtatggtagccaaacgccaaacgaggagtgtctcttcctggaacgtctagaggaaaaccactacaatacctatatctcaaaaaagcacgcagaaaagaattggttcgtcggacttaaaaaaaatggctcatgcaaaagaggacccaggacccattacgggcagaaagccatattgtttttgccactccctgtttcttccgattag

SEQ ID NO: 28662 - DNA, 468 bp, synthetic construct
  misc_feature 1..468: note = Description of Artificial Sequence: Synthetic coding sequence
  source 1..468: mol_type = other DNA
atggcagagggcgaaattaccacgttcaccgctctgaccgagaagttcaatctgcccccaggcaattataaaaagcctaaactgctgtactgctccaacggagggcacttcctgcggattctgccagacggaacagtcgacggcacacgcgaccgaagcgatcagcacatccagctgcagctgtctgccgaatcggtaggagaggtgtacattaagagcacagagactggtcaatatctggccatggacaccgacgggctgctctacggctctcagactcccaatgaggagtgcctatttttagagagactcgaggagaatcattataacacctacatttccaagaagcacgctgagaaaaattggttcgtgggtcttaaaaagaatggctcctgcaaaagaggacctcgaacacactatggacagaaggccattctgtttttaccactccccgtgtcatccgattag

SEQ ID NO: 28663 - DNA, 177 bp, synthetic construct
  misc_feature 1..177: note = Description of Artificial Sequence: Synthetic coding sequence
  source 1..177: mol_type = other DNA
atggccgagggcgaaatcaccacatttactgctctgacggagaagtttaacctaccccctggaaactacaaaaaacctaagctgctgtactgtagcaatgggggacacttcctcaggatcctccctgacggaacggttgacggtaccagagatcgaagcgatcagcacatccagtag

SEQ ID NO: 28664 - DNA, 126 bp, synthetic construct
  misc_feature 1..126: note = Description of Artificial Sequence: Synthetic coding sequence
  source 1..126: mol_type = other DNA
atggccgagggagaaatcacaactttcactgccctgactgagaagtttaatttacccccagggaactacaaaaaacccaaactcctgtactgctccaacggcggacacttccttcgcattctgtag

SEQ ID NO: 28665 - DNA, 468 bp, synthetic construct
  misc_feature 1..468: note = Description of Artificial Sequence: Synthetic coding sequence
  source 1..468: mol_type = other DNA
atggccgagggagagatcaccacattcacagctctcactgagaaatttaacctgccacctggaaactacaaaaagccaaagttgctgtactgtagtaacgggggtcattttcttaggatcctccccgatgggacggtggacggcacaagggatcgctctgaccagcacatacagctccagctctcagctgagtctgtaggggaggtgtatataaagtccaccgaaaccggccagtacctggccatggacacggacggcttactttacggctctcagacaccaaacgaggagtgtctgttcctagagcggctagaggagaatcattataacacatatattagtaaaaagcacgccgagaaaaactggtttgttggactcaaaaagaatggcagctgcaagcggggacccagaactcattatgggcaaaaagctatactcttcttacctctgccggtttcctccgattag

SEQ ID NO: 28666 - DNA, 468 bp, synthetic construct
  misc_feature 1..468: note = Description of Artificial Sequence: Synthetic coding sequence
  source 1..468: mol_type = other DNA
atggccgaaggggagattactacatttactgcactgacagagaagttcaatctaccgccagggaattacaaaaaaccgaagctgctgtattgttccaacggcggacattttttaagaattttacccgatgggactgttgatggcaccagagacagaagcgaccagcacatacagcttcagctgtcagcagagtccgtgggggaggtctatatcaagagcacagagaccggacagtatctcgctatggacacagacggtctgctgtacggctctcagacacccaacgaggagtgtcttttcctggagaggttggaagaaaaccactataacacctacatctcaaagaagcatgctgagaagaactggtttgtgggtctgaaaaaaaatgggtcgtgtaaaaggggacccagaacacactatgggcaaaaggccatcctctttctgcctctgcctgtgtcctctgattag

SEQ ID NO: 28667 - DNA, 183 bp, synthetic construct
  misc_feature 1..183: note = Description of Artificial Sequence: Synthetic coding sequence
  source 1..183: mol_type = other DNA
atggcggaaggcgaaattaccacctttacagcgctgactgagaagttcaatctgcctcccggaaactacaaaaagcccaaacttctgtactgctcaaacggcggtcactttctgaggatcctccccgacggcacggttgacggtacacgggacagaagtgaccagcacactgatactaaatag

SEQ ID NO: 28668 - DNA, 627 bp, synthetic construct
  misc_feature 1..627: note = Description of Artificial Sequence: Synthetic coding sequence
  source 1..627: mol_type = other DNA
atgtggaagtggatactgacccactgcgcctccgcgttcccgcacctcccagggtgctgctgttgttgttttctcctcctgttcttggtaagctcggtccccgttacctgtcaagctctcggccaggacatggtgtccccggaggccacgaactcaagctcctctagctttagttcacccagcagtgcgggaagacatgtgcggtcctataaccaccttcaaggcgatgtgcggtggagaaagctctttagtttcacaaaatattttctgaagatcgagaaaaatggaaaagtttctggaaccaaaaaagaaaattgtccctatagcatcctggagataacttctgtggagatcggggttgtcgccgtcaaggccattaactcaaattattacttagccatgaacaaaaagggcaaactgtatgggagcaaggagttcaataacgactgtaagcttaaagaacgaatcgaggaaaacggttacaatacgtacgcgtcatttaactggcaacataacggcagacagatgtacgtcgccctgaatgggaagggggcacctcgtcggggtcaaaaaactcggcgtaagaatacatctgcccatttcctacctatggtcgtgcactcttag

SEQ ID NO: 28669 - DNA, 201 bp, synthetic construct
  misc_feature 1..201: note = Description of Artificial Sequence: Synthetic coding sequence
  source 1..201: mol_type = other DNA
atgtggaagtggatacttacacattgcgcttccgcattcccgcaccttcccggatgctgctgttgttgttttctgctgcttttcctggtctccagcgtgcctgttacttgtcaggccctggggcaagacatggtcagccctgaagcaaccaactccagtagctcttccttttcatctccttcaagtgccggacgccactag

SEQ ID NO: 28670 - DNA, 867 bp, synthetic construct
  misc_feature 1..867: note = Description of Artificial Sequence: Synthetic coding sequence
  source 1..867: mol_type = other DNA
ctggtgggagtcgggggaggcgatgtagaagatgtgactcctcgcccaggcggatgccagatatcaggtcgtggggctagaggctgcaacgggatccccggtgcagcagcctgggaggcagcactcccacgtagacggccaagaaggcaccctagcgtcaacccccgatccagggctgcgggatcaccacgaacaaggggcaggagaaccgaggagaggccgtccggtagtcgcctgggtgaccgcggacgcggaagggctctgcccggaggcagactggggggaagaggaagaggcagagcgccagagcgcgtagggggtcgaggcagagggcgtggcactgcagccccacgtgccgcacccgcagcaagaggctcccggcctggcccagcaggtacaatggcggctgggagcatcacgacgctcccagcgctgcccgaggacggcggttccggcgcttttccaccaggtcattttaaagaccctaagcgcctgtactgtaaaaacggaggttttttcttgcggattcaccctgatggacgcgtagatggcgttcgcgagaagagcgatcctcacattaagctgcagcttcaggcagaggaaaggggagtcgtttccattaagggcgtatgcgccaatcgataccttgccatgaaggaggatgggaggctgttggcgtcaaaatgcgtaacagacgaatgcttcttctttgaacgcctggaatccaataattacaacacctacaggtctcggaagtatactagctggtatgtggccttgaagcgcactgggcagtacaagctggggtctaaaacagggcctggtcagaaagcaatcctctttctgcctatgtctgctaaaagctag

SEQ ID NO: 28671 - DNA, 585 bp, synthetic construct
  misc_feature 1..585: note = Description of Artificial Sequence: Synthetic coding sequence
  source 1..585: mol_type = other DNA
atgcacaaatggattttgacgtggatattacccaccctcctttatcggagttgttttcatatcatctgtctggtcgggacaattagtctagcctgcaacgatatgacccctgagcagatggctaccaacgtgaactgctcatcgcctgagaggcatacacggtcctatgattacatggagggcggagatattagggtgcgtcggctgttttgtcggacacagtggtacctgcggattgataagcggggtaaggtaaaaggcacacaagagatgaagaacaactacaatattatggagattagaactgtagctgtgggcatcgtggctataaagggcgtggaatccgagttctatctggccatgaacaaagagggaaagttatatgccaagaaggaatgcaacgaggactgcaattttaaagagctaatcctcgagaatcattacaacacatacgcctcagccaagtggactcacaacggcggagagatgttcgtggccctgaatcagaaagggatccctgtgagggggaagaagacgaagaaagaacagaagactgctcactttttgccgatggccatcacctag

SEQ ID NO: 28672 - DNA, 585 bp, synthetic construct
  misc_feature 1..585: note = Description of Artificial Sequence: Synthetic coding sequence
  source 1..585: mol_type = other DNA
atgcacaagtggatcctaacatggatcctccccacactgctttaccggtcttgctttcatatcatttgcctggtgggaactatcagtttggcctgtaatgacatgacccctgaacagatggctacaaatgttaattgttcaagccctgagcggcatactcgctcatacgactacatggaaggcggagatatacgtgtgcgcaggttgttttgcaggacccaatggtacttgaggattgacaagcgcggtaaggtcaaaggaacccaggagatgaagaataattacaacataatggagataaggacggtggccgttgggatcgtcgctatcaagggcgtcgaatccgaattttacttagcaatgaataaagaagggaagctgtatgcaaaaaaggaatgtaatgaggattgtaattttaaggagctgatcctggaaaaccactacaacacgtacgccagtgccaagtggacacacaatggaggtgagatgtttgtggcgctaaatcagaagggaatccctgtccgcggaaagaaaaccaagaaggagcagaagactgcccattttttaccaatggccattacctag

SEQ ID NO: 28673 - DNA, 705 bp, synthetic construct
  misc_feature 1..705: note = Description of Artificial Sequence: Synthetic coding sequence
  source 1..705: mol_type = other DNA
atgaagatctgtagcttaacgctgctttccttccttctactggcggcacaggtgctgctggtggagggtaagaaaaaggtcaaaaatgggctgcacagcaaggtagtaagcgaacagaaggacactctgggcaatacccagataaaacaaaagagtcggcctggaaataagggaaaattcgtgacaaaagaccaagccaattgtcgatgggctgccacagagcaggaagaaggaatctcactaaaagttgagtgtactcaacttgatcacgagttttcctgcgtgttcgctggcaatccgacctcttgcttgaagctgaaagacgagcgggtctattggaaacaggtcgccagaaatctccgctctcagaaggacatctgtcggtattcaaagacggcggtgaaaaccagagtatgccggaaagacttcccagaatcctcactgaagctggtgtccagcactctgtttggtaacacaaagccacggaaagaaaaaaccgagatgagccctagagagcacattaaaggaaaggaaacaacaccaagcagcctggccgtaacacagaccatggcaaccaaggcccctgaatgcgtggaagatccagacatggccaaccagaggaagacagccctggaattctgtggcgagacttggagctcactttgtaccttcttcttgagcattgtccaagatacatcttgctag

SEQ ID NO: 28674 - DNA, 705 bp, synthetic construct
  misc_feature 1..705: note = Description of Artificial Sequence: Synthetic coding sequence
  source 1..705: mol_type = other DNA
atgaagatttgttccttaacactgctaagtttcctcctcttagcggcacaagtgttattagtggagggcaagaaaaaggtcaaaaatggtctgcattccaaagtggtttctgaacagaaggacacactggggaatactcagattaaacaaaaaagtcgccctgggaacaaaggaaaatttgtgaccaaagaccaggcaaattgccgctgggcagctactgaacaggaggagggcataagccttaaagttgagtgtacccagctcgaccacgagttctcttgcgtgttcgctggcaaccctacatcctgtctcaaacttaaagatgagcgggtttactggaaacaggtcgccaggaacctccgcagccaaaaagacatctgccgatattcaaaaaccgcagtaaagacgagagtttgtcggaaggatttccccgaaagctccttgaaattggtgtcttctacattgtttgggaacaccaaaccccgaaaggaaaagactgaaatgagccctagggaacacataaagggcaaggaaactacaccatcatctctggcggtcactcagactatggccactaaagccccagaatgcgtggaggaccctgatatggcaaatcagcggaaaacagcattagaattctgcggcgaaacatggtcatccctctgtacatttttcctctctattgtacaggacacatcatgctag

SEQ ID NO: 28675 - DNA, 2421 bp, synthetic construct
  misc_feature 1..2421: note = Description of Artificial Sequence: Synthetic coding sequence
  source 1..2421: mol_type = other DNA
atgggtgctccagcctgcgctctggccctctgtgtggccgtggccatagtggccggagccagcagcgagtcattgggtaccgagcaaagggtggtcggtcgagcagcagaagtcccagggccagagcctggacaacaagaacagctcgtctttggtagcggtgatgccgttgagctctcctgcccacccccaggcggtggtcctatgggcccaacggtatgggtaaaagacggcacgggcctcgtgccctccgagcgagtacttgtcgggccacagagactccaggtactcaacgcctcgcatgaggatagtggcgcttactcatgccggcagcgcctgacccagagggtgctgtgccacttctccgtgagagtgactgatgcaccaagcagtggggatgatgaagacggcgaagatgaggcagaagacaccggggtggacactggtgctccctattggactcgccctgaaaggatggacaagaagctgctggcagttcccgcagctaacaccgtgcggtttagatgccctgctgccggtaatcctacaccctccattagctggctcaagaacgggagggaattcagaggggaacatcggattggcggaattaaactcagacatcagcagtggtcgctggtaatggaaagtgtagtgccttctgataggggcaattatacctgtgtggtcgagaacaaattcggctccatcaggcaaacgtacactttggatgtgcttgaacgctctccacaccggcctatcctgcaggccggactgccagctaaccaaacagctgtcctggggagcgatgttgaatttcattgcaaggtgtactcagatgcgcagcctcatatacaatggctaaagcatgtggaggtcaatggttccaaggtgggtccggacggaactccatatgtgacagtcttgaaaactgcaggagctaacactactgacaaagagctggaagtactgagtctgcacaacgtgaccttcgaggatgctggggaatacacgtgcctagcagggaattctattggctttagccatcatagcgcgtggttagtagtcctcccagcagaggaagagctggtggaggccgacgaggctggcagcgtttacgccggaatcttgtcctatggagtcggttttttcttattcatactggtagtggccgctgttactctttgcagattaaggtctcccccaaaaaagggactcgggagccccactgtgcataagatatccaggttccctcttaagcggcaggtatcattggagtctaacgcgagcatgagttcaaacacacctctggtccgcattgcaaggttgagttcaggagagggccctactctggcaaacgtgtctgaactggagctccccgcagacccaaagtgggagctgtctcgggctcgcctcacattgggcaagcctctgggtgaaggctgctttgggcaagtagtgatggctgaggccattgggatcgacaaggacagggctgccaagcctgtgaccgtagcagtgaaaatgttaaaggacgacgcaacagataaggatctgtcagatctggtgtctgagatggaaatgatgaaaatgatcggaaaacacaagaatataatcaatctcctcggcgcttgcacacagggtggcccactctatgtcctggtcgaatacgcagctaagggcaacctgagggagttccttagagctcggcgtcctcctggactcgactattccttcgatacttgtaagcccccagaagagcagcttacttttaaggatctggtgtcctgtgcttaccaggtcgccagagggatggagtatctggccagccagaagtgcattcatcgggacttggcggcacgaaacgtcttggtgaccgaggataacgttatgaagatagcagactttggacttgcccgagatgtacacaatctggattattacaaaaagactaccaatggtaggcttcccgttaaatggatggccccagaagccttattcgatcgggtgtacacacaccagtctgacgtttggtcttttggtgtgcttctttgggagatattcactcttgggggaagcccatacccgggaattcctgtggaagaactgtttaagttacttaaggagggccatagaatggacaaaccagctaactgtacccacgatctgtatatgatcatgcgggaatgttggcatgctgccccttcacagcggcctacattcaagcagctcgtggaggacctcgatagggtcctgactgttacctcaactgacgagtacctggacttgagcgctccctttgaacagtatagtccgggagggcaggacacaccttcgtcaagcagcagcggggatgattccgtgtttgcacatgacctgctacccccagcccctccctccagcggtggtagtcgtacatag

SEQ ID NO: 28676 - DNA, 513 bp, synthetic construct
  misc_feature 1..513: note = Description of Artificial Sequence: Synthetic coding sequence
  source 1..513: mol_type = other DNA
gagtacctggatctgagtgcgccattcgaacagtactcaccaggagggcaggataccccatcttcgtcctcatccggggacgatagtgtgttcgcacatgacctgctcgccactggaccgcagcagtgcgagggatcactggccgcacatcctgccgcaggggcacagccacttccaggcatgcgcttgtccgccgatggggagacagctacacagtcatttggactttgtgtgtgcgtatgtgtttgtgtctgttgtactagtgcatgtgcctgtgtgagagcacatctggcatctaggtgtagaggtactctcggggttccagccgcagtccagaggtctcctgattggtgctgtagtacagaagggcctctcttctggggagacccggtgcagaacgtctctgggccaacacggtgggaccctggtcagggggcaggaccagatatgcgccctctgccactgcatcacgggacaagccaaggactgggcccttcacacactcaatcctag

SEQ ID NO: 28677 - DNA, 2427 bp, synthetic construct
  misc_feature 1..2427: note = Description of Artificial Sequence: Synthetic coding sequence
  source 1..2427: mol_type = other DNA
atgggggctcctgcctgtgccttagctctctgtgtcgcggtcgcgatcgtcgccggagcctcgagcgaatcattgggcacagagcaaagggtcgtcgggagagctgccgaagtcccgggaccagaacctggtcagcaggaacagctggtgtttggaagcggcgatgccgttgagcttagttgtcctccccctggaggcggaccaatgggacccacagtctgggttaaggacgggactggtctcgtgccttccgagcgggtacttgtggggcctcagcggctacaggtgctaaacgcaagtcatgaagactccggggcttatagctgccgccagcggttaactcagcgagtgctatgtcattttagcgttcgcgtgacagacgccccaagctccggggatgatgaggatggagaggatgaggcagaggacaccggtgtcgacacaggtgcaccctactggactcgaccagagagaatggataagaagctcctcgcagtgcctgccgctaatacagttcggtttcgttgtccagctgcaggcaaccctacccctagcattagctggctgaagaacggtcgggaatttagaggcgagcacaggataggcggaatcaaactgaggcaccagcagtggagcttagtgatggagtcggtagtaccgagtgatcggggaaattacacatgtgtggtggaaaacaagttcggatccatacgacagacatacacactggacgtgttggaacgatcccctcatcgtcccatcctgcaagctggcttaccagcaaaccagacagccgttcttgggtccgacgtggaattccactgtaaggtctattctgatgcacagccacacatacaatggttaaaacacgtggaggtcaatggcagcaaggtgggacccgacggaacgccgtatgttacagtgctcaaaagttggatatctgaatctgtggaagccgacgtccgcctgcggctcgcaaatgtgtctgaaagggacggcggagaatacctgtgcagagctacaaacttcatcggcgtagcagaaaaagcattttggctgagtgtgcacggccctagggctgcagaggaagagctagttgaggccgacgaggcgggttctgtgtatgcgggaattctttcttacggggtcgggttctttctgtttattttagtcgtggccgctgttacgctttgtcgactgcggagcccgcctaaaaagggactcggaagccctacagttcataaaataagtcgatttccacttaagagacaagtgtcgttggaatccaacgccagcatgagctctaatacccctcttgtgcgcatcgctaggctctcttccggggaaggaccgactctggcaaacgtgagcgaattggagctcccagccgatccaaagtgggagttgtctcgcgcacgcctgaccctgggaaagcccctcggcgaaggctgttttggccaagtggtaatggctgaggccattggcattgataaagaccgggcagcaaagcccgtcaccgtcgccgtgaagatgcttaaagatgatgctaccgataaggacctgtcagacctggtctctgagatggaaatgatgaaaatgataggaaaacataaaaacatcattaatttgctaggtgcctgtacacaagggggacccttatacgtgctggtagagtacgcagccaaggggaatcttcgggaatttttaagggcaaggcggccaccaggcctggactatagctttgacacatgtaaaccccctgaggagcagttgaccttcaaagatctggtgagttgtgcctaccaggtcgccaggggaatggagtacttggcctctcagaaatgcatccaccgggacctggccgctcgaaacgtactagtgactgaggataacgtgatgaagatcgcagacttcggactcgctcgggacgtacataatctagattactataagaagacaactaatggtcgcctgcccgtcaaatggatggctcccgaagccctctttgatagggtgtatactcaccagtccgacgtctggagctttggagtgctgctgtgggagattttcactttgggaggaagcccatatccaggcatccctgtggaagagttgttcaaactgctgaaagagggccacagaatggacaagcctgccaactgtactcatgatctttacatgattatgcgggagtgttggcacgccgcaccatctcagcggcctactttcaagcagcttgtggaagatctagacagggtgcttactgtcacctctactgacgaatacctcgatctgtccgcgccttttgagcagtattcccctggcggtcaggacactcctagctccagttcaagcggcgacgattccgtcttcgctcatgatctgttgccaccagcgccaccttcctcgggcggaagcaggacctag

SEQ ID NO: 28678 - DNA, 2085 bp, synthetic construct
  misc_feature 1..2085: note = Description of Artificial Sequence: Synthetic coding sequence
  source 1..2085: mol_type = other DNA
atgggtgcaccagcttgcgctctggccctgtgtgtcgccgtagccatcgtggccggagccagctccgaatcattgggaactgagcagcgagtggtggggcgagctgccgaagttcccggaccagaacctgggcagcaggagcaactggtattcgggagcggggacgcggtggaattaagctgccctccccctggtggaggccctatgggcccaacagtgtgggttaaagacgggactggactggtgccatcagagcgagtgttggtcgggccacaaagactgcaggtgttgaatgcgtcgcacgaagatagtggagcgtatagttgccggcaaagactgacgcagagggtgctgtgccacttctcagtaagagtgacagacgctcccagttcgggcgacgacgaagatggggaagacgaagccgaggatactggagtagataccggagctccgtattggactagacccgaacgaatggacaaaaaacttctagctgtgcccgcagccaacacggtccgcttccggtgccctgccgcaggaaatcccacaccgagcatcagctggctgaagaacggtcgcgagtttcggggagagcacagaatcggcggtatcaaactgcggcaccagcagtggagcctggtgatggaatctgttgtgccgagtgacagaggtaactacacctgcgtggtagagaataaattcggctcaatccgccaaacctacactctggatgttttggagagaagccctcatcggccaatcctgcaggctggactgccagcaaaccagaccgccgtgttaggcagcgatgtcgagtttcactgcaaagtgtattctgacgcccagccacatatccaatggctgaagcacgttgaggttaatggctctaaggtcggcccagacggcaccccatatgtcaccgtgttgaaggtctccctggagtccaatgcctcaatgtcgtccaataccccactcgtgaggatcgctagactgtcaagcggtgagggcccaacattggctaacgtgtcggaactggaactccccgctgaccctaaatgggaactgtccagggcgcgattaactcttggaaaacctctcggcgaagggtgcttcggccaggtcgttatggcagaagctattgggatcgacaaagaccgggctgctaagccagtcacggtcgcagtcaaaatgttgaaggacgacgctaccgacaaggatctttcagacctggtaagcgaaatggagatgatgaagatgatcggcaagcacaagaatatcatcaacctgctcggcgcatgtactcagggtggccctttgtacgtcctcgtcgaatatgccgctaaaggaaatctgagagaattcttgcgcgctagacggccacccggactggattactcgtttgatacatgcaaacctccggaagagcagctgacattcaaagatctcgtgagttgcgcttatcaggtggctcggggaatggaatacttggcctcccagaaatgcatccacagagatttggccgctcgcaacgttctcgtgaccgaggataacgtcatgaaaatcgccgattttgggctggcgagggatgtgcacaatctggactattataaaaaaactaccaacggcaggctgcctgtaaagtggatggcgcctgaagctctttttgatcgggtttatacacatcagtcagacgtgtggtcattcggcgtgttattgtgggagatcttcactttggggggaagcccgtatcccggaatcccagtcgaggaactatttaagctgctgaaggaggggcaccggatggataagccggcaaactgcacccacgacctgtatatgattatgcgagagtgctggcacgccgctcctagccagcgacctaccttcaaacaactcgtggaagacctcgacagagtgctgacggttacaagcacagatgaatatttagacctgtcagcgccttttgagcaatactccccagggggtcaggacactccatcttcatcttcatcaggtgatgatagcgtgttcgctcatgacctgttgccaccagcgcctcccagctccggagggagcagaacttag

SEQ ID NO: 28679 - DNA, 2421 bp, synthetic construct
  misc_feature 1..2421: note = Description of Artificial Sequence: Synthetic coding sequence
  source 1..2421: mol_type = other DNA
atgggcgctcccgcatgtgcgctggctctgtgtgtggctgtagcaatagtggccggtgccagttcggagagcctgggcactgaacagcgggtggtggggagggctgcagaagtgccaggtccagagcccggtcagcaagagcagttagtcttcggaagtggtgacgccgtcgaactgagttgtccccctcctggaggtggacctatgggccctacggtttgggtgaaggatggaacaggcctagtgccttcagaacgtgtgctggtcggcccacagcgcctgcaagtcttgaacgccagtcacgaggattcaggcgcttacagctgtagacagaggcttactcaacgtgtgctgtgtcacttttccgtccgagtcacagacgctccctctagcggggacgacgaagatggggaagacgaggctgaggacactggcgtggacactggggctccttactggactaggcccgagcgaatggataaaaaactactcgctgtgcctgcggctaataccgtccgtttccgctgcccagccgctggaaaccctacaccttccatctcctggctcaagaatggacgcgaattcagaggtgagcatcggatcggtggaattaagctcagacatcaacagtggtctctagttatggaatctgtggtccccagcgaccgtggaaactacacttgcgtcgtggagaataagttcgggtcaattcgacagacttatacactcgacgtgctggagaggtcccctcacagacccatactacaggccggactaccagcaaatcagacagctgttcttggttctgacgttgaattccactgcaaagtctattcagatgcacagccacacattcagtggctgaaacatgtagaggtgaatggcagtaaagtggggccagatggtactccatacgtgaccgtgctcaaaacggcaggtgcaaacactaccgataaagaactggaagtcctctcgttgcacaacgtcaccttcgaggacgccggagagtatacttgcctcgccggtaacagcatcggtttctctcatcacagtgcctggctggtcgttctgcctgctgaggaggagctggtggaggcagacgaggccggatccgtgtatgccggtatcctctcttacggggtaggcttttttttattcattctcgtggtggccgctgtgaccctgtgtcggttgcgatctcctccgaaaaaggggttgggtagcccaactgtgcacaagatcagccggttccctcttaaaaggcaggtatcactggagtcaaacgccagcatgtcctcaaacacgccccttgttcgcatcgcacggttgtcatctggcgaaggaccgactttagctaatgtcagcgagctggagcttcccgcagacccgaaatgggagctttctcgagcccgtcttacgctggggaaacctcttggagagggatgtttcggccaagtcgtaatggcggaggcaatcggcatcgataaggatcgagctgcgaaacccgtcaccgtagcagtaaaaatgcttaaagatgacgcaacagataaagacctcagcgacctggtctcagaaatggaaatgatgaaaatgataggcaagcataagaacataatcaacctcctgggagcctgtactcaggggggtcctctctatgtactcgttgaatatgcggcaaaaggaaatctgcgagaattccttcgggcaaggcggcctccagggctggattattccttcgatacatgtaaaccgccagaggaacagctgacattcaaggatttagtgtcctgtgcataccaggtggcacgtggaatggagtatctggccagccaaaaatgcattcatcgggatctggccgctagaaacgtcctcgtgaccgaagacaacgtcatgaagatcgcggacttcggtttggcccgtgatgtccacaatctggattactacaaaaagacaactaacgggaggcttcccgtgaaatggatggcgcctgaagctctgttcgacagggtctatacccatcagagtgacgtatggtctttcggagtgctgctttgggagatctttaccctcggcggaagcccttatcccggtattcccgttgaagagctttttaaactgctcaaggaagggcatcggatggacaagccagcaaactgcactcacgacctgtatatgatcatgcgagaatgctggcacgctgctccaagccagagaccaaccttcaagcagttggtcgaagacctggaccgagtgctcaccgtgacatcaaccgacgagtaccttgatctttccgcgcctttcgaacagtattctcccggaggccaggataccccctcctcttcttcatcgggagatgactccgtcttcgcccacgatctgctgccgccagctcctccatcttccggcggatcccgaacctag

SEQ ID NO: 28680 - DNA, 2379 bp, synthetic construct
  misc_feature 1..2379: note = Description of Artificial Sequence: Synthetic coding sequence
  source 1..2379: mol_type = other DNA
atgggggcacccgcatgtgcgctcgctctgtgcgttgccgtagccattgtggccggagccagctctgagagccttggcactgagcagcgtgtggtggggcgtgccgctgaagtccccggacctgagccgggtcagcaggaacagctggtgtttggctctggcgacgccgtggagctctcctgcccgccacctgggggtggccctatgggtccgactgtgtgggtgaaggacggcaccggtttggtaccatcagagagagtcctggttggcccacagagacttcaagtactgaacgccagccatgaggactcaggggcttacagttgtcggcaacgtcttactcagagggtgctgtgccatttttccgtgagggtcaccgatgccccttcctcaggggacgacgaggacggagaggacgaagcggaagacaccggggttgacacaggggctccatactggacgagaccagagcggatggataaaaagctactcgctgttccggcagctaacacagtgagattccgatgtcccgctgcagggaaccccaccccttcgatcagttggctcaagaacgggagagagttcagaggagaacaccgaataggcggaatcaagctgcgccaccagcagtggtctcttgttatggagtcagtggtgcctagcgataggggaaattatacatgcgtggtagagaacaagttcggcagcattaggcagacatatacgttggacgtcttggaacgctcccctcaccgccctatattgcaggcgggtctgccagcaaatcagacagctgtcttagggtcggacgtggaatttcactgtaaagtgtactccgacgcccaaccccatatccagtggctgaagcacgtcgaggtaaatgggtcaaaagtgggtccagatggcacaccctacgtgacagtgctcaagacagcaggtgcaaacaccacagacaaggagttggaggttctgtccttacataatgtaacatttgaggacgcaggggaatacacctgcctggccggaaactccataggattttcccatcattcagcgtggcttgtcgtgctcccagccgaggaagaactggtagaagccgacgaggccggatccgtgtacgctgggattctcagctatggtgtggggttcttcttattcatactggtagtggccgctgtcacactctgtcggctgcggtctccccctaaaaaggggttaggctcaccaacagttcacaaaattagtagatttccactgaaacgacagcaagtttctttagagagcaatgctagcatgtcttccaatacccccctggtgagaattgcgaggctcagttcaggggagggacctactcttgctaacgtgagcgaactggagctcccagccgaccccaaatgggaactgagtagggctaggcttactctcggaaagccactgggggagggctgcttcggtcaggtggttatggcagaggccatcgggatcgataaagacagggcggctaagccggtcactgtcgcagtgaagatgctcaaggatgacgccaccgataaagacctgagtgaccttgtttcagagatggaaatgatgaaaatgatagggaaacataaaaacataatcaatttactgggagcctgtacccagggcggacctctctatgtcctggttgagtacgctgcaaaagggaaccttagagaatttctgcgggctcggaggccaccaggactcgactactcgtttgacacttgcaaaccgccagaggagcagttgaccttcaaggatttagttagttgtgcttatcaggtcgccagagggatggagtatctggcaagtcaaaaatgtatccatagggatttggctgccagaaatgtccttgtaacagaggacaacgtgatgaagattgctgacttcggcctggcacgggatgttcacaacctagattattataagaagactaccaatctggtgctctgggggcctgcgttgggggacctccacgcaggcggtttgccagtcccacggcacccttgtggcggagcacttcaggcggcagaggggggacctccgcacggccaggctcggcagctgcacactcgtccggtgcacgaccatgcaggtgtccttgcatgtagagccctccctgaggcccacctacaggctgccggaggtggccctggaccttgtccctatcgggacgtgcatcgcagggtccctgggcctgtgggtgctttccgcgctgtgctgcccggatggccaggacatccacagcttcaattactcagaggtcggttgcgcgtgtgccctcggccagcagcgccaggtccaactcagcagtgggggttggcagatgtgaaaggtcactggtccccaaccatgtag

SEQ ID NO: 28681 - DNA, 2409 bp, synthetic construct
  misc_feature 1..2409: note = Description of Artificial Sequence: Synthetic coding sequence
  source 1..2409: mol_type = other DNA
atgcgactcctgctagctctgctcggagtcctgctctccgtgcccggtcccccagttctttctctggaagcatcagaggaagtagagcttgaaccttgcctggccccatctcttgaacaacaggagcaggagctgaccgttgctttaggacagccagttagattatgctgcggcagagccgagcggggagggcattggtacaaagagggctcgagattggctccagccggacgcgtccggggatggagaggtaggctagagatcgctagtttcctgcctgaggacgccggtcgctatctgtgtctagctagagggagtatgatcgtgttgcagaatttaaccctcatcacaggcgactcactgacttcttcaaatgatgatgaggaccctaaaagtcatcgggatccatccaacagacacagctacccacagcaggctccatactggactcaccctcagcggatggagaagaagctacacgctgtgccagccggaaatacagttaagtttaggtgcccagccgcaggaaaccctacacctaccatcaggtggcttaaagacggacaggccttccatggggagaacagaatcggcggaattaggctgcgccatcagcattggtcactggtgatggaatctgtggtaccctcagaccgaggtacatacacttgcctcgtggagaacgcggtgggatccatccgctataactatttgttggacgtgttagagagaagtccgcataggcccatcctgcaagctggtctgccggctaacacaacagccgtggttggcagcgatgtagagctgctttgcaaggtctactccgacgcccagccacacatacagtggctgaagcacatcgtgataaacggatcgtcctttggagccgacggcttcccatacgtgcaagtcctaaagaccgccgacattaacagcagcgaagtcgaggtgctgtatctgagaaacgtgtccgctgaggacgcgggagagtatacatgcctggcagggaactctattgggctgtcttaccagtctgcctggctaaccgtgctgcccgaagaagaccctacatggacagcagcagccccagaggcccgttacactgacattatcctgtacgcctctggtagcctggcccttgcggtgcttcttcttctcgccggattataccgaggacaagcactacacggacgtcacccgagacccccagctacagtccagaagctgtcgaggttcccactcgcccgacaatttagcctcgaaagcggtagctccggtaagagtagctcttcattggtccgcggagtccgccttagctcctcaggccctgctctgctcgctgggctggtctcacttgacctgcccctcgacccattgtgggagtttcctcgagatcgactggtcctgggcaaacctctcggtgaggggtgcttcggtcaagtggtgagagccgaagctttcggaatggaccccgcacggcctgaccaggcctccaccgttgcagtgaaaatgttgaaggacaatgcttctgacaaggatctggccgatctagtcagcgagatggaggtgatgaagctgattggcaggcacaagaacatcattaacttactgggcgtatgcacccaagaaggcccactgtatgttatcgtagagtgcgcagcaaaggggaaccttcgtgagtttcttagagcacggaggccacccggtcctgacctgtcccccgacggcccacgctcttctgagggtcccctgtctttccccgtacttgtaagctgtgcttatcaagtggcacggggaatgcaatacctcgagagccgtaagtgcattcatcgggatttggctgcacggaatgttttagttacggaggataatgtgatgaaaattgccgattttggcttggccagaggcgtgcaccatatcgattattataagaagactagcaacgggagactgcccgtcaaatggatggcccctgaggcgttatttgatagagtctatacccaccaatccgatgtgtggtcctttgggatactactttgggagatcttcacgttaggcggatcgccctatccaggaataccagtagaggaattattcagcctgctcagggaaggccatcgcatggaccgcccacctcactgtcctcccgagctgtacgggcttatgagagaatgctggcacgccgctccatctcagaggcccaccttcaaacaactggtggaagctttggataaggtgctgctggccgtgtcagaagaatatctggaccttcgcctgacttttggtccctacagcccctcaggaggcgatgccagctctacctgctcatctagtgatagtgtgttttcccatgaccccctgccactgggatcctcatcatttccattcgggtccggcgtgcagacatag

SEQ ID NO: 28682 - DNA, 2289 bp, synthetic construct
  misc_feature 1..2289: note = Description of Artificial Sequence: Synthetic coding sequence
  source 1..2289: mol_type = other DNA
atgagactcctgctcgcccttctgggcgtactactttctgtacccggacccccagtgctgtcactggaggcaagcgaagaagtcgaactggagccctgcctggccccttcacttgaacagcaggaacaggagctcactgtggcactgggtcaaccggtaagactgtgttgtggacgggcagaaagaggaggccactggtacaaggagggatccagactggcacccgctgggagagtgcggggatggcgtgggcgtttggaaatcgcaagctttcttcctgaggatgctgggaggtacctgtgcttggccagaggcagcatgatcgtcttgcagaacctaaccctcataacgggagactctttaacctcaagcaatgatgacgaagatcctaagtcccatcgggaccctagcaaccggcacagctatccccagcaggctccctactggacccacccccaaaggatggaaaagaaactgcacgctgttccagcgggaaacacagtgaagttccggtgccccgctgcaggaaatcctacacctactataaggtggttaaaagacggacaggcgtttcacggagagaatcgcatcggtggtatccgcttgcggcaccaacactggtctctggtcatggaaagcgttgtcccctcggacaggggcacgtatacatgtctggttgagaatgccgttggttctatcagatataattatctgctggacgtactggagcggtcgccacaccgtcccatcctgcaggccggactgccggcaaacaccacggctgtggtgggaagtgacgtggagctgctttgcaaggtttactctgatgcccagccacacattcagtggcttaaacatatagtgataaacggaagctcctttggcgcagacggcttcccatatgtgcaggttctgaagaccgccgatatcaactcgagcgaagtagaagtgctgtacctcagaaacgtgagcgcagaagacgcaggagagtatacatgcctggccggaaatagtattggattgtcctatcagtctgcctggttaaccgttctgcccggtaccggacgtatcccgcatcttacatgtgactcactcacaccagccggaagaacaaaatctcccacactccagttctctctcgaaagtggcagcagcggaaagtcttcaagtagcctggtgcggggagtgcggcttagcagcagtgggcctgcgttactcgcagggcttgtcagcctggacttgcccctggatcccctttgggaatttccgagagatcggcttgtgctcggcaagccattgggcgaagggtgcttcggacaggtcgtacgtgctgaagcattcggtatggacccagccaggcctgatcaggccagcacagtggcagtcaaaatgcttaaagacaacgcctctgacaaagatctggccgatctcgtgagtgagatggaagtgatgaaactgattggtcgccacaagaacatcatcaacctgctcggagtgtgtacccaggagggacccctgtatgtgatcgtcgaatgcgctgcaaagggcaacctacgggaatttctgcgtgcgaggagaccccctggtcctgatctctctccggatggacccaggtccagtgaggggcctctatcctttccagtcctggtttcctgcgcttatcaggtggctcgtggcatgcagtatttggagtctcggaagtgcatacatcgggatcttgctgccaggaatgtcctcgtgaccgaggacaacgtaatgaagattgccgacttcggccttgccagaggtgtgcatcacattgattattataaaaaaacaagcaatgggagattacccgtgaagtggatggcgccagaagcgctgtttgacagagtctatactcaccagtccgacgtgtggtccttcggcatcctgctatgggaaatcttcacattgggcggatccccctaccctggaattcccgtcgaagagctatttagcttgttgagggaaggccaccggatggacagacctccccattgccccccagagctctacgggttaatgagggagtgttggcacgcagcccctagtcagcgccctacctttaaacagctggtggaggctctggacaaagtgctcctggccgttagtgaggagtatctggacttgcggctaactttcggtccctactccccgtccggtggagacgccagcagcacatgttcatcctcagattcagtgtttagtcacgaccccctgccccttggatctagctctttcccgttcgggagtggcgtgcagacctag

SEQ ID NO: 28683 - DNA, 3093 bp, synthetic construct
  misc_feature 1..3093: note = Description of Artificial Sequence: Synthetic coding sequence
  source 1..3093: mol_type = other DNA
ccttgcatgtggcatcaacagcatgtgccctgtgtgtgcgtgtgcccttacgtctgtgtgtgtatgagggtttgcgtttgtgtatgctggcccctgtcctgcgccttgaatgcagtgtgtgtcacatgccctaagtccgtggccttcgcattgggcgtggcatctgccgcatgcggatgcgtgggtgtcaaagagtggtggctcctgcaacacgcacttcaatcggcttgtgccctgcatgtgcgttgtgttctctgtactcaggaggctgcttctgacggggcagcaggcagtgctgatttatgtcctcttcccaccgagccgtgtctcgctccatccctcgaacaacaggagcaggagctcactgtggctctggggcagcccgtaaggctttgttgtggacgcgcagaaaggggtgggcattggtacaaggagggatccagactggcacccgctggtcgggttcgcggatggaggggacgactggaaatcgcctccttccttcccgaggacgcgggacggtatctgtgccttgcaaggggatccatgatcgtgctgcaaaacctcactttaataaccggcgattcccctcctgctactatgatgaggacgccatcccctatcggcactcccagaatcggtactgtcaccccttccaaagtttcacgctcacctcgcacctgtgtcccagccgcagcccacctgatcaccgagaagagacgccctgtctgggagcataccgtgatactcggggctttcccttgccccccagctccttattggactcacccacagagaatggaaaaaaagttgcatgcagtgccagctggtaacacagtgaaattccgatgccctgccgcaggcaaccccacacctaccatccggtggctcaaggacgggcaggcttttcacggcgaaaaccgtatcggcggaatacgcctacgtcaccagcattggagtcttgtgatggagtctgtggtcccgagcgaccgaggaacatatacctgcctcgtagagaatgcagtaggaagcatcagatacaattaccttctagatgttttggagcgcagtcctcaccgtcctatactgcaagctggactgccggctaataccacagccgtggtgggcagcgatgtcgagctcctctgcaaggtgtattctgatgcgcagcctcatatccagtggctcaagcacatcgtcatcaatggatcgtcgtttggggctgatggcttcccgtacgttcaagtgctgaagaccgcagatattaacagctctgaggtcgaggtactctacctccggaatgtctcggctgaagatgccggagaatacacatgtctcgcaggcaactccatcgggcttagttatcagagcgcgtggcttaccgttctgcccggagagcacctgaagggccaagagatgctgagggacgcaccactcggtcaacagtggggtctctggcctgtggggtggtccgtgagtgtcggcctctggggactggcatggggagcagtctgtggctttgtcggtctatcttgcatgacagctcccctctgtctcagcacgcgagggaggccttgtgacaggcttctcaggtgcgggtgtcttggccttggtattacgacagcgagctctgtttgcgttcctacatatgtgggaagctgggaagggctagggtgtaccggaagaccagtgtcccccctgacctccctgtcagtctgtgtctgcccatgtgccagggcggaggaagacccaacttggactgctgccgcacccgaggccagatataccgacattatcctctatgcgtcaggcagtctggcattagccgtgctgcttctgcttgctggattgtaccggggtcaagccctgcacgggagacaccccaggccccctgccactgtgcagaagctgtctagattcccactggctcgccagttcagcctagagtccggaagctccggaaaaagcagcagtagcctggtccggggagtcaggcttagcagtagcggcccagcactgttggcgggtctggtgtcccttgatttacctctcgacccactctgggagttcccaagggatcgcctggttttgggcaagccgctcggagagggatgcttcgggcaggtggtgcgcgctgaagccttcggaatggaccctgcaagacccgaccaagcctctacagttgccgtgaaaatgctgaaggataatgcttccgacaaagatctcgcagatctggtctctgagatggaggtgatgaagctcatcggacgccataagaacatcatcaacttactcggagtctgtacacaggagggcccactgtacgtgattgttgaatgtgctgctaaaggtaacttgcgcgagttcctaagggcccgtcgaccaccaggacctgatttatcccctgatggtccaagaagttcagaaggccctttgagtttccccgtgctggtcagttgcgcctatcaggtcgcacgcggtatgcagtacctcgagtctcgcaaatgtatccatcgagatttggccgcaaggaacgtcttggtgactgaggataacgtcatgaagattgccgactttggactcgccagaggagtccaccacattgactactacaagaagacctccaacgggcgtctgcccgtaaaatggatggcgcctgaggcactgtttgatagggtgtacactcaccagtccgatgtctggtccttcggcattctcttatgggaaatcttcactctcggcggaagtccatatcccggaatcccagtcgaggagttgttttctctgctgcgggagggccaccgtatggatagacctccgcactgtccaccagagctgtacgggctgatgagggaatgttggcatgcagccccttctcagagaccgacctttaagcagttagttgaagccctggataaagttcttttggccgtcagcgaagagtacctcgatctgagactgaccttcggcccttacagcccctccggcggagatgccagcagtacatgttcaagttcagatagtgtgttctcccacgatccactccccttgggttcctcttcctttcccttcggatccggggtgcaaacatag

SEQ ID NO: 28684 - DNA, 2289 bp, synthetic construct
  misc_feature 1..2289: note = Description of Artificial Sequence: Synthetic coding sequence
  source 1..2289: mol_type = other DNA
atgcgccttcttctggccctgttaggcgtcttgctgtcagtacctggaccaccagtgttgtctctcgaggcctccgaggaagtcgaactggaaccttgtctggctcccagtctcgagcagcaagagcaggaactgacagtcgctcttggacagcccgtgagactctgttgcggcagggctgaacgtggaggacattggtataaggagggtagcagactggcaccggctggaagagtccgcggttggaggggaagactggaaatcgctagtttcctacccgaagacgccggtaggtatctgtgcctggctcgcggatcgatgatcgttcttcagaacctgaccctcatcactggcgacagtttgacctctagtaatgatgacgaggatcctaaatcccatagggacccctcaaacagacactcctacccccagcaggcaccctattggacccatcctcagaggatggaaaagaaactccacgctgtgcccgctggcaatactgttaagttccgatgtccagccgcagggaatccgacaccaactatcagatggcttaaagacgggcaggcttttcacggagagaatcgcataggcggtattcgtctgagacaccaacattggagcctagtaatggagtccgtggtgccttcagacaggggcacctacacttgtctagtagagaatgctgtaggcagtatccggtataactatttgctcgacgtcttggaacgctcaccacataggcctatactgcaggccggactgccagcgaataccaccgccgtggtcggcagcgacgtggaactgttatgcaaggtgtattccgacgcacagcctcatatacagtggctgaagcacattgttatcaatggtagctccttcggcgcagacgggtttccgtatgtgcaggtgttaaagaccgctgatataaactcctctgaagttgaggtgctctatctgagaaatgtgagtgcagaagacgcgggtgaatacacctgccttgccggaaattccatagggttgtcataccagagtgcctggcttacagttttgcctggaactgggaggattccacacctgacctgcgattctctaacacccgctggccgtacgaagagccccacactgcaattcagcctggagtcaggatcatctggtaaaagttcatcctccctggtgaggggcgtgcggctgtcctctagtggacccgctctgctggctggtctggtgagcctggatctccctttggatccgctgtgggagtttccccgtgaccgcctggtgctcggcaagcctctgggtgaggggtgctttggacaggtggtcagggcagaagcgttcgggatggatcccgcaaggcctgatcaggcaagcacggtggccgtgaagatgctgaaggataacgctagtgacaaggacctggcagacttagtgagcgagatggaagttatgaaactgatcggtcgccataaaaacatcataaacctgctgggcgtatgcacccaggagggcccactatatgtgattgtggaatgcgcggcaaagggtaatctgcgagaatttctgcgggcacgacgtccacccggacccgatctaagccccgacggtcctcggtctagcgagggacccctgtcgttccccgtactggttagctgcgcctaccaagtagccaggggtatgcagtatctggaaagccggaagtgtatacaccgcgacctagcagcacggaacgttttggttaccgaggacaatgttatgaaaatcgccgatttcggtctggcgaggggggtgcatcatattgactactacaaaaagactagcaatggcagactgcccgttaagtggatggcgccagaggcactcttcgatcgagtgtacacccaccagtccgatgtttggtctttcgggatattgttatgggagatatttaccctggggggttccccttatcctggaatccctgttgaggagcttttcagtctcctgagagaaggccatcgaatggatcggccaccccattgccctcctgagttatacggattaatgcgggaatgttggcatgccgcaccatctcagcgacccacattcaagcagctcgtggaagccttagacaaagtcttactggctgttagtgaggagtatctcgaccttagactcaccttcggcccatattcaccctccggaggcgatgcaagttccacatgttcttcaagcgactccgtgttcagccacgatccgttgcccttgggctcatcctcatttccgtttgggtctggcgtgcaaacatag

SEQ ID NO: 28685 - DNA, 2409 bp, synthetic construct
  misc_feature 1..2409: note = Description of Artificial Sequence: Synthetic coding sequence
  source 1..2409: mol_type = other DNA
atgcgcctgttactcgccctcctaggcgtgttactgagtgtaccaggcccacccgtcctgtccttggaggcatctgaagaagtggagcttgagccctgcctggccccttccctggaacaacaggagcaagagctcaccgtggcgctgggacagcctgtgcgtttgtgctgtggacgagcggagaggggaggacactggtacaaggaggggagcaggttggctcccgctggccgagtgcgcggttggcggggtcgcctagaaatcgcgagttttttacctgaagacgcgggtcgctatctgtgtctggcacgaggttcaatgattgtgcttcagaacctcacgttgattacaggtgactctctgacctcctctaatgacgacgaggatccgaaaagtcatcgcgatccgagcaatcgtcattcctacccacagcaagccccttattggacccaccctcagagaatggaaaagaagctccatgctgtgccagccggtaatactgttaaatttagatgccccgcagcagggaaccccacaccaacaatcagatggctgaaagacggtcaagcatttcatggcgagaatcggatcggcggtattcggctgaggcatcagcactggtccctggtgatggaaagcgtggtgcctagtgaccgcggaacatatacctgtcttgtggaaaacgctgtaggcagtattcggtataattacctcctggacgtgctggaaaggagcccacatcgccctattctgcaggcgggtcttcctgcaaataccacagcggtcgtcggatctgatgtggaactgttgtgcaaggtctacagcgacgctcaaccccacatccagtggctgaagcatatcgtgatcaacggatcaagttttggcgctgatggattcccatatgtgcaggtcctgaaaacggcagatattaattcttctgaggttgaggtcctctaccttcggaacgtgtctgctgaagacgctggagagtacacatgcctggccggaaattcgattggtctgtcttatcaaagcgcatggctcacagtgctccctgaagaggatccgacatggacagcagctgcgcctgaagcaagatacaccgatattatcctctacgcttctggctctctggccttggcggtgttattgttactggcaggtctatacaggggacaggcactccatggtcgccatccaaggcctccggctacagttcagaaactaagtcgctttcctcttgcccgacagttctctttggagtctgggtccagtggaaaaagttcttcatctctcgtgagaggcgttaggctgtctagcagcggtcctgccctgctggcagggcttgtgagcttggacctacctctggaccctctatgggagttcccacgtgatagattggtcctgggtaagccactgggtgagggctgtttcggccaggtggtgcgggctgaagccttcggcatggaccctgccaggcccgaccaggcgtcaacagttgcagtcaaaatgctcaaggacaacgcctccgacaaggacctggccgatttagtcagtgaaatggaggtcatgaagctcattgggaggcataaaaatatcattaacctgttaggtgtttgtacgcaggaagggcctctttatgttatcgttgagtgcgcagcgaagggtaacctacgcgagttcctcagggccaggagacctccgggtccagacctgagtcccgatggaccacggagctctgagggacctctttctttccccgtgctggtgtcctgcgcctaccaggtggcccgtggcatgcagtacctcgagtcccgcaagtgcatccatcgggatctggcagctaggaacgtgctggtcacagaggacaatgtgatgaaaatcgcggactttggcttggctagaggagtgcatcatatagattattacaaaaaaacttccaatggccgtctgcctgtcaagtggatggcccctgaggcgctgtttgatcgggtctacacacatcaaagcgacgtttggagctttggaatacttctgtgggagatctttactcttggaggaagtccctatcctggtatccccgtagaggagctgttctctttgctgcgagagggccatagaatggacaggccaccacactgcccccctgagctgtatggcctgatgcgcgagtgttggcacgcagctcccagccagagacctactttcaagcagttagtggaagccctggacaaagtgcttctggctgtctctgaagagtacctggatctaagactcacgtttggcccttatagcccttccggcggtgacgcctcatctacctgctcaagctccgattcagtcttttcacacgatcccttacccttaggctctagctcattcccctttggctcaggggttcagacctag

SEQ ID NO: 28686 - DNA, 606 bp, synthetic construct
  misc_feature 1..606: note = Description of Artificial Sequence: Synthetic coding sequence
  source 1..606: mol_type = other DNA
atgcgcctgctgctggcactgctcggcgtgctgctgtctgttcccggtccaccagtgctcagtctggaggcctcagaggaggtcgagttggaaccttgccttgccccttccctcgagcagcaggagcaggaactgaccgtcgctctcggacagccggtgcgattatgttgcgggagggcagagcggggtggccactggtacaaagaaggcagtagattggctccagcaggcagggtgcgtggttggcgcggtcggcttgagatcgcatcattcctgccagaagacgcgggacgctatctgtgtttagccagggggtctatgatcgtattgcagaaccttaccctcatcaccggtgactcacttacaagtagtaatgatgacgaagaccccaagagccacagagatcctagcaatcgtcactcatatccacagcaggccccttactggactcacccccagcgaatggaaaagaagcttcacgcggttcccgctggtaataccgtgaagtttagatgcccagctgccggaaaccccaccccaactattagatggctgaaggacggccaagctttccatggcgaaaatcgtattggcggtatcagatag

SEQ ID NO: 28687 - DNA, 264 bp, synthetic construct
  misc_feature 1..264: note = Description of Artificial Sequence: Synthetic coding sequence
  source 1..264: mol_type = other DNA
atgcggttgcttttggcgttgttgggcgttcttttaagcgtcccgggacccccagtgctgtctttagaggcttcagaagaagtggagctcgaaccctgcctagctccttccttggaacaacaggaacaggagttgactgtggccttgggacagcctgtgagattgtgttgcggcagagctgaaagagggggtcactggtataaggagggcagcaggctggcccctgcgggacgagttagaggctggaggggcaggctggagtag

SEQ ID NO: 28688 - DNA, 327 bp, synthetic construct
  misc_feature 1..327: note = Description of Artificial Sequence: Synthetic coding sequence
  source 1..327: mol_type = other DNA
atgcggctcctgctggcactactgggcgtgctgctgtcagttcctgggcctcctgtgctgagtctggaggcttctgaggaggtggagctggagccgtgcctggctccaagcttggagcagcaggagcaggaattaaccgtcgcgctgggccagcccgttaggctgtgctgcgggagagccgagagaggaggccattggtataaagagggatcccgcctcgcccctgcgggacgcgtgcgaggatggcgcggaaggctcgagatcgctagcttcctgcccgaagatgcaggcagatacctgtgcttggctcgaggatctatgatctag

SEQ ID NO: 28689 - DNA, 345 bp, synthetic construct
  misc_feature 1..345: note = Description of Artificial Sequence: Synthetic coding sequence
  source 1..345: mol_type = other DNA
atgcgtcttctgctggccctactcggagtcttactgtcggtgcccggtccccctgttctcagcctggaagcttctgaagaagttgagttggagccatgtctggcacctagcctggaacagcaggagcaggaactaaccgtcgccctaggacaaccagtgagactctgctgtggcagggctgaacggggtggacactggtacaaagaaggtagtaggctggcacccgctgggcgtgtgaggggctggcgaggaaggctcgaaattgcttccttcctccccgaggatgccggtagatacctgtgtctggctcggggtagcatgatcgtgttgcagaaccttacttag

SEQ ID NO: 28690 - DNA, 7163 bp, synthetic construct
  misc_feature 1..7163: note = Description of Artificial Sequence: Synthetic coding sequence
  source 1..7163: mol_type = other DNA
atgctgcggggtcctgggcctggcctactccttttagccgtccagtgtctgggaaccgctgtcccaagcactggagcgtctaagagtaagcggcaggctcagcaaatggtccagcctcagagtcctgttgccgtatcccaatctaaacccggttgctacgataacggaaaacattaccaaatcaaccaacaatgggaaaggacgtatctcggtaatgccctggtatgcacttgctacggcggtagtaggggcttcaactgcgagagtaagccggaggccgaagaaacatgttttgataagtacacaggcaatacttatcgagtcggggatacatacgagaggcccaaggactccatgatttgggactgtacatgtataggcgctggtagaggccgaatctcttgtacaattgcaaacagatgccacgagggtggccaaagttataagatcggcgatacctggaggcgaccacacgagactggagggtatatgctggagtgtgtgtgtctcggtaatggcaagggtgagtggacatgtaagcccatcgccgaaaagtgcttcgatcatgccgcaggtactagctacgttgtgggtgaaacctgggaaaaaccttaccaaggctggatgatggtcgattgcacatgtcttggggagggctccgggcgaattacttgtacctcccggaataggtgcaatgatcaggatactcgcacttcatatcgtatcggtgacacgtggagcaaaaaggataaccggggaaaccttcttcagtgtatatgtactggaaatgggagaggcgagtggaaatgcgagcgtcatacttccgtccaaaccacctcaagcggatccggacctttcacagatgtgcgtgctgccgtctaccaaccacagccacatccacaaccgccaccttatgggcattgtgtgacagatagcggagtcgtctattccgttgggatgcagtggcttaagacgcaggggaataagcagatgctgtgcacctgcctggggaatggggtgtcttgccaggagaccgcggtcacacagacttatggcggaaattctaatggtgagccctgtgtacttccctttacctataacggacgtacgttttactcctgtaccaccgagggcagacaggatggacacttgtggtgctccacgaccagcaattacgaacaggaccagaagtacagcttttgcactgaccataccgttttggttcagacaagaggcggaaattctaacggagctttatgccacttccccttcttatacaacaaccataactatactgactgcacaagcgagggtcgcagggataacatgaagtggtgtggcacaacacaaaattacgacgcagatcaaaaattcggattttgcccgatggcagctcacgaggaaatctgcacgacaaacgaaggtgtgatgtaccggataggagaccagtgggataagcagcatgacatgggccatatgatgagatgcacctgcgtgggcaacggaaggggggagtggacctgcattgcatatagccagctacgcgaccagtgcattgtggacgacattacttataacgtgaacgatacctttcacaaacgtcacgaagagggccacatgttgaattgcacttgctttggccaggggagaggcaggtggaagtgtgaccccgtagaccagtgccaggattcagagacgggtaccttctaccagataggagactcttgggagaagtatgttcatggggtgaggtaccagtgctactgttacggtagaggtattggagagtggcactgccagccattacagacctatccttcctcttcaggaccagtggaggtgttcattacagaaacaccatctcagcctaatagccatccaattcagtggaacgcgccacaaccctctcatataagtaagtacattctccgctggcgtccgaaaaactcagttggccgttggaaagaggccaccattcccggacatttgaattcttacacaattaaaggcctcaagccaggagtcgtgtatgagggccagctgatttctatccagcaatatgggcaccaggaagtgacacgctttgattttacaacaacatctacctcaacgccggtcacatctaatactgtgaccggggagacaaccccttttagtccactggtagccacgtctgagagcgtcacggagataactgctagttctttcgttgtctcgtgggtaagcgcttcagacacggtgagcgggtttagggtggagtatgaactctctgaagaaggtgacgagcctcaatacctagatttaccaagtaccgctaccagtgtgaatattcctgacttgctccccggacggaagtatatagttaacgtctatcagatttctgaggatggagaacaatcgttgatactgagtacatcacagaccacggctccagatgcccctccggacactaccgtagaccaagtcgacgacacttccatcgtcgtgcgttggagtcgtccacaagctcctatcaccggttacaggatcgtatactcaccttcagtggagggatcaagtactgagctcaatctgccagagactgctaattccgtcaccttatctgatcttcagccgggagttcagtacaacatcaccatatacgctgtggaggagaatcaggagagtactccagttgttattcaacaggagaccacaggtactcccaggtccgatacagtaccctctccccgtgaccttcagtttgtagaggttaccgacgtcaaagtcacaattatgtggaccccaccagagtccgccgtcactggctaccgggttgacgtcatacccgtcaacttgcccggagagcacggtcagcgtttacctattagcagaaatacattcgccgaagtgaccggtctcagtccaggggtgacctactattttaaagtgttcgcagtgtctcacggtcgcgagagtaagcctctcacagcgcagcagacaacgaaactggacgcacctaccaacctgcagttcgtcaatgagacagacagtacggtgctggtgcggtggacacctccaagagcacagataaccggctacaggctgacagttggcctcaccagaaggggccagccccgacagtacaatgttggaccgtctgtgagcaagtacccgttgagaaacctgcaacctgcttcggagtataccgtgtcactggttgccattaagggcaaccaggagagccctaaggccaccggggttttcaccacactacagcccggaagctctatccctccttataacactgaagtgacagagaccaccatcgttatcacctggacaccggcaccacgaattggattcaagctaggagttagaccgagtcagggtggagaggccccaagggaagtgacttccgatagcggttctattgtagtctccggccttaccccaggtgtggagtatgtgtacacaatccaggtgctgagagatggccaggagagggacgcacccatcgttaataaagtggtgactcctttatctccgcctacaaacctgcatctcgaggccaatccagatacaggggttctgacagtctcttgggagcggtccactaccccagatattactggctacagaatcacaaccacccctactaatgggcagcagggaaattcccttgaagaagtggtacatgccgatcaatcctcttgtacctttgacaatctttcccccggtcttgagtacaacgttagtgtgtacactgtgaaggatgataaggagagcgttccaatcagcgatacaatcatcccagaggtgccccagctgaccgacctatcctttgttgacataacggatagctcgataggcctcagatggaccccactgaacagctcaaccattatcggttaccgtattacagtggtggctgcaggcgaagggataccaatcttcgaagatttcgttgacagttcggtcgggtattacaccgtgaccggacttgagcccggaatcgattatgatatctcagtgataactcttatcaacggcggtgaatcagccccaactaccctaacacagcagaccgctgtccctccacccacagatcttcggttttttagcgatataacagcgaactcatttaccgttcattggatcgcaccaagagcaactatcactggataccgcattcgacatcatcctgaacacttctcaggacgccctagagaagaccgagtacctcacagccgaaactctatcaccctgaccaatttgacccccggaacggagtatgttgtaagtatcgtcgcactcaacgggagggaagagagccctcttcttataggtcaacagagtacagtgtctgacgttccacgggacctggaggtggtcgcagcgactccgacgtctttgctcatctcttgggacgccccagccgtcaccgtgcggtattacagaattacttacggcgaaactggaggtaactccccagtccaggagttcaccgttcccggttctaagagcactgctaccattagcggactcaagcccggagtggactacactattacagtctacgctgtaaccggcagaggggatagccccgcatcttccaagcccattagcattaactaccgcacggagatcgataagccctcccagatgcaggtcactgatgtacaggataactcaatcagcgtgaaatggttgcccagctcatcgcctgtcacaggctatagggtgacaacaacacctaaaaacggaccaggcccaactaaaacaaagaccgcagggcctgaccaaaccgaaatgactatcgaaggactgcaacccaccgtggagtacgtcgtcagcgtatacgcccagaatcccagtggtgaatcacaacccctggttcagacagccgtaaccaatatcgatagacctaagggattagcatttaccgacgtggacgtagacagtattaagatagcttgggaatctcctcaggggcaagttagcaggtacagagtgacctattcttcccccgaggacggcatccacgagctgtttccagcaccagatggggaagaagatactgccgaacttcaaggccttagacctggctcggagtacaccgtgagcgtggtcgctctccacgacgacatggagtctcagccgctgataggcacccagtctaccgctatcccagctccaactgacctgaaattcacccaggtgactccaactagcctgagcgcacagtggacaccacctaatgtgcagctcaccggctaccgggtgagagtgactccaaaggagaagaccggccctatgaaagaaatcaacctcgctccagattctagctctgtcgtcgtatctggcctcatggtggctacgaaatatgaagtctctgtgtacgctctgaaggacaccctcacatcccggcctgcgcaaggcgtcgttacaacattagaaaacgtctcccctcctcgccgtgctcgtgttacagatgcaacggagactactatcacaatttcctggcggacaaaaactgaaacaataacagggtttcaggttgacgccgttcccgcaaatggacagactccgattcagcgaaccatcaagccagatgtcagaagctatactattacgggcttacagcctggcactgattacaagatttatttgtacactcttaatgacaacgccagatcaagccccgttgtgatcgacgcctcaaccgcaatcgacgcaccctctaacctcaggttcctggcaactactccgaattccctgctggtgagctggcagccaccccgagccaggatcaccggatacatcatcaagtacgaaaagccagggagtcctccacgggaagtcgtgcccaggccacggccaggggtcactgaggccacaatcaccggcctcgaaccgggtaccgaatacactatttacgtaattgccctgaagaataatcagaagtctgaaccactcatcggcagaaaaaagacagatgaactgccgcaactagtcactttgcctcaccccaatctgcacggacccgagattctcgacgtgccatcaaccgtacaaaaaaccccgttcgtcacacaccctggatacgacacaggcaacggaattcaactgcctggcacctccggtcagcaacccagtgtgggccagcagatgatctttgaggagcacggcttccggagaactacgcctccaactaccgctactccgatccggcaccggcctagaccttaccccccaaacgtcggcgaagaaattcagatcggccacattcccagggaggacgtggactatcacctctatcctcacgggcctggactaaaccccaatgccagcaccgggcaggaggccttatcccaaacgactatcagctgggcccctttccaggatacctcagagtatatcatttcatgccatcctgtgggaaccgacgaggagcccctccagttccgggtgcctgggaccagcacttcagctaccctgacaggtttgactcgaggcgcaacatacaatgtcattgttgaggcccttaaagaccaacagcgacataaggtgagagaagaggtcgtcacagtgggtaatagcgtgaacgaaggcctcaaccagccaaccgatgatagctgctttgacccatacacagtatcccattatgctgtcggggacgagtgggagcgcatgagcgagagtggctttaagttactgtgccaatgcctcggattcggttctggacattttcggtgcgacagcagtaggtggtgtcacgacaatggggtcaattacaagatcggagagaagtgggaccggcagggggagaacggccaaatgatgagctgcacatgcttgggaaatggaaaaggggagttcaaatgcgaccctcacgaggccacctgctacgacgatggaaaaacttatcacgtgggagagcagtggcagaaagagtaccttggcgctatctgctcatgcacatgctttgggggacagaggggttggagatgcgacaactgcagacgccctggtggcgagccaagccccgaaggaactacaggccagtcctataaccagtactcacagaggtaccaccagcgcaccaacaccaatgtcaactgtcctatcgagtgctttatgcctttggatgtgcaggcagatagagaagatagccgtgaata

SEQ ID NO: 28691 - DNA, 7341 bp, synthetic construct
  misc_feature 1..7341: note = Description of Artificial Sequence: Synthetic coding sequence
  source 1..7341: mol_type = other DNA
atgctgagagggcctgggccaggcctgttgcttctggcggtgcagtgtcttggaacagcggtaccttccactggagcctcaaaatcgaaacgccaggcacaacaaatggtgcagcctcaatccccggtggccgtttctcagagtaagcccggatgctacgataacggcaagcactatcagatcaaccaacagtgggagcggacttacctgggcaacgctctggtgtgcacatgctatgggggaagcagaggcttcaactgtgaatctaagcctgaagccgaggagacctgctttgataagtacactggtaacacctacagggtaggcgacacctacgagaggccaaaagactctatgatctgggactgtacttgtatcggtgctggacgagggcgaatctcctgcacaatagctaatcgttgccatgagggcggacagagctataagattggggatacatggagacgcccacacgaaaccggtggctacatgcttgaatgtgtgtgtttggggaacggaaagggtgagtggacctgtaagcctatcgctgagaaatgtttcgatcatgctgctggtacgtcttatgtcgtgggagaaacttgggagaagccttaccaaggatggatgatggttgattgtacttgtctcggggaaggcagtggccgtattacctgtacctcccggaatagatgtaatgatcaagatactcggacaagttaccgaattggggatacgtggtctaaaaaagataatagagggaatttgctgcagtgcatttgtacggggaacggcagaggtgagtggaaatgtgagagacacactagcgtgcagacaactagcagcggatctggccctttcaccgacgtacgagccgctgtctatcagccccagccacacccccaaccccctccctacggacactgcgtgactgactctggggtggtttattcggtaggcatgcaatggctcaaaacccaggggaacaagcagatgctgtgtacgtgcttaggcaatggtgtgtcttgccaagaaacagctgtgactcaaacttacgggggtaactccaatggcgagccttgtgtcctgcccttcacctacaacggaaggacattctatagttgcacaactgagggtcgccaggacggtcatctgtggtgtagcaccaccagtaattatgaacaagaccagaaatactcattctgcactgatcacactgtcttggtgcagacccgcggaggtaattcaaacggagcactatgtcacttcccgttcctgtacaacaaccacaactacactgattgtacttccgaaggcagaagggataacatgaagtggtgcggcaccacccagaactacgatgcagatcagaaattcgggttctgccctatggcggcacacgaggaaatttgcaccaccaatgagggagttatgtatcgcatcggtgaccagtgggacaagcagcatgatatgggacatatgatgcgttgtacctgtgtgggcaatggcagaggggaatggacctgtatcgcctatagccagttgcgggatcaatgtatagttgacgacattacgtataatgtgaacgatacattccacaaaagacacgaagaaggacatatgttgaattgtacctgcttcggacaggggcgaggccgttggaagtgtgaccccgtagaccaatgtcaagacagcgaaacgggcactttttaccagattggcgactcctgggagaagtatgttcatggggtaagataccagtgctactgttatgggaggggaataggagagtggcactgccagccgctccaaacctacccttctagtagcgggcctgtggaagtttttataaccgaaaccccatcacagcccaacagccaccccatacagtggaacgctccccagcccagccatataagcaagtacattctccgatggcgcccaaaaaactccgtcggaaggtggaaggaggctaccatacccggtcacttaaattcatacacaattaaaggcctgaaacccggtgtggtgtacgaggggcaactgatctctatccagcaatacggccaccaggaagtgacccggttcgattttactacaacaagcacctcaacccccgtcacttcaaacacagtgacgggcgagacgacgcccttctctcctttggtagctactagtgagtcagtcacggagataactgcttcgtcattcgtagtgagctgggtaagcgcgagcgataccgttagcggcttcagggtggaatatgaactcagcgaagagggagatgaacctcaatacctcgacctgccatcaaccgccacatcagttaacataccagatttgttgcccggtaggaagtatattgttaacgtgtaccagatctctgaggacggcgagcagtctcttattttgagcacctcccagacgaccgctcccgatgcgcctcccgacaccacagtggatcaagtcgatgacacctcgatcgtggtgaggtggtcacggccacaagcacccatcaccggatatcgaattgtgtatagcccttcggtggaggggtcatcaacggagctcaatttacccgagacagctaattccgtgacattgtcagaccttcagcccggagtccagtacaatatcacgatatacgccgtggaagaaaatcaggaatctacacccgtggtcatccaacaggagaccaccgggacgccgagatctgacaccgttccaagccctcgtgatctgcaatttgtcgaggtgacggatgtaaaagttacaataatgtggacaccccctgaatcagccgtgacagggtaccgcgttgacgtcatccccgttaacctcccgggtgaacacggacagcgactgcctatttcccgcaacaccttcgccgaggtcaccgggctgtcacccggagtaacctactacttcaaagttttcgctgtctcgcatggcagagaaagcaaacctctgactgcccagcaaaccaccaagttagatgcgcctaccaacttacagttcgtgaacgagaccgattccactgtcctggtgaggtggacccctcctcgagcacagatcactggatacaggctcaccgtggggctcactagacggggacagcctagacaatacaatgtgggtccaagcgtgtccaaatacccattgaggaatttgcagcccgcaagcgagtacaccgtatccctcgttgccattaaagggaatcaggagtcacccaaagctacgggtgtgtttaccaccctccagccgggatcaagcatacctccgtacaataccgaggtcacagaaaccacaatcgttatcacatggactccagctcccagaattggatttaaacttggcgttcgaccaagccagggcggtgaagcaccacgggaggttacctctgattctggcagcatagtggtctcaggactgactcccggagtcgagtatgtttacaccatccaggtcctaagggatggacaggaacgcgacgcgccaatagtaaataaggtggtgacacccctgtcaccacccaccaacctccatctcgaggccaaccctgacactggtgtactgacagtgtcatgggagagatcgaccacaccggatattactggatatagaatcacgactacacctacaaatggtcagcagggcaactcacttgaagaagtggtgcacgcagaccagagcagctgcaccttcgacaacttatcacccggacttgagtacaacgtgtcagtgtacaccgttaaagacgacaaagagtcagtgcccataagcgacaccatcatacctgaagtgccgcagctcaccgatctgtctttcgtggatattacagactcctcgattgggcttaggtggacaccactcaactcatctactattataggttatcggatcactgttgtggctgctggggaaggtattcctattttcgaggactttgtggattcgtctgtgggatattataccgttacgggtctcgagcctggcatagactatgatatttcagtgataacactgatcaacgggggtgagtcagccccaacgactctcacacagcagaccgcggtgcccccaccaaccgatctgcggttcaccaatatcggtcctgataccatgcgagttacctgggctccacccccttcgatcgacctgactaatttcctggtccgctacagcccagtgaagaatgaagaggacgtagccgaactgtcaatcagtccttctgacaatgcggttgtcctgaccaacttgctcccagggaccgagtacgttgtctccgtgagctcagtctacgaacagcatgagtctactcctctgcgcggacgccagaagaccggcctagacagtcccaccggtatcgatttcagcgacattacggccaattcctttacggtgcattggattgcccctcgggcaacaataacagggtatagaattcggcaccatccagaacatttctcaggcagacccagagaggatcgcgtcccgcattctcggaattctattaccctgaccaatctgactcccggaacagaatacgtagtgagcattgttgcgctgaacggacgagaggagagcccgctgcttatcggccagcagagcacggtaagtgacgtgcccagggacctcgaagtggtggccgcaacccctactagtctgctcatctcatgggatgcccctgctgtgacagtgaggtattataggatcacctacggcgagacaggtgggaactcgcctgtccaggagttcacagtgcctggctccaaatctacagccactataagcggtctgaaaccgggagtcgactatacaatcacggtgtacgcagtcaccggacggggtgacagtccggcaagcagtaagcctatcagcattaactataggaccgaaatagataagccatcgcagatgcaggtaacggatgttcaggacaatagcattagcgtgaaatggctcccctcatccagcccagtgacaggctatcgcgtaacaacgacaccgaaaaacggaccaggacctactaagacgaagacagccggtcctgaccagacagagatgaccattgaaggactgcagccgacagtggagtacgtggtatctgtgtacgcccagaacccatcaggcgaaagccagcccctagtccaaactgcagtaaccaacatcgacagacccaagggactggctttcaccgacgtggacgtggactcaattaagatcgcctgggagtcaccccaaggccaggtgagtaggtaccgggtcacatatagttcccccgaagatggaatacatgaactgttcccagccccagatggcgaggaggacaccgcagagctacagggccttcggccaggctccgaatacactgtgtccgtggtcgctttacatgacgatatggagtcacagcctctcatcgggacccagtccacagctataccagctcccaccgacctcaagttcacccaggttactcctacatccctttccgcccagtggacacctcccaatgttcaactgaccggctaccgcgttagggtaactcccaaggaaaagactggtccgatgaaggagatcaatctcgctcccgatagcagctctgtggtagtgagcgggctcatggtggccactaagtatgaagtatctgtgtacgccctcaaagacacgctgacatcccggcctgcccagggtgtggtaacgaccctcgagaatgtttcccctcctagacgtgcccgtgtcactgatgccactgaaaccaccattactattagctggagaaccaaaactgagaccatcacgggatttcaggtggacgccgtacccgctaacggccagaccccgatacaaaggacaatcaaaccagacgtcaggagttacacaattaccgggctgcagcctggaaccgattataaaatatatctatacaccctcaacgacaatgccagatcatcacccgtggtgatagacgcctccacagcgatagacgccccatctaacctcagatttctagcaaccaccccaaactcactcttagtatcctggcagcccccaagagctcgtatcactggctatattataaagtacgagaagcccggatctccccctagggaggtggttccaagaccgagaccgggagttaccgaggcaactataaccggtctggagccgggtactgaatacaccatttacgtgatagccctgaaaaataatcagaagtctgaaccgctgatcggtcgcaaaaagactgatgagctaccacagttggtaacgctaccccaccctaatctgcatggccctgagatccttgatgtgccctcaaccgtccagaagacccctttcgtgacacatcctggatatgacaccggaaatgggatccagttgccagggactagcggccagcagccatcagtgggccagcaaatgattttcgaggaacatggatttcgacgtaccacgccgcctaccaccgccacgcctatccgacacagaccacggccttacccccctaacgtgggccaggaggcactcagtcaaacaacaatttcttgggccccttttcaggatacaagcgagtatattatctcatgtcaccccgtgggcactgacgaggagccactgcagttcagggttccagggactagtacaagcgctacccttactggcctaacacgtggggctacctataacgtcattgtcgaagcgctgaaggatcagcagcgacacaaagtgcgagaggaggttgtaaccgtaggaaactccgtaaacgaaggcctcaatcagcctaccgacgactcctgcttcgatccatacacagtgtctcattatgcggttggggatgagtgggagaggatgagtgaaagcggcttcaagctcctgtgccagtgtctaggctttgggtcaggccatttcaggtgtgatagctcccgctggtgtcacgacaatggcgtgaactacaagatcggtgagaagtgggatcggcagggcgagaacggtcagatgatgtcttgcacttgtttaggcaatggcaagggtgaatttaagtgtgacccacacgaagctacgtgctatgacgatgggaaaacgtaccacgtcggcgagcagtggcagaaagagtatttaggagccatatgttcatgcacttgcttcggaggacagaggggttggcggtgcgataactgcagacggcctggcggtgagccttcccctgaaggtacaaccggacagtcgtacaatcaatacagtcaacggtatcaccagcggactaatacaaacgtgaactgcccgatcgagtgctttatgccccttgacgtgcaggctgatagagaagactctagggagtac

SEQ ID NO: 28692 - DNA, 7068 bp, synthetic construct
  misc_feature 1..7068: note = Description of Artificial Sequence: Synthetic coding sequence
  source 1..7068: mol_type = other DNA
atgctcagaggtccaggaccgggactgctccttctggccgtacaatgtctcgggacagccgtcccatccacaggggcatctaaatcgaagagacaagcccagcaaatggtacagccacaatccccagtggccgttagccagagcaagccgggatgctatgacaacggtaagcattatcagatcaatcagcaatgggagcggacctatctgggtaatgctctcgtctgcacttgttacggaggtagtagaggtttcaattgtgagtctaaacccgaagcagaggagacttgctttgacaaatataccgggaacacctaccgcgtgggagatacatacgaaaggcctaaggattcaatgatctgggattgcacttgtatcggagctggcagagggcgaatttcctgcactattgccaatagatgccacgaaggcggacaatcctataaaatcggcgatacatggcgtaggccccacgaaacagggggttacatgttagagtgcgtctgtctgggtaatgggaaaggcgagtggacgtgcaaacccatcgccgaaaaatgtttcgaccatgctgcaggaactagctatgtggtaggcgagacctgggagaaaccttaccagggctggatgatggtggactgcacttgtctgggcgagggttccgggcgaataacttgtacctctaggaacagatgtaacgatcaggacaccagaacgtcgtatcgaataggggatacgtggtctaaaaaagataatcgcggtaatcttctccaatgcatttgcactggaaatgggaggggggagtggaagtgcgaaagacatacctctgtgcagactacttccagcggttccgggccatttactgatgtgcgcgctgccgtctaccagccccagccacaccctcagccgcctccgtacggacactgcgtcacagactccggagtggtgtacagtgttggaatgcaatggctcaaaacacagggaaataaacagatgctctgtacgtgcctcgggaacggcgtctcctgccaagaaactgcagtcacgcagacatacgggggtaactctaacggagaaccttgcgtgctgccttttacgtacaatggcagaacattttacagctgtaccaccgagggtcgccaagatggacatttgtggtgttctaccacatccaactatgaacaggaccagaaatacagcttctgtaccgatcacacagtcttagtccagacaaggggcggtaactccaatggcgctctttgccacttcccctttctttacaacaaccacaactacaccgactgcacatctgagggaaggcgggacaacatgaaatggtgtggcactacacagaactacgacgccgaccagaaattcggcttctgtcctatggccgcacatgaagaaatttgcactacgaacgaaggagttatgtataggattggcgaccaatgggataagcaacatgatatgggtcacatgatgcggtgtacttgcgtcggcaacggacgcggtgagtggacttgtatcgcctatagccaattgagggaccaatgtatcgtagatgatattacgtacaatgttaatgataccttccataagcgtcacgaggagggccatatgcttaattgtacctgctttggccaggggcgaggaaggtggaagtgcgatcccgtagaccagtgccaggatagcgagaccggcactttctaccagataggcgacagttgggagaagtacgtgcatggcgttaggtaccagtgttactgctatgggcgaggcattggagaatggcattgtcagcctctgcaaacgtatccgtccagtagtgggcctgtagaggtgttcatcaccgagacaccctcccaaccgaactcccaccctatccagtggaacgctccacagccatcacatatttcaaagtacatattgaggtggcgtccaaaaaactcggtaggaaggtggaaggaggccactatccctggccacctaaacagctacacaattaagggcctgaaaccaggcgtggtatatgaggggcagcttataagcattcagcagtacgggcaccaggaagtgactcgcttcgacttcacaaccaccagtacttctactccggtgacctccaacacggtaactggggaaactactccattctctcccctggtagcaacaagcgagtccgttactgaaattacagcttccagctttgtggttagttgggtgtctgccagcgacacagtgtctggttttcgcgtcgaatacgagctgtcagaagagggagacgagccccagtaccttgatctcccatctactgctacctccgttaatatcccagatctgctgccagggcgtaaatatattgttaacgtctatcagatttctgaggacggcgaacaaagcctcatcctttccacctcccagacaactgcgcctgacgctccgccagataccacagtggatcaggtagacgatacctctatcgtggtcagatggagtagaccccaagctccaatcacgggctatcgcatcgtttattcgccgtcagtagagggtagcagcacagaattgaatctgcccgagactgccaattcggttaccctatccgacttgcaacccggagtacagtacaatatcacgatttacgcagttgaggaaaaccaagaaagcactcctgtcgtgatccagcaggaaacaacaggaaccccacgttctgataccgtgccatccccccgtgatctccagttcgtagaggttacagatgtcaaagtaacaatcatgtggacaccccctgagagcgcggtcaccggctatcgggttgatgtcattcctgttaacctccctggagagcacgggcagaggttgcctatctcccgtaacaccttcgccgaagttaccggtctgtctcctggtgtgacttactactttaaagtatttgccgtctctcacggacgcgagagcaaaccactgaccgctcagcagactacaaaactggatgctccaactaacctgcagtttgtgaacgagactgattctaccgtactggttagatggacaccaccgagggcccagattaccggataccgtctaacagttggactcacccgccgaggacaacctaggcaatataatgtgggaccaagtgtttcaaagtatccactgaggaatctgcagcctgctagtgagtacaccgtatccctcgtggcaataaaaggcaaccaagagtcccccaaggccactggcgtgtttaccacacttcagccaggttcttcaatcccgccttataataccgaggtgaccgaaaccaccatcgtgatcacatggacccccgctcctcggataggcttcaagttgggagtgagacccagtcagggtggcgaagcccctcgcgaggtaacaagcgattcagggtctatcgtggtgtcaggcctgacacccggtgtggagtatgtgtacactattcaggtcctccgggacggtcaggaacgcgacgctccaattgtaaacaaagtcgttactcccctatctccccctacaaatctgcacctagaagcaaatcccgatactggagtattgacagtatcttgggagcgcagtactacacctgatatcacaggttacaggatcactaccacaccaacgaatgggcagcaggggaacagcctggaggaggtggtgcacgctgaccagagtagctgtacattcgacaacctctctcctggcctcgagtataatgtatccgtgtacacagtgaaggacgataaggagtccgtgcccattagcgacaccatcataccagccgtgcccccacccactgacctgcggtttacaaatatcgggcctgataccatgcgagttacatgggcaccacctccatcaatcgatttgactaacttcttggtacggtatagtcctgtgaagaacgaggaggacgtggcagagctctccatctcgccatcagataacgccgtggtacttacaaatctccttcctggcaccgagtatgtggtcagcgtttcaagcgtgtacgagcagcacgaatcaacacctctcaggggaagacagaagacaggcctggattcaccgacagggattgacttttctgacatcacggctaacagcttcaccgtgcactggattgcgccaagagccacgatcaccggctacaggatacgccaccatcccgagcacttcagcgggaggcctagggaagaccgcgtgccgcactctcgtaactccattacccttacaaatcttacaccaggcaccgaatacgtggtttccattgtggctcttaatggtcgcgaagaaagtcctctcctaattggtcagcagtcaaccgtgagcgatgtgccacgagacctggaggtggtcgcagccacccctacttcactgttgatatcgtgggacgctccagcagtcaccgttcggtattacaggattacatatggagagaccggcggaaatagcccagtacaggagtttactgtaccagggtccaaaagcacagccacgatctccggcctgaagcctggagtcgattacaccatcaccgtgtacgctgtcaccggccgaggcgactcccctgcctcaagtaaacctataagtattaactacagaactgagatcgataaaccaagccagatgcaagtgacagacgtgcaagacaacagcatttccgtcaagtggctcccatcatcctcaccggttacagggtatcgcgtcacgaccactccaaagaatggccctggacccaccaagaccaagacagcaggcccagatcagaccgaaatgaccatcgaggggttgcagccaactgttgaatatgtggtcagtgtttacgctcagaatccttccggggaatcccagcccctggtccaaactgccgttacgaatattgatcggcctaaaggcctcgctttcaccgacgttgacgtggattcaataaaaatcgcatgggagagcccacaaggtcaggtgtcacgctatcgcgtcacttattcttcccccgaggacggcatccatgagctgtttccagccccagacggtgaggaggatacggccgaacttcaaggcctacggccaggcagtgaatatacagtctcagtagtggcgctgcatgatgatatggaaagccagccattgatcgggacccagagtaccgccattccagctccgactgacctcaagttcacccaggtgaccccaacctcattgagtgcccaatggaccccaccaaacgtccaattaactggttatcgcgtgcgtgttaccccgaaggagaaaacaggcccaatgaaagagattaacctggcccctgactcctcctctgtcgtggtaagcggcctgatggtggccaccaagtacgaagtgtccgtttacgccctgaaagacacgttaaccagcaggcctgcacaaggagtggtcaccactctcgaaaatgtgagccctccacgcagagctcgggttaccgatgctaccgagaccacgattacaatttcttggcgcaccaagactgagacaattaccggattccaggtggatgctgttccagccaacgggcagacacctatccaaaggacaataaagcccgacgtgcgttcttatacaatcaccgggctgcagcccggaactgattacaagatctatctgtatacactcaatgataatgccaggagttcgcccgttgtcatcgacgctagtaccgccatcgacgccccatctaatcttcgttttctcgccacaactcccaattctttattagtctcctggcagcccccaagagcaagaattaccgggtatataataaagtacgagaaaccagggtccccccctcgagaagtcgtgccgagaccgaggcctggcgtcaccgaagcgacgatcactggtctggagcccggtacggaatacaccatctatgttatcgcgctgaaaaacaatcagaaatccgagcccctgatcggcagaaaaaaaactgacgagcttccacaactggtcacactgccgcaccccaacctgcacgggccagagattttggatgtgccgagcaccgtgcagaaaactcctttcgtgacacatccaggctacgatacaggtaacggtattcaactgccgggaacttctggtcagcagcccagcgtaggtcagcagatgatcttcgaggaacatgggtttcgtaggacaactccccctaccactgctacacctattcgccaccgtcctcggccatatcccccaaatgtgggtcaggaagccctttctcaaaccacaataagttgggccccttttcaggacacttcggaatacatcattagctgtcatcctgtcggaaccgatgaggagcccctgcagtttcgggtccctggtacgtctacctcagccactctgacaggtctaacaagaggggcaacctacaatgttatagtcgaggctctcaaagaccagcagcgacacaaggtgcgtgaggaagtcgtgacagttggcaactccgtcaatgagggcctcaatcagccaaccgatgatagctgttttgacccttacaccgtaagccactatgcggtaggggatgaatgggaacggatgagcgagtccgggttcaaactactttgccaatgcttgggcttcggctcaggccatttccggtgcgactcaagtcgatggtgccacgataacggcgtgaactacaaaatcggtgagaagtgggacaggcagggcgaaaacggccagatgatgtcgtgtacatgcctgggcaacggtaagggcgaattcaaatgcgaccctcacgaagctacttgctacgacgatggcaaaacatatcatgtgggagagcagtggcagaaggaatatctcggagcaatctgttcatgcacttgctttggaggccagcgcggatggcgttgcgacaactgtcggcgacccggtggcgagcccagccctgagggaaccacagggcagagctataaccagtatagccagaggtaccatcagagaacaaacacgaatgtgaattgcccaatcgagtgcttcatgcccctagacgtgcaagctgatcgcgaagactctcgcgagtaa

SEQ ID NO: 28693 - DNA, 6555 bp, synthetic construct
  misc_feature 1..6555: note = Description of Artificial Sequence: Synthetic coding sequence
  source 1..6555: mol_type = other DNA
atgctgcgtggcccaggaccgggtctcctgctgctagccgtgcaatgtctggggacagcagtgcctagtacaggagccagtaaaagtaaacggcaggcgcagcaaatggttcaaccccagtccccagtggccgtgtctcagagtaaacccggatgttacgacaacggaaaacactatcagattaatcagcaatgggagaggacatacctgggaaacgccctggtgtgcacgtgttacgggggtagtcgtggcttcaactgtgagagcaaaccggaagccgaggaaacctgttttgacaagtacaccggcaacacgtaccgggttggcgacacctatgagagacccaaagactccatgatatgggactgcacttgcattggggcaggacgcggtcgaatttcttgcacaatcgccaatcgatgccacgagggaggacagtcttataaaataggtgatacatggagaaggccccatgagaccggagggtacatgcttgagtgcgtatgtctgggcaatggtaagggagaatggacatgcaaacctatcgccgaaaaatgcttcgaccacgctgcaggcacctcatatgtagtcggcgaaacgtgggagaagccctaccagggctggatgatggtggactgtacatgtcttggggagggatctggtagaattacatgcactagccgcaacagatgcaatgatcaagacactcgcacttcctatcgcattggggacacttggtctaagaaagacaacagaggaaacctgctgcaatgtatttgcacaggaaatggcaggggcgagtggaagtgtgaacgccatacatccgtgcagacgaccagctcgggcagtggtcccttcaccgacgtgagggccgctgtgtaccagccccagcctcatccacagccaccaccttatggccactgtgtaacagactccggggtggtttattccgtggggatgcagtggcttaaaactcaagggaacaagcagatgctttgtacttgtttaggaaatggggtatcttgtcaagaaaccgcagtcacgcaaacatatggagggaatagtaatggagaaccatgcgtcctcccctttacttataacgggagaacattttacagttgtacaacggaaggccgacaggatggccatttgtggtgtagtaccacctccaactatgagcaggatcagaagtattctttctgtacagaccacacggtcttagttcaaacccgaggcggaaacagcaacggagcactctgccattttccttttctgtacaataatcacaattacaccgactgcacatctgaagggagaagagacaatatgaagtggtgtggtacgacgcagaattacgatgcagaccagaagtttggattctgtcctatggccgctcacgaggaaatttgcactaccaacgagggagtcatgtaccgtatcggtgatcagtgggataagcagcacgatatgggacatatgatgagatgtacgtgcgtggggaatggccgaggcgaatggacctgtattgcgtacagccagttgagagaccagtgtattgttgacgacataacatataacgtgaacgacacattccacaaaaggcacgaggagggacacatgcttaattgtacttgttttggccagggcaggggcagatggaaatgtgacccagttgatcagtgtcaggactctgagacagggactttttatcaaatcggagactcttgggagaaatatgtgcatggagtgagataccaatgctactgctacggacgcggaatcggggaatggcactgtcagcccctgcagacttatccaagttcttctggccctgtagaggtttttattactgaaacaccatctcagcccaattcccacccaattcagtggaatgcgcctcagccttcccatatatcaaagtacattttaaggtggcgtcctaaaaactcagtcggacgctggaaagaagccaccattcctggccacctgaattcctatacaattaaggggctgaagccaggtgttgtttacgaaggccaactaatatcgatccagcagtacggacaccaagaagtgacgagattcgatttcaccactacatctacgagcactccagtgacctcaaataccgtcacaggcgagacgacacccttctctcctctggtcgccactagtgagtccgtgacagagattaccgcgagttctttcgtcgtgagttgggtgtccgccagcgacactgttagtggcttcagggtggagtacgagctgtccgaggagggagacgagccccagtatcttgacctgccctcaacagccacttcagttaatatccccgacctgctgccaggtcgaaagtacatagtcaacgtgtaccagatttctgaggacggtgagcaatcactgattctcagcacgagccagacaacagcccctgacgcaccacctgacacgacagttgaccaggttgacgacacgagtatcgtggtgcgatggtccaggccccaggccccaatcaccgggtaccgcatagtttactctccttctgtggaagggtcttccacagaacttaacctgcctgagacagcaaatagcgttaccctgagcgacttacagcctggtgttcagtataatattacaatctatgcagtcgaggaaaaccaagaaagtacgcctgtggtaatccagcaggagacaaccggcacgccgaggtccgacactgtccctagtccaagggatctgcagtttgtagaggtgacggatgtgaaggtgactataatgtggacacctcctgagtcagccgtaaccggctatcgggtggacgtaattccagttaacctgcccggagaacacggtcagcggttgcctatttcccgaaatacctttgcagaggttactggactgtctcccggagttacctactacttcaaagtctttgccgtctctcatgggagggaatcgaagcccctgacagcccagcaaaccactaagctcgacgcgcctaccaatctgcagtttgtgaacgaaacggattccacagtgttggtgcggtggactcctccacgcgcacagattacaggttacaggctgactgttggacttacccgtcggggacaaccgcgacagtacaacgtgggcccttcagtcagtaaataccccctgaggaacctccagcccgctagcgaatacaccgtttctcttgtggccatcaaaggcaaccaggagagtccaaaggctacgggcgtattcaccacattgcagcccggatcctcaattcccccatacaatacggaggtaaccgagaccactattgtgatcacctggacaccagcaccacgcattggttttaaactgggggtgcgtccatctcaaggaggggaagctcccagggaggtgacctctgatagcggatcaatcgtcgtcagcggcttgacgcccggagtggaatacgtttacactatacaagtgttgcgggatgggcaagagagagatgccccaattgtcaataaggtggtcactcccctgagcccgcctaccaacctccacctcgaggcgaacccagatacaggcgtgctgaccgtgtcatgggaaaggagcacaactccagacattactgggtatagaatcacaactactccgactaacgggcaacaggggaatagtttagaggaggtagtccatgcagatcagtcaagttgcaccttcgacaatttgtccccaggactggagtacaacgtttccgtttacaccgtgaaggacgacaaagagagcgttcctataagcgataccatcataccggcagtgccgccacctaccgacttgcggttcaccaatattggccctgacactatgcgagtgacatgggctccaccccctagcatcgacctaaccaatttcctggtgcggtatagccccgtgaaaaatgaagaagacgtggctgaactgtccatttcaccaagtgacaacgccgtcgttttgaccaacctgctgcctggcacagagtatgtagtgagtgtgtcaagtgtgtacgagcagcacgaatcaacacctctgaggggcaggcagaaaactggactggactcgcccacaggcattgatttctctgacattaccgcaaatagtttcacagtgcactggattgcacctagagctaccatcactggctaccgtatacggcaccatcccgagcactttagcggaagaccaagggaagatagagttccccatagccgaaactctattacgctcacaaatctgactcctggcactgaatacgtggtgtccatcgtggctcttaatggacgggaagaaagtccactacttatcggtcaacagagcacagtgagcgacgtcccccgagatctggaagtcgtagctgcgactcctaccagtttactcatctcttgggacgccccagcagtcacagtcagatactaccgcatcacttatggcgaaactggaggaaactcacctgtgcaggagtttacagtcccaggcagtaagtccaccgctaccatttccgggttgaaaccaggggtggattacactatcaccgtgtacgctgtgacggggagaggcgattctccggcttcctcaaagcccatctctatcaattatcggacagagattgataagccttctcagatgcaggtcacagacgtacaggataactccattagcgttaaatggttgccctcgagctccccggttaccggctaccgggtaaccacaacccctaaaaacgggcctgggcctaccaagacgaaaacagcaggtccagatcagaccgagatgaccatagagggcctgcagcccacggtggagtacgttgttagtgtttatgcccagaatcctagcggcgagagtcagccattagtgcaaacagctgtgacgaacatcgacagacccaagggactggcttttaccgacgtcgatgttgattcaatcaagatcgcatgggaatcacctcaggggcaggtctccagataccgcgtaacctactcatctcctgaggatgggattcatgaactctttcctgcccctgacggcgaagaggacaccgctgagctgcagggcttgagaccaggttccgaatataccgtttcagtcgtggcactgcacgatgatatggagagccagccactgattggcacgcaatcaactgcaataccagcccctactgatctgaagttcactcaggttacaccaacctctctgtctgcccagtggacacccccaaatgtgcagttgacggggtacagagtgcgagtcactcctaaggaaaagaccgggcctatgaaggaaatcaacctggctcctgacagttcaagcgtggtggttagcggcttgatggtggcaacaaagtatgaagtgtccgtctatgcactgaaggatactttgacaagtcggcctgctcagggagtggtgactacactggagaatgttagccccccaagacgcgcacgtgtcacggatgccaccgagaccaccatcaccatttcatggcggacaaagactgagaccatcacaggatttcaagttgatgccgtcccagctaacggtcaaacgcctattcagcggaccattaaacccgacgtgagaagctatactatcactggcctgcagcctggcacagattacaagatctacctctacactctgaacgacaatgcacggagcagccccgtggtgatcgacgcctccaccgcaatcgatgcccctagcaaccttagatttctcgctacaacaccaaactcccttctggtcagctggcaaccacctcgggcaagaatcactggctatatcattaaatacgagaagccaggcagcccaccaagggaagtggtgcctcggcctcgcccaggcgtcaccgaagccaccatcacgggcctggagccgggtactgagtatacaatctatgtcattgcacttaagaacaaccagaagtctgaaccactgatcggcagaaagaagaccgtcaacgagggactgaaccagcccactgatgattcctgtttcgatccttataccgtatctcactatgctgttggggatgaatgggagcggatgtcggaatcaggattcaaacttctgtgccagtgcctgggattcggaagcgggcacttccgctgtgacagtagcagatggtgccacgacaacggcgtcaattacaaaattggggagaaatgggacaggcagggtgagaacggccaaatgatgtcgtgcacatgtctcggaaacggaaagggtgaattcaagtgcgatccccatgaggctacctgttatgatgatggcaaaacctaccatgtaggggagcagtggcagaaggaatacctaggggcaatttgcagttgtacatgctttggcggtcagaggggatggcggtgtgataactgcagacgtcctggtggtgagccttctcctgaagggacaaccggtcaatcgtataatcagtatagtcagaggtaccaccagaggaccaatacaaacgtgaattgcccaatcgagtgttttatgccgctcgatgtgcaggccgacagggaagattccagggagtat

SEQ ID NO: 28694 - DNA, 6636 bp, synthetic construct
  misc_feature 1..6636: note = Description of Artificial Sequence: Synthetic coding sequence
  source 1..6636: mol_type = other DNA
atgttgagagggcctggtccaggacttttactcctcgctgtgcaatgccttggcaccgccgttccctctactggagcctcaaagagtaaaagacaggcacagcaaatggtgcaaccacaaagcccagtggctgtcagccaaagtaaacctggatgttatgacaacggcaagcactaccagattaaccaacaatgggaaagaacatatctcggcaatgcgctcgtctgcacttgttacgggggatcccgcggatttaattgtgagtcaaaacccgaggccgaggagacttgcttcgacaagtataccgggaatacctatcgagtcggggatacctacgagaggcctaaagacagtatgatttgggattgtacttgtattggggctggcagaggccgaataagttgtactattgctaaccgctgccatgaagggggacagagctataagatcggagatacgtggagaagaccccacgagactgggggatatatgctcgaatgcgtgtgcctaggcaacggcaagggtgaatggacttgtaagcctattgctgaaaaatgctttgaccacgccgcaggcacctcgtatgtcgttggcgaaacttgggaaaagccgtaccagggctggatgatggttgactgcacatgtcttggagaaggcagcgggaggatcacatgtacatcccgaaaccgctgcaacgatcaggacacaagaacttcctaccgcattggagatacctggagcaagaaggacaaccgcggaaatctgctgcagtgtatctgtacaggcaacgggagaggagagtggaagtgcgaaagacacacaagcgttcaaacaacctcatcagggagcgggccttttactgacgtgcgcgctgccgtgtatcagccccagcctcacccgcagccaccgccttacggccattgcgtcactgattctggtgtggtttattccgtcggcatgcagtggttgaaaacccagggtaataagcagatgctgtgcacctgcctgggtaacggggtcagctgccaggaaactgctgtgacacaaacctatgggggaaatagcaatggagaaccttgtgtgctgcctttcacctataacgggaggaccttttattcctgcaccaccgagggccgtcaggatggacatctctggtgttccacaacttctaactacgagcaggatcagaaatactctttctgcaccgaccatacagtcctcgtccagacccggggtggaaatagtaacggcgcattgtgccacttcccatttctgtataacaatcacaattacacggactgtacttctgaaggacgcagggacaatatgaagtggtgtggaaccacgcagaactacgatgctgaccagaaattcggcttctgccctatggcagctcacgaggagatttgcaccaccaatgagggcgtgatgtatcgcattggggaccagtgggataagcagcatgacatgggccacatgatgcggtgcacatgcgtgggaaacggcaggggagaatggacctgtattgcttattcacaactcagggatcagtgcatcgtggacgacatcacttacaatgtcaacgatactttccataagcggcatgaagagggccacatgttaaactgtacctgctttggacagggtcgcggacggtggaaatgtgatcctgtcgatcagtgccaggatagcgaaaccggcacgttctatcaaatcggcgattcctgggaaaaatacgtacatggcgtgagatatcagtgctattgttatggacgcggtatcggtgaatggcactgccagccgctgcagacctacccatctagttccggtcccgttgaggtgttcattacagagactccttcccagccaaatagtcatccaatccagtggaacgctccacagccatcccatatttctaaatacatcttgagatggcgccctaagaatagtgtcggacgatggaaagaagctacaatccccggtcacctgaattcatacaccattaagggactgaagcctggcgtagtgtacgaggggcaactgatctcaatacagcagtatggccatcaagaggtgacaagattcgattttactactacaagtacgagcactcctgtgacatctaacaccgtgacaggagaaaccacgcccttctctccactggtcgcgacatcagaaagcgttactgagattacggccagcagctttgttgtgtcctgggtctccgccagcgacaccgtgagcggattcagagtggagtacgagttatcagaggagggtgatgaaccacagtatctggatttgcctagcacagccacatcggtgaacatccccgatctactccccggaagaaagtacatcgttaacgtgtatcagatctctgaagacggggagcagagcttaatcctgtcgaccagccagactaccgctcccgacgctccacccgacaccactgtggaccaggtagatgacacatccatcgtagttcgttggtccaggcctcaggctccaattacagggtaccgaatcgtctattccccttccgtcgagggatcaagcactgaactgaatttaccagagaccgctaattcggtcaccctaagcgacctgcagccaggagtgcagtacaatataactatttacgccgtagaagagaaccaggagagcacaccagtcgtcatccagcaggagacaacaggcactccgcgaagcgataccgtcccgagccccagggacttgcaattcgtagaagtcaccgatgtgaaagtgacgatcatgtggacacctcctgagagtgcagttaccggttatcgcgtggatgtgatacctgtgaatctaccgggagaacatggtcagagattgcctatcagcaggaatacctttgctgaagtcaccggtttatcccctggcgttacctattactttaaagtcttcgcggtgagccatgggagggagagcaagcctctgactgcgcagcaaactacaaagttggatgctccaactaacctgcagttcgtaaacgaaaccgacagcaccgtacttgtgaggtggaccccaccaagggcacagatcacaggctatcggctgactgtgggactgaccaggcgtggccagccgaggcagtacaacgtaggacctagcgtgagcaaatatccactccggaacctccagccagcttcagagtacacagtttcactggttgcaatcaaggggaatcaggagagccctaaggcgaccggagttttcaccactctccagcctggatccagcatacccccttacaataccgaggtgactgaaaccaccatcgtgattacttggacaccagcaccccgaattggattcaagttgggcgtgagaccgagccaaggtggcgaagccccacgagaagtgacatccgattcaggaagtattgtagtgtcgggcctgacaccgggtgttgagtacgtgtacaccatccaggtgttaagggacgggcaggaacgggatgcacccatcgtcaacaaggtggtgactcctctgtcaccccctaccaacctgcacttagaggctaatcctgatacgggagtgcttacggtcagttgggagcggagcacaacacccgacattacaggctacaggattacaacaactcctacaaatggccaacagggaaattctctggaagaggtggtgcacgcagatcagtcttcctgtacctttgataacctctcgcctggtctcgaatacaatgtcagtgtgtatacagtcaaggatgacaaggagtctgtgcctatatccgatacaatcatccccgctgtgccacctcccaccgaccttcgcttcaccaatattggaccagatactatgagggtgacttgggccccaccacccagtattgacttgaccaattttctggtcaggtattcacccgtaaagaacgaagaagacgtggccgagctgtcaatatctccctccgacaatgccgtggtgcttaccaacctgctgcctggtaccgaatacgtagtctctgtgagctctgtgtatgaacagcatgagtcaacaccattgcggggacgtcaaaagaccgggttggacagccccaccggaatcgatttttcagatataaccgctaatagcttcaccgtccattggatcgccccacgcgctaccatcacaggctataggatccgccatcacccagaacacttttcaggacggccacgagaggatagagtgccacactccagaaactcaatcacactcaccaacctgactccaggcactgaatatgtggtgagcatcgttgccctaaacggtagagaagagagtccattgctcattggtcaacagagcaccgtgtccgatgtgccaagggacctcgaggtcgtcgctgcgacgcctacctcattactgatttcctgggacgccccagccgtcacggtccgttactaccggataacttatggagagaccggaggcaattctcctgtgcaggagtttactgtgcccggatctaagtcaactgccacaatcagtggcctcaaaccaggggtcgactacacgattacagtgtacgcagtgactggtagaggcgatagtcccgcaagtagcaagcccatttctataaattatcggaccgagattgacaagccttcccagatgcaggtgacagacgttcaggataatagcatctccgttaagtggttgccatcatctagccccgtgacaggatatagagtgactacaacgccgaaaaacgggcctggccctacgaaaaccaagacagcaggaccagatcaaacagagatgacgatcgaaggcctccagcccacagttgagtatgtggtcagtgtctacgcacagaatccctctggggagtcgcagccccttgttcagaccgcagtgacaaacatcgatcgtcctaaagggctggctttcactgacgtagatgttgattctataaaaatcgcctgggagagccctcagggacaagtaagccgttacagagtgacatacagctctcccgaggatggaatacacgaactattcccagcaccagacggagaggaagatacagccgaacttcaagggcttaggccagggtcagaatataccgtctctgtggtggcactgcatgatgatatggagagtcagcctctgatcgggacccaatctaccgcgatcccagctcccaccgacctgaagttcacacaggtgacccccacgagcttaagcgcacagtggaccccccctaacgttcagctgacaggttacagggtacgtgtgacccccaaggagaaaacgggccctatgaaagaaattaacctggcccctgacagctcgtctgttgtcgtgtcggggttgatggtggccaccaagtatgaagtgagtgtttacgcgttgaaagatacactgacctcacgacccgctcagggcgtggtgacaacacttgaaaacgtgtccccacctcgcagggccagagtgacggatgccacagaaactacaattacaatcagctggcggacaaaaacggagacaattaccggatttcaggtcgacgccgtcccggctaacgggcagacaccaatacagcggactattaagcccgacgtccgctcatacaccatcacaggcctgcagccaggaacggattacaagatctatctctacactctaaatgacaacgccagatcaagtcctgtggtcattgacgcttccactgcaatcgatgccccaagcaatctgcgtttcctggcgaccacaccaaactccttactggtctcttggcaaccacctagggcgagaattaccggctatatcattaagtacgaaaagcccggtagtcccccacgggaggtggtaccacgccctaggcccggagttactgaggccacaattaccggattggagccgggtacagaatataccatctacgtgatagccctgaagaacaaccaaaagtcagaaccactgattggtagaaagaaaactggtcaggaggccttgagccagactactatatcctgggctcccttccaggacacatcggagtacattattagctgccatcctgttggaactgacgaggaaccacttcagtttcgagtgccagggacgagtacctccgcgactttaacgggcctgacaagaggcgcaacctataatgtcattgtcgaggccttaaaggaccagcagcgtcataaagttcgcgaggaggttgtgactgtgggtaatagcggctggtgccatgacaatggagtgaactacaagatcggtgagaaatgggaccgccagggcgagaacggacagatgatgtcttgcacatgcctggggaatgggaagggggaatttaagtgtgatcctcatgaggctacgtgctacgatgatgggaagacttatcacgttggagagcagtggcaaaaggaatacctgggcgctatctgttcttgcacatgctttggtggacagagaggctggcgttgtgacaattgtcgacgtcctggaggcgagccatcccctgaaggaaccacggggcagagttataatcagtatagccaaaggtaccatcagaggaccaataccaatgtgaactgccccatcgagtgttttatgcctctggatgtgcaggcagaccgggaggattctcgagagtac

SEQ ID NO: 28695 - DNA, 7434 bp, synthetic construct
  misc_feature 1..7434: note = Description of Artificial Sequence: Synthetic coding sequence
  source 1..7434: mol_type = other DNA
atgttgaggggtcccggtcctggacttttgctcctggcagtccagtgcctgggaaccgcagtgccatcaacaggagctagcaagagcaaacgccaggcccagcagatggtacagcctcaatctccagtggcggtgtcacagtccaagccgggatgttacgacaatggaaagcattaccagattaaccaacagtgggagcgtacctacctagggaacgctctcgtgtgtacttgttatggcggaagtcggggatttaactgcgagtcgaagcctgaagctgaggagacctgtttcgataagtacactggcaacacataccgcgtcggagatacttacgaaagacccaaggacagtatgatctgggattgtacatgtatcggagccggaaggggaaggattagctgtactatagccaataggtgtcacgaggggggacagtcttacaaaatcggggacacctggaggcgtcctcatgaaacgggcggatacatgttggaatgtgtgtgcttgggcaatggcaagggtgaatggacttgtaaacccatagcagaaaagtgcttcgaccatgccgcagggactagttacgtagtgggagagacatgggagaaaccataccagggttggatgatggtcgactgcacttgcctaggcgagggctctgggcgaatcacctgtacctccaggaatcgctgtaatgaccaggatacaagaacttcctataggataggagacacatggagcaagaaagataatcggggaaatcttctgcaatgtatttgcaccggtaatgggagaggcgaatggaaatgtgaacgccacaccagtgttcagaccacaagcagcggctctggaccctttacggatgtccgcgctgccgtgtatcagccgcagccccatcctcagccgcctccttatggacactgcgtgaccgactccggcgtggtctactccgtgggtatgcaatggctaaagacccaaggaaacaaacaaatgctttgcacttgcctcgggaacggtgtctcttgtcaggagaccgccgtcacacagacatacgggggaaatagcaacggagaaccatgcgtactgccgtttacctacaatgggcgtacattctactcctgtaccactgagggacgccaggacgggcacctgtggtgctccacaacgtccaattatgaacaggaccagaagtactcgttctgcactgatcacaccgtgctggtgcaaacaagaggcggaaactctaatggagcactgtgtcattttccatttctgtataacaatcataattacacagattgcactagcgaaggcaggagggacaacatgaagtggtgtggcaccacccagaattatgacgcagatcagaaatttggtttctgcccgatggcggcacacgaagagatttgcaccaccaatgagggagtcatgtacaggatcggcgaccagtgggataaacagcatgatatgggccatatgatgcgatgcacttgcgtgggcaacggacggggagagtggacttgcatcgcttatagccaactgcgcgatcaatgcatcgtcgacgatatcacctacaacgtgaatgacaccttccataaaaggcacgaggagggacatatgcttaactgtacttgtttcggacagggacgcggacggtggaagtgcgacccggtggaccagtgtcaagacagtgagacgggaacgttttaccagattggggactcctgggagaaatatgtgcacggcgttcgctatcagtgctactgctacggaaggggcatcggggaatggcattgtcagccactgcagacatacccctcttccagtgggccagttgaagtgtttataaccgagaccccaagtcagcccaatagccacccaatacagtggaacgctcctcagccctcccatatctccaaatatatccttcggtggagacccaagaattctgtggggcgttggaaagaggcaactatccccggacatctgaactcttacactattaagggactgaaaccaggagttgtctatgaaggccaactcatatcaattcaacagtacggtcaccaagaagtaactcgcttcgatttcacgacaacctccacctctacaccagttacctccaatactgtaaccggagaaaccaccccatttagccccctggtggccacttccgagagcgtgacggagatcacagcttcatccttcgtggtgagctgggtgtcggcaagcgatacagtgtctggattccgggtcgaatatgagcttagtgaagagggcgatgaaccacagtacctagatttgccctctacagcaaccagtgtgaatattcctgatctgctcccaggacggaagtatattgtcaacgtgtatcaaatatccgaagatggcgagcaatccttaatacttagtacatcccagaccaccgctccagatgcccctcctgacaccactgtggatcaggtagacgacaccagcattgtcgttcgctggtccaggccccaggctccaattaccggctataggattgtgtattcaccatctgtcgagggctcttcaacagagttgaacctgcctgagactgcgaactccgtgactctttccgatctgcagcctggtgtgcagtataacatcacgatctatgccgttgaggagaatcaggaaagtacaccagtggtcatccaacaggagacgaccggcactcccaggtctgatacggtgccgtcaccgagagacctgcaatttgtagaagttaccgatgtgaaggtgactattatgtggacaccaccagaatctgccgtgacaggatacagagtggatgtgatcccggtaaacttgcccggtgaacatggccagcggctcccaatatctcgcaacactttcgccgaagttaccggcctgagtccaggtgttacctattacttcaaggtctttgccgttagccacggaagagagtccaaacctcttacagctcaacaaaccacgaagctggatgcaccgacaaacctgcagttcgtaaatgagaccgactcaacggtgctggtgcgctggaccccaccccgagctcagatcacgggataccgcctcaccgttggactcacgaggagggggcaaccacggcagtataacgttggaccctcggtctctaaatacccactgcgcaatttgcagccagcctctgagtatacggtatctcttgtagccattaaagggaatcaggaaagccctaaagccactggggtgtttactacgcttcagcccggatcgagcatcccgccatataataccgaagttactgagaccaccatcgtgattacttggactcctgcccctaggatcgggttcaagctgggggtgcgcccttcacaaggtggcgaggccccacgcgaagtgacttcagactccggaagcattgtggtcagtgggttgactccgggagtggagtacgtgtacactatccaagtgttgagggatggccaggagcgcgacgctcccatagtcaacaaggtggtgactccccttagccccccaactaacttgcatctggaggcaaatcctgacaccggggtccttactgtgtcatgggaaaggagtacgacgcccgacataaccggatatcgaattaccactacccccacaaacggccagcagggaaattccctggaggaggttgtgcacgcggaccagagctcatgcacattcgacaatcttagcccaggactggagtataacgtttcggtgtatacagtcaaagatgataaggagtccgtgccaatctccgacacaatcatccccgaagtccctcagttaaccgatttaagttttgtggacattactgacagcagtataggtttaagatggactcccctgaacagctctaccatcatcggttatcggatcacagtagtggccgctggggagggcattcccattttcgaggacttcgtggactcttctgtcggctactacaccgtaaccggtttagagccgggaatagactatgatatctccgtgattacattgatcaatgggggtgagtctgcccctaccacgctgacccaacagacagcagttcccccaccaacggacctgcgtttcactaatattggacctgacactatgagggtcacgtgggcgccaccaccgtccatcgacctgactaacttcctcgtaagatactcccctgtgaagaacgaagaagacgtcgcagaactctcaattagtccatcagacaacgctgtggtcttgactaacctcctacccggaactgaatacgtggtaagcgtcagcagcgtgtatgagcagcacgagtctacaccactgcgcggaaggcagaagactggcctggacagtcctaccgggattgacttcagcgatatcacggctaatagtttcaccgtccattggattgcccctagagccaccatcaccggatataggattagacatcatccggaacatttctctggccgacccagagaggacagggtgccgcatagtcggaactcaattaccttgaccaatctgacacctggcaccgaatacgttgtaagtatcgttgccctgaacgggagagaggaaagccctctgcttattggccagcagtctaccgtttccgacgttcctcgcgacctagaggtggttgctgcgaccccaaccagtttacttatcagttgggacgcgcctgccgtgactgttaggtattatcggatcacgtacggggaaaccggcggaaatagccccgtacaggaatttacagtgcctggcagcaagagcacagccacaatctctgggttgaagccaggcgtggattatacgatcaccgtatatgccgtcacagggaggggagactcccccgcttccagcaaaccaatcagcatcaattaccggacggagatagacaagccaagtcagatgcaggttacggacgttcaggacaactcaatctctgttaagtggctccctagtagcagtcctgtgacaggctaccgggtgacaaccacccctaagaacggtcccggtccaacaaagacaaaaaccgcgggtcccgaccagacagaaatgaccattgagggattgcagccaaccgtggaatacgtagtttcagtctatgcccagaatccatcgggggagtctcagccattggtgcaaacagcagtaactaatattgatcgaccaaagggactggcctttaccgatgtagatgtggactcgattaagatcgcctgggagtcgccacagggacaggtctctagataccgcgttacctactctagtcccgaagacggcatccacgaattgtttcccgcacccgatggcgaggaggataccgcagaattacagggcttgaggcccggatctgagtataccgtttctgtcgtagcccttcacgacgacatggaatcgcaacctctgattggcactcagagcacagctatccccgcaccaacagacctcaagtttacccaagtgacccccacttcactgtctgcccaatggactccacccaatgtacaattgactggttacagggtgcgagtgacccccaaggagaagactggacctatgaaggaaattaatctggcacctgattcaagcagcgtcgtggtatccggcctcatggttgccaccaagtatgaagtgagcgtgtatgccttgaaggacactctcacttcccgccctgctcaaggagtggtgaccactctggaaaacgtgagcccccctcgaagagcgcgtgtaactgatgcaaccgagacgaccattactatctcttggaggacaaagaccgagacgataacaggtttccaggtggatgcagttcccgcaaatgggcaaacacctatccagagaactatcaaaccagatgttaggtcttacaccatcactggtctgcagccgggaactgactacaaaatatacctttataccctgaatgacaacgctaggtcctcccctgtggtgatcgacgcttcaacagctattgacgctcctagtaacttgcgattcctggcgacgactcctaattctctgctagtgtcgtggcagcctccgagggcacgcattactggttacatcattaagtatgaaaagccagggagtcctccccgtgaggtggtaccaaggccccgtccgggtgtcacggaagcaaccattactggccttgagcctggtactgagtatacaatttatgtcatcgctttgaagaacaatcagaaatcagagccacttatagggcgaaagaagaccgatgagctgcctcaactggtgactttgccacatccaaacctgcatgggccagaaattctcgatgtgccctctacagtccaaaagacaccgtttgtgactcaccccggatatgacaccggcaacgggattcagctccccggaacgagcgggcagcagccaagtgtgggacagcagatgatcttcgaggaacacggtttcagacggactaccccgccaacaaccgccacaccaattcgccacagaccgaggccataccctccaaatgttggcgaggagatccagatcggacacattcccagagaggatgtggattaccatttgtacccgcatggccctggcctcaacccaaacgcttctaccgggcaggaggccctgtctcaaaccactattagttgggccccattccaggatacatccgagtacatcattagttgccaccccgtcggtacagatgaagagccgcttcaattccgagtgcccggaacatcgacaagcgccaccctgactggcctgacacgtggcgctacctacaatgtgatagttgaggccctcaaagaccaacagaggcataaggtccgggaggaagtggtcacagtggggaactcagtgaatgagggcctgaatcagccgactgacgacagctgttttgacccgtataccgtgtctcactatgctgtcggcgatgaatgggagagaatgagcgaatccggtttcaaattactttgtcagtgtttagggttcggtagtggtcatttccgatgcgatagcagccgctggtgccacgataacggggtaaattacaaaattggtgaaaaatgggacagacagggagagaatggacagatgatgagttgcacctgccttggcaatggaaagggtgagtttaagtgcgatcctcatgaggcaacatgttatgacgatggaaaaacctaccacgtgggcgaacagtggcagaaggagtacctgggagccatatgctcgtgtacgtgcttcggcggacagcggggatggcggtgcgataactgtcggagacctggtggggagccttcccccgaaggcacaacaggtcagtcttataaccagtacagtcagaggtaccaccaacggactaatacaaacgtcaattgccctatcgaatgtttcatgccactcgatgtacaagctgatcgggaagattctcgggaatac

SEQ ID NO: 28696 - DNA, 6891 bp, synthetic construct
  misc_feature 1..6891: note = Description of Artificial Sequence: Synthetic coding sequence
  source 1..6891: mol_type = other DNA
atgcttagaggacccggtcccggactattacttttagccgtgcagtgtttgggcacagctgtgccctcaactggagcaagcaagagcaagaggcaggctcagcagatggtgcagccacagagtccagtggcagtgtctcaatcaaagccaggttgctatgacaatgggaagcactaccagatcaatcaacagtgggagcggacctacctgggcaatgccttggtgtgtacttgctacgggggatcgaggggatttaactgcgaatcaaaaccagaagcagaagagacatgtttcgataaatatactgggaatacatatagagtaggtgacacctacgagcggccaaaggactctatgatctgggactgcacgtgcatcggggcaggccgaggacggatatcatgcaccattgccaatcgttgccatgagggcggtcaaagctacaaaatcggggatacatggaggagacctcacgaaactggcggttatatgctcgagtgcgtttgcctgggaaacgggaagggcgaatggacctgtaagcctatcgcagagaaatgctttgaccacgctgcaggtacatcctatgtggtcggtgaaacttgggaaaagccttatcagggctggatgatggttgactgcacatgccttggcgagggcagtggtcgcatcacctgcacatccagaaacagatgtaacgatcaagacactcgcaccagctatagaataggcgacacgtggtccaagaaggacaataggggtaacctcttgcagtgcatttgtactggaaacgggaggggagagtggaaatgtgagcggcatacctccgttcaaacaacctcttctgggagtggacctttcactgatgtacgagccgcagtctatcaaccccagccccatcctcagcccccaccttatggccattgtgtgacggatagcggggtcgtctactcagtcggaatgcagtggctaaagactcaggggaacaaacagatgctttgcacgtgtctcggtaacggagtttcctgtcaggaaacagccgtgacccagacttatggcggaaacagcaatggagagccctgtgttctcccatttacctacaacggccgaacgttctattcgtgtacaaccgagggacgccaggatggacacctgtggtgctccacaacatccaactacgaacaggatcaaaaatactccttttgtacagatcacacagtgttagttcagacgcggggagggaacagcaatggggctttgtgccacttccctttcttgtataacaatcacaattatacagactgtacatccgagggtagacgtgataacatgaagtggtgcgggactacccagaactatgatgcggaccagaagttcgggttctgcccgatggcagcacacgaggagatatgcaccaccaatgagggggtgatgtatcgcataggcgatcaatgggacaagcaacatgatatgggtcatatgatgagatgcacatgcgtgggcaacggaaggggtgagtggacttgcatagcatactcgcagcttcgggatcaatgtattgtggacgacatcacctataacgtcaacgatacattccacaagcgacatgaggaaggacatatgctgaactgcacatgttttgggcaaggtagagggagatggaagtgtgatccagtggatcagtgccaggactccgaaaccgggactttctatcagatcggcgattcgtgggaaaagtatgttcatggcgtcaggtatcagtgctattgctatgggagaggtattggggagtggcattgtcaaccgctccaaacctatccatcaagctcggggcctgtggaggtgttcattactgaaactccaagccagcccaactcccaccccattcaatggaatgcaccgcaaccctcacatatatcgaagtacatcctccgctggcgccctaagaactccgtcgggcgatggaaggaggctaccatacccggacatctaaatagttacactatcaagggattaaagccaggtgttgtgtatgagggacagctgataagcatacagcagtacggccatcaagaggtgacccgttttgattttactaccacctcgacatccacccccgtgactagcaacacagttaccggcgagaccaccccttttagccctctcgtagcaacttcagaatcagtgactgagataactgccagctcttttgtggtctcatgggtgagtgccagtgacactgtgtccgggttccgagtggagtatgagctgagtgaggagggcgatgagcctcagtacctggatctgccttcaaccgcaaccagcgtgaatattcccgacctgctcccagggagaaaatacatcgtgaacgtctatcagatctcagaggatggtgagcaatctctgatcctttccaccagccagacgaccgcccctgacgctcctcccgacaccacagtcgaccaggtcgatgatacgtctatcgtggtccggtggtccaggcctcaggcaccgatcaccggttacagaatcgtgtacagtccaagcgtggagggaagcagcaccgaactgaacctgcctgagactgccaactccgttaccctgagtgatctgcagcccggtgtccagtacaatattactatttatgccgtggaagagaatcaggagtctacccccgtggtgatccagcaggaaaccactgggacgcccagatctgatacggtcccttcaccacgtgatctgcagtttgttgaggtgactgacgtgaaagttactatcatgtggacccctccggaaagtgccgttacgggttaccgtgtggacgtgatcccagttaatcttcctggagagcatgggcaacgcctcccgatttcccgaaatacattcgcggaggtcaccggacttagccctggggtgacttattatttcaaagtctttgccgtgagccacgggagggagtccaaacccctgacagcccagcagactaccaaactggatgcacccaccaacctgcagtttgttaacgagacagactcaaccgtcctcgtcagatggacgccccctcgggctcagattacgggctataggctaactgtgggcctcacccggcgaggccaaccgagacagtataatgtgggaccatccgtgagtaagtaccccctccggaacctacagccagcgagcgagtacacagtgtctctggtcgccattaaaggcaaccaggagtctccaaaggccacaggcgtgtttactacactgcagcctggaagctctatcccaccatacaacacagaggtgaccgagacaacaattgtgattacctggacaccagcaccaagaatagggttcaaacttggtgtaagaccctcccaaggaggggaagcccctagagaggtgactagcgactctgggagcattgtagtctctggtttaactcccggtgtagagtacgtctacacaatccaggtgcttcgggacgggcaggagagggatgctcccattgtcaacaaagtcgtcacacctctttctcccccaacaaaccttcacctcgaggccaatcctgacaccggcgttctgacggttagttgggagcgaagcacaaccccagacattacgggctaccggatcacgacaacccccaccaatggtcagcagggaaactcactcgaggaagtggttcatgccgatcagtcatcttgtacattcgacaatctaagcccaggcctggagtacaacgtatccgtgtatacggtaaaggatgataaagagagcgtgcctatatcggacactattatccctgcagtccccccacccaccgacctcagatttacgaacatcgggcctgatacgatgcgcgtgacgtgggctcctcccccaagcattgatcttacaaactttctcgtgcggtacagccccgttaaaaacgaagaggatgttgccgagttgtctattagccccagcgacaacgccgttgtgctgaccaacctactgccagggacagagtacgtggtctcggtctctagcgtctacgaacagcatgagagcacccctctgagaggaaggcaaaaaacgggattagatagccccaccggtatcgatttctcagacatcacagcaaacagtttcaccgtgcactggattgctcctagagctaccatcaccggctataggattcggcatcacccagagcactttagcggccgacctcgggaggaccgggttccacactctagaaactccattaccctgacaaaccttacgccaggaacagaatatgtggtttcaatcgtcgctcttaatggacgggaggagtctccattactcattggacagcagagtacagtctctgacgtaccgagggatttagaggtggtcgcagcgacccctacttccctgctcataagctgggatgccccagccgtgactgttagatactatcgcattacctatggcgagactggaggtaattcaccagtccaggaattcaccgtgcctgggtccaagagtacagctactatttccggccttaagccgggagtcgattacacaattacggtatatgccgtgacgggtcgaggcgacagccctgcctcctcaaagcccatctctataaactacaggacggagattgacaagccgtcacaaatgcaagtgactgatgttcaagacaatagcataagcgtgaagtggctcccaagctcaagccccgtaaccgggtatagagtgaccacgacccccaaaaatggacccggaccaaccaagactaaaaccgcgggtcccgatcagactgaaatgacaattgagggcctccagcctacggtcgaatacgtagtgagcgtctacgcccagaatccttcaggagagtcacagcctttagttcagactgcagttaccactatacccgcacccaccgatctcaagttcacccaggtgacaccgacttcgttgtccgctcaatggacaccacccaacgtccagctgacggggtatcgtgttcgggttacacccaaagagaagactgggcctatgaaagaaatcaatcttgcaccagattcgtcctcagtcgttgtttccggcctgatggtggcaacgaagtatgaggtgtctgtttatgcgttgaaggacactcttaccagtcgccctgcacagggcgtcgtcacaaccctggagaacgtctcaccaccccgtcgggctcgcgtgaccgacgcaacagagactacaattaccattagttggaggactaagactgagaccatcaccggattccaggtggacgccgtgccagccaacgggcagaccccaatccagcgtacgatcaaacccgacgtgaggtcatacaccatcaccggcctccagccaggaaccgattacaagatatacctgtacacacttaacgacaacgcaagatcctctcctgtggtgatcgacgccagcactgcaattgatgctccatccaacctgcgctttctcgccactactcccaacagcttactagtgtcatggcaaccaccacgtgcccgaattacgggatacattatcaaatacgagaagcccggttctcctcccagggaagtggttcctcggccaagacccggagtgaccgaggccaccataacaggccttgaacccggtactgagtatactatctatgtgattgcgttgaaaaacaatcaaaaatctgagcctctaataggccgtaaaaagacggatgagctgccccaacttgtgactttgccgcatcccaatctgcatggtcctgagatccttgacgtccctagcacggtccagaagactccctttgttacccacccaggctatgacaccggtaatggaatccagctccctggtaccagtggccaacagccttcagttggacagcagatgatttttgaagagcacggatttcggaggacaacccctccgacaactgcaacacccatccgtcatcggcctaggccttatccccctaatgttggcgaagagattcagatcgggcacatcccacgagaggatgttgattatcacctgtacccacatgggccaggtttgaatcctaacgccagcactggacaggaggccctgagccagaccaccatttcctgggccccttttcaggacacatctgagtatatcatctcttgtcatccagtggggaccgacgaagaaccgctgcagttcagagttccaggtaccagcacctctgctactctcacaggcttgacaagaggcgctacatacaacgtaatcgttgaggcgctcaaggatcagcagcgccataaggtgagggaggaggtggttacggtgggaaattccgtgaatgagggattaaaccagcccactgacgactcatgctttgacccctatactgtgagccactatgctgtcggcgacgaatgggagcgaatgagtgaaagcgggtttaaactgctctgccaatgtctcgggttcggttcaggtcatttccgctgcgacagtagcaggtggtgtcacgataatggcgttaattataagatcggggagaagtgggacagacaaggagagaacgggcaaatgatgagctgcacctgcctcggcaacggcaaaggggagttcaagtgtgacccacatgaagccacatgctacgatgatggaaaaacataccacgtgggcgaacagtggcagaaagaatacctgggggctatttgctcttgtacttgcttcggagggcagcggggttggaggtgcgacaactgtaggaggccgggtggtgaacccagccccgagggcaccactggccaaagctacaaccaatattctcagagatatcatcagaggacaaataccaacgtcaattgtcccattgagtgcttcatgccacttgacgtgcaggcagacagagaggacagccgggaataa

SEQ ID NO: 28697 - DNA, 6095 bp, synthetic construct
  misc_feature 1..6095: note = Description of Artificial Sequence: Synthetic coding sequence
  source 1..6095: mol_type = other DNA
atgctgcgagggcctggacctggcctgctactgcttgcagtccagtgtctcggcacagccgtccccagcacaggcgcatcgaaatccaagcgccaagcccaacagatggtgcagccccagtccccagttgcagtcagtcaaagcaagccagggtgttatgacaatggaaagcactatcaaattaatcagcaatgggaaaggacctaccttggcaatgccctcgtatgtacgtgctacgggggttctagagggttcaactgtgagagcaagccggaggccgaagagacctgcttcgataagtacaccggcaatacttaccgtgtgggggacacttacgaaagaccaaaggattcaatgatctgggactgtacgtgcatcggcgcaggcagaggtcggatcagttgcacaatagccaaccggtgtcacgaaggtggccaatcctataaaatcggtgacacatggaggaggccccacgaaactggaggttacatgctcgagtgcgtgtgtctgggaaacggaaaaggcgaatggacctgtaaaccaatagcagagaaatgttttgatcacgccgctggaacgtcctacgtggtgggagagacatgggaaaagccttaccagggctggatgatggtagattgcacttgcttgggggaaggatccgggcgtatcacatgcacctcccgcaacagatgtaatgaccaggacaccaggacatcttaccgaattggtgacacttggagcaagaaggataatcggggtaatctgctccaatgtatctgcactggcaatggacgcggagagtggaaatgcgagaggcatacctccgtgcagacaacaagctcaggatcgggcccttttacagatgtgagagctgcagtatatcaaccgcaaccccatccgcagccgcctccatatggacattgtgtcacagactccggcgttgtatatagcgtcggaatgcagtggctgaagactcaggggaacaagcaaatgttatgcacatgtctggggaacggtgtctcatgccaagagactgccgtgacacagacctacggcggtaacagcaatggcgagccatgtgtgttgccattcacttacaacgggaggaccttctattcctgcactactgaggggaggcaggacggacacctgtggtgttctactacctcaaactatgagcaagatcagaaatacagcttctgtaccgatcacaccgtgctggtacagacacggggtggtaattctaatggtgccctctgccattttccttttctctataacaaccataattataccgactgtacaagcgaggggaggcgcgacaatatgaagtggtgcggtacgacacaaaactatgatgccgatcagaagttcggattttgccctatggccgctcatgaggaaatttgcaccacaaacgagggcgttatgtacaggatcggagaccagtgggacaagcaacacgacatgggccatatgatgagatgcacctgcgtgggtaacggaagaggggagtggacgtgcatcgcctactcccagctgcgcgatcagtgcatcgttgacgatatcacttacaatgtgaacgatacgttccataaaaggcacgaggagggacacatgctcaattgcacttgctttggacagggcagagggagatggaaatgcgaccccgtggatcagtgtcaggattcggaaacaggcactttttaccagatcggcgattcctgggaaaagtacgtgcacggagttagatatcagtgttactgttatgggcgtggaataggagagtggcactgtcagcccttgcaaacgtacccctcaagtagcggacccgtcgaggtttttatcacagaaacaccaagtcaaccgaacagccatcccatccaatggaatgcccctcaaccgagccacatatcaaagtatattttgaggtggcgcccaaagaatagcgtgggcagatggaaagaggccaccattcctgggcacctgaattcttacaccatcaaagggctcaagccaggcgtcgtgtacgaggggcagctcatctccatccagcagtacggacaccaggaagtgacccgctttgattttaccaccacgtcgacatcaacccccgttacctcaaataccgtcactggtgagactaccccgttttcgcccctagttgctacatccgagagcgtgacagagattactgcaagttcattcgtggtttcgtgggtgagcgccagcgacacagtttcgggatttcgtgttgaatatgagctcagcgaggaaggggacgagccccagtacctggatctgccctcaaccgcaactagtgtcaacattcctgacctgctcccaggcagaaagtacatcgtcaacgtgtaccaaatctctgaagatggtgaacaatcactcatactgagtacaagccaaaccacagccccagacgcacctccggatacaactgtggatcaagtcgatgacacgtcaattgtggttagatggtctcgtccccaggccccaatcacaggctaccggatcgtctattccccctctgtggaaggctctagtactgagttaaacttacctgagactgccaatagtgtcaccctgtctgacctccagcccggagtgcagtacaatattaccatctacgcggtggaggagaaccaggagagcacacctgttgtgatccaacaggagaccaccggaactccgaggagcgatactgtgccttctcccagggatttgcagtttgtggaagtaactgacgtaaaggtgacaattatgtggacaccacccgagtccgccgtaacaggttatcgagtggatgttattcctgtgaacctccctggggaacatgggcagaggttgccgatcagtcggaatacctttgctgaagtaaccgggttatctcccggtgtgacttactactttaaagtgttcgcagtgtctcacggcagagaatcgaagccacttacagcacagcaaaccaccaaacttgatgcacctactaatctgcaatttgtaaatgagaccgactcaaccgtattagtacggtggacgccaccacgtgcacagatcaccgggtaccgactcactgtcggcctgacacggagagggcagcctcgccagtacaacgttggcccatcagtctccaagtacccactccgcaatcttcagcccgcatcggaatacactgtgagccttgtggcgattaaaggcaatcaagagtcgccaaaagccacaggggtgtttacaacccttcaacctggatctagtatacccccttataacactgaggtgactgaaactaccatagtgattacatggacgccagcacccaggattggtttcaagcttggtgtgagaccgtcccagggaggcgaagcccctcgggaggtgaccagcgattccggatctattgtagtgagcgggcttacacctggggtggaatatgtttacactatacaggtgctgcgcgacggccaggagagagacgctcctattgtgaataaagtggttaccccgctgagtcctccgaccaacctccacctagaggccaaccctgatactggagtgcttacggtatcctgggagcgcagtactactcctgacattaccggatacagaattaccaccactccgactaacggccagcaggggaactctctggaggaggtcgtgcacgcagatcagtccagctgcacctttgacaacctaagccccggacttgaatacaacgtgtctgtgtatactgtgaaggatgataaagaatccgtgcccatctcagacaccattatacctgctgtgccccctccaacggacctcagatttacaaatataggacccgataccatgcgggtgacctgggctccgccaccaagcattgacttaactaatttcctcgtaagatattcccctgtgaaaaacgaggaggatgttgccgaactctcaatctctccctccgataacgccgtcgtgttgactaacctcctgcctgggactgagtacgtggttagcgttagctctgtctatgagcagcacgaatctacgcccctcaggggtcggcagaaaaccggcttggattcacctactgggatcgatttctcagacattactgctaattctttcaccgtgcactggattgcccctcgtgccaccatcactggataccgcatccggcaccaccccgaacatttttctggtcgacccagggaggaccgcgtgccacacagccgtaacagtatcactctgacaaacttgaccccagggacagaatatgtggtgtctatagtagccctgaatgggcgagaagaatcacccttactgatcgggcagcaatcaactgtgtccgatgttccaagggacctggaggtagtggctgcaactccaacatcgctcttaatttcttgggatgctcctgctgtcacagttaggtactatagaatcacctatggtgagacagggggaaactctccggtccaggaattcacagttccaggatctaaatctaccgcaacaatcagcggactcaaacccggtgtggactacacaataacggtctacgccgttaccggcagaggggactcaccggctagcagcaaaccaatctcaattaattaccggactgagatcgacaagccatctcagatgcaggtgaccgacgtgcaggataatagcatcagtgttaaatggctgcctagctcgtcccctgtgactggttaccgcgttacaacaactccaaaaaatggacccggtcctacaaaaacaaagacagctggcccagatcaaaccgaaatgacgatcgaaggcctgcagcctacagtagagtatgtggttagcgtctacgcacagaacccttcaggcgaatcgcagccacttgttcagactgctgtgacaaatattgatcggccaaagggcctggccttcaccgacgtagacgtggattccattaagattgcatgggaaagtccccaaggacaggtgagcagataccgggttacttactccagtccggaagatggaatccacgaactatttcccgctccagacggagaagaagatacagcggagctgcaggggcttcgaccaggtagcgagtacaccgtgtcagtggtcgctctgcatgatgatatggaatcgcaacctcttataggtacccagtccaccgccatccctgccccaaccgatctcaagtttactcaggttacaccgacaagcctctctgcccagtggacccctcccaacgttcagctcaccggttatcgagtgagggtgacccccaaagagaagaccggccctatgaaggaaattaatctagcccctgacagctcgtctgtagttgtcagcggcttgatggttgccaccaaatatgaggtgagtgtgtatgcgctgaaagacaccttgaccagccgcccagcacagggcgtagtgacaactttggagaacgtgtcccctccgaggcgagccagagtgacagacgcaacagaaactactattacgatctcctggagaaccaagacagagactatcacgggcttccaagtggatgctgtgccggctaatggtcagacaccgatccagcggacaattaaacctgatgttcggtcctacacaattaccgggctacagccaggtacagattataagatctacctttatactttgaatgataatgctcgctcatctcctgtggtgattgatgcgagcaccgctattgacgctccgagcaacctgcggttcttggcaaccaccccgaactccctgctggtgtcatggcaacctccacgcgctaggataacaggatacatcatcaagtacgagaagcccggatctcctccgcgagaagttgtacctcgccctcgcccaggagtcaccgaagctacaatcactggacttgagccaggcacagaatacaccatctatgtgattgctctgaagaataaccagaaatcagaacccttgattgggaggaaaaagacaggtcaggaggccctttctcaaacaacaataagctgggcaccctttcaggatacgtccgaatatattattagctgccatccggtgggcactgatgaggaacctttgcagagtaccaaggccta

SEQ ID NO: 28698 - DNA, 6531 bp, synthetic construct
  misc_feature 1..6531: note = Description of Artificial Sequence: Synthetic coding sequence
  source 1..6531: mol_type = other DNA
atgctccgtgggccaggtcccggtcttctgttattggctgttcagtgccttggaaccgctgtaccttcaacaggcgcatccaagagtaagagacaggctcagcaaatggtacagccgcagtccccagtggctgtctcccaatccaagcccggttgctatgacaacggaaaacattaccaaatcaaccagcagtgggaacgaacttacttgggaaacgcattagtgtgtacttgttacggcggatcccggggtttcaattgtgagtcaaaaccagaggcagaggaaacatgtttcgataaatacaccggaaacacgtacagagtgggagacacctacgaacgcccaaaggattctatgatatgggactgtacatgtattggcgctggaagaggaaggatctcatgtaccattgctaacaggtgccatgaggggggacagagctacaaaattggggatacctggcgacggccacacgagaccggcggttacatgctggaatgcgtgtgcttgggcaacggaaagggcgaatggacctgcaagcccatagccgagaagtgcttcgatcatgccgcaggcacctcttacgtggtcggagagacctgggaaaaaccttaccaaggctggatgatggttgactgtacatgtctaggagaggggtctggacgcatcacatgcacgagccgcaatcgctgtaacgaccaagacactaggactagctataggattggggacacatggagcaaaaaggacaatcgaggcaacctgctgcaatgcatctgtacaggcaacggccgaggggagtggaaatgcgaaagacatacatccgtgcagacaaccagttctggaagtggcccattcacagacgtccgcgctgcggtctatcagccccagccccacccccagccaccaccgtacggtcactgcgtgaccgactcaggtgtggtgtattcagttggcatgcaatggttgaaaactcagggcaacaaacagatgctgtgcacctgcctggggaatggtgtcagctgccaggaaaccgcagttacacaaacatacggtgggaactcgaatggcgagccatgcgtcctcccattcacgtacaacggtcgtacattctatagttgtacaacagaaggccgacaggacggccacctgtggtgctctacaaccagcaattacgaacaggaccaaaagtatagcttctgcaccgatcatacagtccttgttcagacacgaggaggcaactccaatggagcgctgtgtcatttcccctttctgtacaacaatcataactataccgactgcacatcagaaggtcgcagggataacatgaagtggtgcggcaccacgcaaaattacgatgccgaccaaaaatttggtttctgtcccatggccgcacatgaagagatctgcacaacaaatgaaggagtcatgtatcgcattggggaccagtgggacaaacagcacgacatgggccacatgatgcgttgtacttgtgtgggtaacggtcgaggagaatggacatgcatcgcatactcccagctgagagaccaatgtattgtagatgatatcacatataatgtgaacgataccttccacaaaagacacgaggaaggacacatgctgaattgtacctgtttcggtcagggtaggggcagatggaaatgtgaccccgtagatcagtgtcaggatagcgaaaccggcactttctatcaaataggcgatagctgggagaagtacgtgcatggtgtgaggtaccaatgctattgctacggtcgtggtatcggagaatggcactgccagcccctccagacttatccctcgtcctccggcccagtggaagtctttataacagagaccccctctcagccaaattcgcaccctattcaatggaacgcaccccagccatcacatatctctaagtacattttacgatggagacctaagaacagtgtgggacgttggaaggaggcgacaatccccggacacctaaactcgtacaccattaaggggctcaagccaggcgtggtgtacgagggccagctcattagcattcagcagtacggccatcaggaggtgacgcggtttgatttcacgacaacctcaacgagcacacccgttacatctaacaccgtgactggcgaaactacaccattctccccgctagtggcaacctccgagtcagttacagagatcacggccagctctttcgtcgtgtcatgggtctcagcttccgatacagttagcggatttagggtggaatacgaactaagtgaggagggggatgagccgcagtacctcgacttaccctctactgcaacttctgtgaacatacccgatctgctgccagggaggaaatatattgtcaatgtctaccagataagcgaagacggggagcagtccctcattctttccacaagccaaactaccgcacccgacgcaccaccggacaccaccgtcgaccaggtggatgacactagcattgtcgtgaggtggtccaggccgcaagcgccaatcacagggtatagaatcgtgtactcaccctccgtcgagggtagttccaccgagctgaacttacccgagaccgcaaattccgtgacgctgtctgatttgcagcctggagtccagtacaacatcacgatctatgctgtggaggagaaccaagagagcacaccagtcgtcatccagcaggaaaccaccgggacaccacgttcagataccgtgccatcccctcgggacctccagtttgtcgaggtgacagatgtgaaggtcacgattatgtggaccccccctgagtctgcagtcacaggttatcgggtggatgtcattcccgtcaacctgccaggggaacacggccagaggctgcctatttcgaggaatacctttgccgaggtcacaggcctgagtccaggcgtgacttattactttaaagtttttgccgtgtcccacgggagagaatccaagcccttgactgcacagcaaaccaccaagcttgacgccccaactaacttgcaattcgtcaatgagacggactcaaccgtgctggtgcgatggactccccctcgggctcagatcactggctaccgactgactgttggcctgaccaggaggggccaaccaaggcagtacaacgtcggcccatcagtgagcaaatatcctctccgcaatctgcaaccagcatctgaatacactgtttcgctggtagcaataaaaggcaaccaggagtcaccgaaggctaccggagtcttcacgactttgcaacctggaagctctattcccccttacaatactgaagtcactgagacaacaattgttattacgtggacccctgcaccccgtataggattcaaactgggggtgcgcccatctcaaggcggagaagccccaagagaagtgactagtgattcagggtcaatcgtcgtgtctggcctaacacctggagtggagtatgtctatactattcaagtgctgcgtgatgggcaggaaagggatgcaccgattgtcaataaagtcgtgacacccctgtcccctccaactaatctgcatttagaagccaacccagacacaggggtattgacagtgagttgggaacggtcaacaaccccagacatcactgggtaccggataacaaccacacccacgaacgggcagcagggcaactccctggaggaggtcgtacacgctgatcagtcatcctgcactttcgataacctgagtccgggtctagaatataacgtgagcgtatacaccgtgaaagacgataaggaatccgtaccaatttctgacactattatccccgcagttcctccccctaccgacctaagattcacaaatattggaccagatacaatgcgagtgacatgggctcctcccccttcaattgacttaacaaatttccttgtgaggtactcccctgtgaaaaacgaggaggacgttgcagagcttagcatctccccttcagataatgcagtagtgttgactaatctcctcccgggaactgaatatgtggtctccgtctcttccgtatatgagcagcatgagtctactccgttacgcggtcggcagaagactggcctggactctccaacagggatcgactttagtgacatcacagcaaattcgttcaccgtgcactggatcgcccctagggctacaatcacaggttaccgcatccggcatcaccctgaacacttttcaggcaggccacgggaggaccgagtgccccacagcaggaattccataactttaactaacttgactccaggcactgaatatgtagtcagtatcgtcgctttgaatgggcgagaagaatcacctctgctgatcgggcagcaaagcacagtgtcagatgtcccacgggacctggaggtggtagccgcaacaccgacaagtctcctcatttcctgggacgccccagctgtgaccgtacgctattatagaatcacctatggagagaccggaggcaacagcccagtccaggaattcaccgttccaggttccaagtctactgccaccataagcggcctgaagccgggtgtcgattacactattacggtttacgctgtgacgggaaggggagattcccccgcttcctctaagcctatctctattaattatcgcactgagatagataagccttcccaaatgcaggtaacggacgtccaggataatagtattagtgttaaatggctgccttctagctcccccgtgaccggttatcgtgtgaccacaacgcctaaaaatggccctgggcctaccaagacgaagaccgccggacccgatcagacagaaatgactattgagggtcttcagcctacagtggagtatgttgtcagcgtgtatgcccagaatcccagcggggaatcccagcctctggtgcagactgcagtcacaacaatccctgcacccacagatctgaaattcactcaggtgactcccacctccctgtcagctcagtggacaccgcctaatgtgcagttgacaggctaccgggtgagggtcacgcctaaagaaaaaactggaccaatgaaagagatcaatttggctccagatagcagcagtgttgttgtcagtggactgatggttgccactaaatacgaagtgagcgtttatgctctgaaggatacgctcacctcccgcccagcccagggcgttgtaaccaccctcgaaaacgtctcaccccctcgcagggcccgtgtaactgacgcaacagagaccacaattaccatctcctggcgcaccaaaaccgagaccatcactggattccaggtggacgctgtgccagccaacggtcagactcctatacagcgtactatcaagcccgacgtgcggagttatacaattaccggcctgcaacccggaacagattataaaatttatctctacacgcttaacgacaacgcgcgttccagtcctgtggtgatcgatgccagtaccgcaatcgacgcccctagcaatctgcgctttcttgctacaacaccaaacagtctgctggtctcatggcagccgccaagggctagaattacaggctacatcatcaaatatgaaaaaccaggcagcccgcctcgcgaggtcgtacctaggccgagacccggtgttaccgaagctacaattaccggcctggaacccggtacagaatacacaatttatgtaattgccctgaaaaacaaccagaagtccgagcctctcattggacgaaagaagaccggtcaggaagccttgtcgcaaacaacaattagctgggcaccgtttcaggatacaagcgagtacatcatctcatgccacccagtggggacagacgaggagcctctgcagttccgggtacccggaaccagcacttccgccacgctgaccgggcttacacgcggagccacgtacaatgttatcgtggaggcgctcaaagatcagcagcgtcacaaagtccgagaggaggtggtaacagttggaaattccgtcaacgagggccttaatcagcccacggacgacagttgtttcgacccatacacagtgtcccactatgccgtgggggacgagtgggaaaggatgtcagaatcaggtttcaagctgctttgtcagtgtttggggtttgggtccggtcacttcaggtgcgattctagccggtggtgccacgacaacggtgtcaattataaaataggcgaaaaatgggatcgccagggagagaacgggcagatgatgtcttgcacatgtctgggaaacggcaaaggggagttcaagtgtgatccccatgaggcaacttgctacgatgacggcaaaacttatcacgtgggtgaacagtggcagaaggagtatctcggggcaatttgcagctgcacctgcttcggaggccagcgtggatggcggtgcgacaactgtcgccgaccaggtggagaaccctcaccagagggcacaaccggacagagctacaaccaatacagccagcgctatcaccagaggaccaacaccaacgtgaattgtcctattgagtgctttatgcctttggacgtccaagcagaccgcgaagattctcgagaataa

SEQ ID NO: 28699 - DNA, 7161 bp, synthetic construct
  misc_feature 1..7161: note = Description of Artificial Sequence: Synthetic coding sequence
  source 1..7161: mol_type = other DNA
atgctaagagggccaggccctggccttctactgctggcagtgcagtgtttggggactgccgttccctcaacaggagcatcaaagtctaagaggcaggcccaacagatggtgcagccccaatcacctgtggctgtgtcacaaagcaagcctgggtgctacgataacggcaaacattatcagatcaaccaacaatgggaacggacttatcttggcaacgcgcttgtgtgcacctgctacgggggaagccggggtttcaattgcgagtcaaagcctgaagcagaggagacttgctttgacaaatacactggcaacacctaccgagtcggcgatacctacgaacgccctaaagatagtatgatctgggattgtacctgcatcggcgcagggcgaggccgaatttcatgtactatagccaatagatgccacgagggaggccagagttataaaattggcgacacatggcggagaccccatgagaccggagggtatatgctggaatgcgtctgtctggggaacggtaaaggcgaatggacctgcaagcctatcgctgagaaatgttttgatcatgccgcaggcacctcttacgtcgtcggagagacctgggagaagccttatcaaggctggatgatggttgactgcacatgcctcggggaaggtagcgggcgaattacttgcacatctcggaacagatgtaacgaccaagatacaagaaccagttataggataggggacacctggtccaaaaaggataaccgcggaaacctgctccagtgtatctgtacaggcaacgggaggggcgaatggaagtgcgaacgccatactagcgttcagactaccagtagcggttcagggccatttacagatgtgagggcagctgtgtaccaaccccagccccatccacagccgcctccctatggccattgcgttacagactcaggcgtcgtgtattctgttggcatgcagtggttgaagacccagggtaacaagcagatgttgtgtacttgcttgggcaacggcgttagttgtcaggagacagcggtcacacaaacctatggcggaaactccaacggagagccatgcgttctgccctttacctacaacggcaggactttctattcttgcactaccgaaggcagacaggatggccacctctggtgttcaacgacgagcaactacgagcaggaccagaagtattctttctgtacggatcataccgttctcgtacagacgagggggggtaattccaacggtgcattgtgccactttcccttcctgtacaataatcacaactacacagactgcacttctgaagggaggcgcgataatatgaagtggtgcggaaccactcagaactatgacgccgatcagaagttcggcttttgtcctatggccgctcacgaggagatttgtaccactaacgagggcgtaatgtatcggatcggggaccagtgggacaagcagcacgatatgggccacatgatgcgctgcacctgcgtcgggaacggcagaggagaatggacatgcatcgcttactcccagctcagggaccaatgcatcgtagacgacattacttacaacgtgaatgacacatttcacaaacgtcatgaagaggggcacatgttgaactgcacctgctttgggcaggggagaggaaggtggaagtgcgatcccgtggaccagtgtcaggacagcgagacagggacgttttaccagataggggactcctgggaaaagtatgtgcacggtgtgaggtaccagtgttattgttacgggaggggtatcggtgagtggcattgccagccattgcagacgtatccctcaagttctggcccagtggaggtctttataaccgagaccccttcgcaaccgaactctcaccccattcagtggaacgcccctcagccatctcacatcagtaaatatatcttgcggtggcgcccaaagaactcagttggaagatggaaggaggcgacaatcccgggtcacctgaacagctacactatcaaaggactgaaacccggtgtggtttatgaagggcagctcatcagtatccagcagtatgggcatcaggaggtgacccggttcgactttacaaccaccagcacttccaccccagttacaagtaacacggttacgggagagacaacccctttttcacctcttgtggccacgtcggagagcgtcacggagattactgcatccagctttgtggttagttgggtgagtgccagcgatacggtctcaggattccgagtggaatatgagctcagcgaagagggggacgagccccagtatctcgacctgccgagcacagcgacctccgtcaatattccggatctgctgccagggaggaaatatatagtgaacgtgtaccagatcagcgaggacggggaacagagcctcatcctcagtacttcccagaccaccgcgccagatgctccgcctgacaccacggtggaccaagtcgacgacacatccatcgtggtcaggtggtcccgaccccaagctccgatcacgggctatagaattgtgtattccccttccgtggaaggatcatctacagaattaaatctgcctgagaccgcaaactccgttactctgtctgatctgcaacctggagtgcaatataacatcaccatctacgcggtcgaggagaaccaggaaagcacacctgtggtgatccaacaggagactacaggtactccaaggtctgacacagtccccagtcctcgtgacttgcaattcgtggaagtcaccgacgtgaaagtgacaataatgtggactccccctgagagcgctgttaccggttaccgcgttgatgttatcccggtgaatctgcctggcgaacacggacagcggctccccatatcccgcaacacctttgcagaggtgaccgggctatcacctggcgttacgtattactttaaagtttttgccgtcagccatgggagagagtctaagccgcttacggcccagcagaccacaaagctagacgcacccacaaatctccagttcgtcaatgagacagattccaccgtgctggtgagatggaccccgccaagagctcaaatcaccggttacagactcaccgtgggcctcactagaaggggacagcccagacagtataacgttggcccaagtgtttcgaaatatccactgcgcaatttgcagcctgcctccgaatacactgtcagtctggtggctatcaaagggaatcaggaatcccccaaagccacaggcgtcttcaccactctgcagcctggctcatctattccgccttacaatacagaagtgaccgagaccaccattgtgatcacatggacccccgcacctcgcatcggcttcaaactaggggtgaggccatctcaaggaggggaagctcctcgagaggtcaccagtgacagcggaagcatagtcgtgtcaggcctgacacctggtgtcgaatacgtgtatacaattcaagtcttgcgggatgggcaggagcgcgatgccccaatcgtgaacaaagttgtgactccgctttcccctccgacgaacttgcacctggaggcgaaccctgacacaggcgtacttacggtcagctgggagaggtctacaacacccgacattacgggatataggattaccaccaccccgacgaacgggcagcagggcaattctctggaggaagtggtccacgcagatcagagcagctgcacttttgataacctctcacctggactggaatataatgttagcgtttacactgtcaaagatgacaaagaatccgtgcctatctctgatactattattcccgctgtcccaccgcctaccgatctgcggttcacaaacattggacctgataccatgcgcgttacctgggcccctcccccatcaatcgatcttacaaattttctggtacggtattcacccgtcaaaaatgaggaagatgtggcagagctctctatcagccccagcgacaacgcagtcgtcctgacaaacctcctgcctggtacagaatatgtcgtcagcgtatcctcagtgtacgagcaacacgaatccaccccactgaggggacgccagaaaacagggttagattcacctacgggcattgattttagtgatatcacagccaatagctttacggtccactggattgctcctcgcgctacgattacaggataccggatcaggcatcacccggaacatttttccggtcgtcccagggaggaccgggtcccacatagtcgaaactctatcacattgaccaacctcactcccggtaccgaatatgtggtcagcattgtcgcgttaaatgggcgagaggagtcgccactgcttattggccagcaatctaccgtgagcgatgtgccgagggacttagaagtggtcgccgcaaccccaacctccctcctgatctcctgggacgccccagccgtgactgtgcggtactatagaatcacctatggggagacaggagggaatagtccagtgcaagaatttaccgtaccaggaagcaaatctactgccaccatcagcggactgaaacctggtgtggattatacaatcacggtgtacgctgtgactggcaggggcgacagtcccgcaagtagcaaaccgatctcaataaactatcgtactgagatcgacaagcctagccagatgcaggtgaccgacgtccaggacaactcaatctccgtgaagtggttaccctcaagtagccctgtgaccggatacagagtgaccactacacctaagaatgggccagggcctaccaagaccaagactgccggacccgaccagacagagatgactatagaaggcctacagcccaccgtggagtacgtcgtgagtgtatacgcccagaatccatccggggagagccaacctttggtgcagactgccgtcacaaatatcgaccgcccaaagggcctggctttcacggacgttgatgtggacagtatcaagatagcctgggagagcccacagggacaggtttcaaggtacagggtaacctacagctctcctgaagatggcatccatgagctttttccagccccagatggagaagaagatacagcagagctgcagggactaaggcccggaagcgagtacactgtctcagtcgtggcattgcacgacgatatggagtctcagccccttattgggacccagagcacagccataccagctcccactgacctcaaattcactcaagtcactcccaccagtttatcagcgcagtggaccccacctaatgtacaacttaccggttacagggtaagggtgactcccaaggaaaagaccggaccaatgaaggaaataaatctcgcgcctgattcatccagcgtagtcgtgagtggactgatggtggccaccaaatacgaggtcagcgtgtacgcactgaaagacacgcttaccagccgccctgcccaaggcgtcgtcacaacactcgaaaatgtgtcaccaccacggagggccagggttactgacgctaccgagacgacgatcactatatcatggaggacaaagactgagacaatcaccggttttcaggtggatgcagttccagccaacggccaaaccccaatccagcggactataaaaccggacgtgcggtcctacactatcacggggttacagccaggaaccgactacaaaatttacctatatacactcaacgacaacgcccgatcctctcccgtagtcattgatgcatccactgccattgacgcaccgtctaacctgcgattccttgcaactacacccaattccctgctggtgtcctggcaacctccgagagcgagaattacaggctacataattaagtacgaaaaacctggaagtccccctagggaggtggtccctcgtccccgtccgggagtgactgaggctaccataacagggctagagcctggtacagagtatacaatttacgtgatcgctctgaagaacaatcaaaagtccgagccgctgattggcagaaaaaagaccgatgagctgccccaactcgtcacactgcctcacccgaaccttcacggcccagagatcctcgacgtgccttcaaccgtgcagaagacaccttttgtgacacaccctggctatgacactggcaatgggattcaactgccagggacctccgggcagcagccgagcgtgggacagcagatgatctttgaagagcacggatttagacgcactaccccgccaactaccgccactcccataaggcacaggcctcgcccttatcctcccaatgtgggcgaagaaatccaaattggacatatacccagggaggatgtggattatcatctgtatcctcatggtcccggtctgaaccccaacgctagtaccggtcaggaagctctcagtcagacaaccatctcttgggcaccattccaggacacctcggaatacatcatcagctgccacccagtgggaacggacgaggaacctttacagtttagagttccaggaaccagcaccagtgcaaccctgaccggactcacacgaggagctacatacaatgtgattgtagaggcacttaaggatcagcagcggcacaaagtgagggaagaggtcgtcacagtaggcaatagcgtcaacgaaggcctgaaccagcccaccgacgactcatgtttcgatccctacacggtcagtcactacgccgttggggacgaatgggaaaggatgtcagaaagcggttttaagcttttgtgtcagtgcctaggttttggaagcgggcacttcaggtgtgactcgagccggtggtgtcacgataacggcgttaattataagattggagaaaagtgggatcgccagggcgagaatgggcaaatgatgagctgcacctgtctgggtaatgggaagggagagtttaagtgtgaccctcacgaggcaacctgctacgacgacggtaaaacctaccatgtgggcgagcaatggcaaaaggaatacttaggggctatttgttcatgcacgtgcttcggaggacagcggggttggcgttgcgacaactgccgtaggccaggtggggagccaagcccggagggaaccactggccaaagctataatcagtatagtcagcgctaccaccagagaacaaacactaacgttaactgccccatcgagtgcttcatgccactcgatgtccaggcagatcgtgaggattctcgggagtac

SEQ ID NO: 28700 - DNA, 6723 bp, synthetic construct
  misc_feature 1..6723: note = Description of Artificial Sequence: Synthetic coding sequence
  source 1..6723: mol_type = other DNA
atgctgcggggtcctggaccgggacttctgttgctcgcggtccagtgtctggggacggccgttccgtcgacaggggcatctaagagcaaacggcaggcgcaacagatggttcagccacagtcacctgtcgccgtgtcccaatccaaacccggatgctacgataacggaaaacattatcagataaatcagcagtgggaacgcacttatctaggcaatgccctcgtgtgtacgtgctacggcggatcacgcggtttcaactgcgaaagcaaacccgaggccgaagaaacgtgttttgacaaatacaccggcaatacttaccgagtcggtgacacctacgagcggcctaaggactcaatgatttgggactgcacttgcatcggagcgggtaggggtaggatctcatgcaccattgcaaacagatgtcacgaaggcggtcagtcttataagatcggcgatacatggagacggcctcatgagacaggcggatatatgttagagtgtgtgtgcttgggaaatggaaaaggggaatggacatgcaaacccattgcggagaaatgctttgaccacgcggcaggaacatcctacgttgtgggtgaaacctgggaaaaaccatatcagggttggatgatggtcgattgtacctgtttgggcgaagggagtgggcgaattacatgtaccagccgaaacagatgcaatgaccaagatacaaggactagctaccggatcggggacacctggtccaagaaagacaatcggggaaacctcctccagtgcatttgtacagggaatggtcgtggggaatggaaatgcgagaggcatacaagcgtccagaccacttcaagtgggtcgggaccattcacggacgttcgagctgctgtgtaccagccccagccacatccccagcctcccccttacggccattgtgtgactgatagcggtgtagtgtatagcgtggggatgcagtggttaaaaacccaagggaacaaacagatgctgtgcacttgcctcgggaacggggtgtcatgtcaagagacggctgtgactcagacctacggagggaattccaatggtgagccctgcgtcctgccattcacctacaacggccgtaccttctactcctgcacaactgaaggaagacaggatggtcatctgtggtgcagtactaccagcaactacgaacaggaccagaagtactcattttgcacagaccacaccgtgttggtgcagactcggggagggaacagcaatggcgctctctgccactttccattcttgtataataaccacaattacaccgattgtacaagtgaaggccgacgcgacaatatgaagtggtgtgggactacccagaattacgacgctgaccagaaattcggcttttgccccatggccgcacacgaggagatatgcactacaaatgagggcgtgatgtaccgaatcggagatcaatgggataagcaacacgatatgggccatatgatgcgctgtacctgcgttgggaatggacggggtgagtggacctgcattgcatacagtcagctgagggatcaatgcatcgtcgacgacatcacctataacgtaaacgatacctttcacaagcgccacgaggagggccatatgctgaactgtacttgctttggtcagggccgtggacggtggaagtgtgacccagtagaccaatgccaagactcggaaaccggcactttctatcagataggcgacagttgggaaaaatatgttcatggcgtgcggtatcagtgctactgttatggcagaggcattggcgaatggcactgtcagcctctacagacttatccttcatccagtgggcctgtggaagtgttcattaccgagacaccatcccagcctaattcacatccaattcaatggaacgccccacaacccagccatatttccaaatatattttacgatggcgaccaaagaattcagtgggcaggtggaaagaggccacaattccaggtcacctgaactcatacaccatcaagggactgaagccaggagtggtatacgaaggacagttaatctctatacagcagtatggacaccaggaggtgactagattcgacttcaccacgacctctaccagcacccccgtgaccagcaataccgtgaccggagagactacccctttttcccctttggttgctacatctgaatccgttaccgagattactgcctccagttttgtggtcagctgggtcagcgcgtctgacacagtgagtggtttcagagtcgagtacgaattaagtgaagaaggtgatgaaccgcagtacctggatctcccttcaacggcaacgagcgttaacatcccagatctcctgccaggcaggaagtacattgtgaacgtctatcagatctccgaagacggagagcaaagtctaatcctttcaacatcccagactactgctccggacgctccacctgacaccaccgtggaccaggtggacgacacttcaatcgtcgtacgctggagccggccacaggcccctatcaccgggtatagaatcgtatattctcctagcgttgaaggaagcagcactgagcttaaccttcccgaaaccgctaatagcgttaccttgtctgacctacagccaggtgtacaatacaatatcacgatttacgctgtggaggaaaatcaggaatcgacccccgtggtgatacaacaggagacaaccgggactcccaggtcggataccgtcccctctccgcgtgacctgcaattcgtcgaggtgacagacgtaaaggtgacaatcatgtggactccccctgagagtgccgtgacaggctacagagtcgatgttattcctgtgaatctgcccggagaacacggccagcgactgccaatttcgagaaacacatttgctgaagtgactgggctctcacctggtgtgacctactacttcaaagtgtttgccgtgagtcatggtcgcgaaagtaaacctctgacggcccaacagacaactaaactggacgctccgaccaatctacagttcgtgaacgagacagatagtacagttctggttcgatggaccccccctagagcccagatcacaggatataggttgacagtggggcttacgagacgtggacagccgagacagtacaatgtgggccctagcgtgagcaaatacccactgagaaacctccagccggcatcagagtatactgtgagcctggtggccatcaaaggaaaccaggaatctcctaaagcgacgggcgttttcaccaccttgcagccgggatcttcgatacccccatataacactgaagtgaccgagacaacaattgtgataacttggacaccagcccctcgcattggatttaaacttggcgtgagaccgtctcagggcggagaggcaccgagagaggtgaccagcgactcaggcagtatcgtggtaagcgggctgaccccaggtgtggagtacgtgtacaccattcaggtgctgcgagacggccaggaaagggatgccccaatcgtgaataaggtagttactcctctctcccctcccacaaaccttcacctggaggcaaatcctgacaccggagtgctaaccgtgagctgggagcggagcacaactcctgacataacggggtacagaatcacaacaacaccgacaaacggtcagcaggggaacagtttagaagaagtggtgcatgcggatcagtcttcttgtacttttgataatctctctcccggactcgagtacaatgtttccgtgtacacagtgaaggacgacaaggagagcgtgccgatatcagacacaatcattccagcagtaccaccaccaacagatttgagatttacaaacataggccctgacaccatgcgagttacgtgggctccacccccttctattgacctgaccaacttcctcgtgcgctattctcctgtaaagaacgaagaagacgtggccgaactgagcatctctccgagcgataacgcagttgtgttgaccaacttgctaccgggaacagagtacgtggtatccgtgtccagcgtctatgaacagcacgagtcgaccccattgagggggaggcaaaaaacgggactcgactctccaaccggtatcgacttttccgacatcacagccaattccttcacagtgcactggatcgcacccagagcgactattactggctatcggatcaggcaccacccggagcacttcagtggtcggcctcgtgaggacagggtgccccattcccgaaatagcatcaccctgactaatttgacccctggcactgaatacgtggtttctattgttgcgttaaacggacgggaggaatcacccttgctcatcggacagcagtctaccgtgtctgacgtgcctagagaccttgaggtcgtggcagccacaccaacgtcccttctgatttcttgggatgccccagcggtgactgtgcgctactacaggattacctacggcgaaaccggaggaaattctcctgttcaggaattcaccgtgccagggagcaaaagtaccgcaacaattagtggtctcaaacccggagtggattacacaataacagtgtatgcggtcaccggtaggggggacagtcctgcctctagcaaacccatttccatcaactatagaacagagattgacaagccctcacagatgcaggttactgatgtgcaggacaattcgattagcgttaaatggcttcctagctcatctcctgtgactggttatcgggtcaccactactcccaaaaatggccctggcccaaccaaaaccaaaaccgctggcccagaccagaccgaaatgacaattgagggactgcagcccacggttgaatatgtggtaagtgtctatgcccagaatcccagcggagagtcacagcctctggtgcagaccgctgtcaccaccatccctgctccaactgacctgaagttcacacaagtcacccccacttcactctccgctcagtggactccccctaatgtgcagttaacgggctaccgagtccgggttacgccgaaggagaagactggacctatgaaagagatcaacctggcacccgacagctcttctgtagtggtgagcggcttaatggtggctacaaagtacgaagtgtctgtatatgccctgaaagatacactcacatcgagacctgctcagggagtggttaccacattagaaaatgtttcgccccctcgcagggcgcgagttacagacgcaacagaaacaaccatcaccatatcctggcggacgaaaacagaaacgattaccggcttccaggtcgatgcagttccggcaaatgggcaaacaccaatccagaggactattaagcccgatgtgaggtcctacactattaccggattgcaacctggcactgactacaaaatctatctgtacacgctgaatgacaatgcgaggagcagtcccgtcgtgattgacgcctcaaccgctatcgacgctccatctaatttgcgatttctggcaaccacacccaattcactgctggtcagttggcagcccccacgagcgaggatcacaggttacattatcaaatatgaaaagcctgggagcccaccaagagaggtggtaccacgacccagacccggagttacggaggccacaatcacaggattagagcccggaaccgaatataccatttacgtcattgcactaaagaataaccagaaatctgagcccctgataggccgaaaaaagaccgttcaaaagactccgtttgtaacgcaccccggttatgataccggaaacggcattcagctccccggtacatccggtcagcagcccagtgtcgggcagcagatgatctttgaggaacatggcttcagaaggactacccctcctacaacggccaccccaatccggcatcggccacgtccatatccgccaaatgtggggcaggaagccttaagtcagacaacaatcagttgggccccatttcaggacacatctgaatatataatctcatgccacccagtcggcactgacgaggagccactccagttccgagtaccaggcacctcgaccagcgccacccttactggtctgactcgtggggctacatacaatgtgatcgttgaggcgctgaaggaccagcagcggcacaaggttcgtgaagaagttgtgacagtgggtaattctgtcaacgaggggctaaatcaacccacagatgatagttgttttgatccctacaccgtctctcactacgccgtgggcgatgagtgggaaaggatgagcgaaagcggctttaagctgctgtgtcaatgcctcggttttggtagcggtcacttccgctgtgacagcagccgctggtgtcacgataacggcgtgaactacaaaattggagaaaaatgggacagacaaggggaaaacggccagatgatgtcttgcacctgtctgggcaacggcaagggggaatttaaatgcgatcctcacgaggccacctgctatgatgacggcaagacctaccatgtgggggagcaatggcaaaaagaatatctcggcgctatatgcagctgcacctgcttcggcggacagagaggatggagatgcgacaactgccgccgtccaggcggtgagccatcccctgaaggcaccacgggtcaatcatataaccagtacagccagcgctatcaccaacgcaccaacacaaatgtgaattgtcctatcgagtgctttatgcccctcgatgttcaggccgacagggaagatagccgtgaataa

SEQ ID NO: 28701 - DNA, 1974 bp, synthetic construct
  misc_feature 1..1974: note = Description of Artificial Sequence: Synthetic coding sequence
  source 1..1974: mol_type = other DNA
atgctgcgcggacccggtcccggtttgctgctgctagcagtccagtgtcttgggaccgctgtccctagcactggggcttccaagtccaaaagacaggctcagcagatggtgcaaccacaatcaccagtcgctgtttctcaaagtaagcctggctgttacgataacgggaaacactaccaaatcaatcaacagtgggagagaacttatttgggtaacgcgctggtgtgtacctgctacggaggcagtcggggatttaactgcgagtcgaaacccgaagccgaagaaacctgttttgacaagtacaccggcaacacttaccgtgtcggagacacctatgaacgacccaaagacagcatgatctgggattgtacttgtatcggggctggcaggggtcggatctcctgcacgatcgccaaccgttgccatgaggggggtcagtcttacaagataggggacacatggcgccgtcctcacgaaacgggcggatatatgttggagtgtgtgtgtctgggcaatggcaaaggtgagtggacatgtaagccaatcgccgaaaagtgtttcgaccatgccgctggcacatcttacgtggtcggcgagacctgggaaaaaccataccaaggctggatgatggtggactgcacgtgtctcggagaagggagcgggcgtatcacgtgtactagtaggaacaggtgcaatgaccaagatactcgaacatcctacagaatcggagatacttggagtaaaaaagataatcggggaaacctcctgcagtgcatctgtaccgggaatggcaggggcgagtggaaatgcgaaaggcacaccagcgtacagaccactagctctggctcaggcccatttactgacgtgagagcagctgtataccagccccagccacaccctcaaccccctccctatggccactgcgtgacagatagcggagtggtatactcagtgggcatgcaatggctgaaaacccaagggaacaaacaaatgctgtgcacatgtcttgggaacggcgtgtcttgccaggagactgctgtgactcaaacatacggcggtaactctaatggggagccgtgtgtactaccattcacatacaacggcaggactttttactcatgcacaaccgagggaaggcaagacggacacctttggtgcagcactactagtaattacgagcaagaccagaagtactcattttgtactgaccataccgtgttggtgcagacacgcggaggtaatagtaatggtgccttgtgccactttcctttcttatataacaatcacaactacaccgattgtacctctgagggcaggagggacaatatgaaatggtgtgggacaactcaaaactatgacgcagaccagaagtttgggttttgtccaatggctgcccacgaggagatttgcaccaccaatgagggggtgatgtatcgcatcggcgaccaatgggacaaacagcacgatatggggcacatgatgcggtgcacctgcgtgggtaacggccgaggagagtggacctgcatcgcctattcacagttgcgggaccaatgcattgtggacgacattacttataacgttaatgacacattccacaagaggcatgaagaggggcacatgctcaattgtacctgtttcggacagggccgaggacggtggaaatgcgatcccgttgaccagtgccaggactccgagacaggcaccttttatcagatcggagacagctgggagaaatatgtgcatggcgtgagatatcagtgctattgttatggtagaggaatcggtgaatggcactgccagcctctccagacctacccaagctcgtctggtccagtggaggtattcatcacagaaaccccgtctcagccaaacagtcaccccattcagtggaacgcccctcagccttcgcatatctcaaagtatatcctgcgctggcgtccagtgagcatacctcctaggaacttgggatattag

SEQ ID NO: 28702 - DNA, 6804 bp, synthetic construct
  misc_feature 1..6804: note = Description of Artificial Sequence: Synthetic coding sequence
  source 1..6804: mol_type = other DNA
atgctgcggggtccaggtccgggactgctgctgcttgccgtccagtgcctgggtacagctgttccaagtaccggcgctagcaaaagcaaacgccaagcacagcagatggtccagccacagagtccagtggcagtgtcacagagcaagccaggctgctatgacaatggtaagcactatcaaatcaatcagcagtgggagcgtacttatctagggaatgccctggtgtgcacttgctatggcggatcacgagggtttaactgtgaatctaagcccgaggctgaagagacctgctttgacaaatacaccgggaacacatacagagtcggggatacgtacgagcggcctaaggatagtatgatttgggactgtacctgcataggagcagggcgaggcagaatcagctgtaccatcgccaaccgctgtcatgagggagggcagtcctataagatcggtgacacctggaggaggccccatgaaaccggcggatacatgctcgagtgcgtctgtttaggcaatggcaaaggcgaatggacatgtaaaccgattgcagaaaaatgcttcgatcacgcagcaggaacaagctatgttgtcggcgagacatgggagaaaccttaccaaggctggatgatggtggattgcacctgccttggggaaggatccggaaggatcacttgcacatcaagaaatcggtgcaacgatcaggatactcgcacctcttatcgtatcggagacacgtggagcaagaaagacaatcgaggcaacctgctccagtgtatctgcaccggtaacgggagaggagaatggaaatgcgagagacatacttcagtccagacaacaagcagcggcagcggcccattcaccgatgtgagagcagcagtgtatcagcctcagcctcaccctcagccacctccatatggacattgcgtcacagatagcggtgtggtgtactcggtcgggatgcagtggctgaagacacaggggaataagcaaatgctatgcacatgcttaggcaacggggttagctgccaggagacagctgtcacgcagacctatggaggtaattcaaacggtgaaccctgcgttctgcctttcacttataatgggcgaacattttactcatgcaccaccgaggggaggcaggatggccacctgtggtgttctaccacaagtaattacgagcaggaccagaaatattctttctgcacagatcacacagtactcgtgcaaacacgagggggtaactcgaatggagccctgtgtcattttccattcctttacaacaatcacaactataccgactgtactagcgagggccgaagggacaacatgaagtggtgcggcacgactcaaaactacgacgccgaccagaaatttggattttgtccgatggctgcccatgaggagatatgcaccacgaacgagggagtgatgtacaggataggcgatcagtgggacaaacagcatgacatgggccacatgatgcgttgcacatgtgtaggtaacggaaggggggagtggacctgcatcgcctacagccaactgcgggaccagtgtatcgtggatgatataacctataatgtcaacgacacatttcataagaggcatgaggaagggcacatgctgaattgtacttgtttcggccagggtagaggtcgctggaagtgtgatcccgtggaccagtgccaggactccgaaacaggcacattttaccagatcggcgacagctgggagaaatatgtgcacggtgttcgataccagtgttattgctacggcagaggaattggagagtggcattgccagccattacagacttacccatcttcctctggtccggtggaggtgttcatcaccgaaacgccctcacagccaaactcccacccaatacagtggaacgccccacagccatcacacatcagcaaatatatactgcgttggagacccaagaattctgtgggcagatggaaagaggctactatccccggacacctgaatagctatacaatcaagggactgaagcccggtgtggtgtacgagggccaattgatctccatccagcagtatggacaccaggaggtcacccggtttgacttcactacaacctccacgagtacacctgtcacctcaaacactgtgaccggggaaacgactcctttcagtcccctggtcgctaccagtgaaagtgttacagagatcacggccagcagtttcgtggtcagttgggtcagtgctagcgacacagtgagcggctttagagtggaatacgaactgagcgaagaaggtgatgaacctcagtacctcgacctgccgagtactgctacaagcgttaatatccccgacctgctcccaggtagaaagtatatcgtcaatgtctaccagattagcgaagacggcgaacagagcctaatactgagcacgtcccagacaacagcacccgacgctccaccggacaccacagttgatcaagtggacgatacttccatagtggtgcgttggtctaggcctcaggcccctattacagggtatcggatagtctatagtccgtccgtggagggaagttcaactgaactcaacctgccagagacggccaatagtgtgacattgtcggatctccaacccggagtacagtataatataaccatctatgccgtagaggagaaccaggaaagtacacccgttgttatccaacaggagacgactggcacccctcgaagtgatacagtgccaagccccagggacctgcagtttgtggaggtcactgatgtgaaagtgaccatcatgtggacaccgcctgagtctgcagtgacaggataccgggtggatgttatccctgtgaacctgccaggagagcacgggcagcggctgccgatttcaaggaatacgttcgctgaggtcactgggctttcaccaggcgtcacatactacttcaaagttttcgccgtgagccatggcagggagtccaagccattgacggctcagcaaacaacaaaactggacgccccaaccaacctgcagttcgtcaatgagacggacagtacagtgctcgtgagatggaccccacccagagctcagattaccggctataggctaacagtgggattaacacgtaggggacagcctcgccagtacaatgttggcccttcggtttctaagtatccgcttagaaatctgcaacctgcatctgaatacacagtgtcactggtggctatcaaaggaaatcaggagagccctaaagcaaccggcgtgtttacaactcttcaaccaggatcatcgatccctccctataacacagaggtcacagagacgaccattgtgataacctggactccggcaccccgaatcggctttaagctcggagtccgaccatcccaggggggagaagcaccaagggaggttacttctgactctggctctattgtggtatcgggcctaacccccggagtcgaatatgtgtatacaattcaagtcctcagagatggccaggagcgcgatgctcccatcgtcaataaagttgtgactccccttagcccacccaccaacctgcatctggaggcaaatcctgacaccggcgtgttgacagtatcctgggaaaggagcaccacacctgatatcaccgggtaccggattactacaaccccaacaaacggccaacaaggcaatagcctggaagaggtggttcacgccgatcaaagcagctgtacatttgataatctgagtccaggcctggagtacaatgttagcgtttatactgtgaaggatgacaaagagagcgtgccaatatccgacactatcatcccagaagtgccccagttgacggatctgtcatttgtggacatcaccgattcgtctatcggcctgagatggaccccgttgaactccagtactattattggttataggattacggtggtggccgcaggggagggaattcccatctttgaggattttgtcgatagttctgtcggatattataccgtgacggggttagagccaggcattgactacgatatatctgtgatcacacttatcaatggaggtgaaagtgctccaaccacgttgactcagcagactgctgtgcctcccccaacggatctgcgcttcacaaacatcggcccagatactatgcgtgtaacctgggctcccccaccttctattgacctgacaaattttcttgttcgctactcccccgtgaagaacgaggaggatgttgcagagctgagtatctcaccatccgacaatgccgttgtccttacgaacctgttgccagggactgaatacgtggtgagcgtgtcttccgtatacgagcagcatgaaagcacgccccttcgaggcaggcagaagacaggcctggattcacctactggaattgatttcagcgacatcacagctaacagttttacagtgcattggattgcccctagagctaccatcacagggtaccgtattcggcaccacccggaacatttcagtgggagacctagggaagatcgtgtgccccacagcaggaattcaatcaccctgacaaacttgacacccggaactgaatatgttgtgtccattgtggctctcaacggcagagaggagtcacctttgctgatcggacagcagagtactgtgtcggacgttcctcgggacctagaggtggtggctgccaccccaacgtccctgcttatctcctgggacgccccagctgtgactgtccggtattatcgcattacatatggggaaaccgggggtaattcgccagttcaagagtttacagtgccaggatctaagagtactgccacaataagcgggctgaagccaggggtcgattacacaattactgtgtacgctgtcacgggcaggggggactcacccgctagctctaaaccgatcagtattaactacagaaccgaaattgataaaccatcccagatgcaagtcactgatgttcaggataattcaatttcagtgaaatggttgcccagtagcagcccagttaccggttaccgggtgactacgacaccaaagaatggtcctgggcctacgaagactaaaacagccggtcccgaccagactgaaatgaccattgagggcttgcagcccacagttgaatatgtagtgagcgtttatgcccagaatcctagtggagaatcgcaaccgctcgtgcagactgccgtcaccacaatcccagcgccaacagacctgaagttcacccaggttaccccgacgtccctgtccgcccaatggaccccgccaaatgtgcaactaacggggtatagggtccgcgtgacaccaaaagaaaagactggtcctatgaaagaaatcaatctggcccctgatagttcttcagtggtagtcagtggactaatggtagcaaccaagtacgaagtgagtgtctacgctctgaaggacactctgacaagccggcctgcacagggagtggtcactacacttgagaatgtcagcccacctaggcgagcacgcgtgacggatgctacggaaactaccattaccattagttggcggacaaaaacggaaacaatcaccggatttcaggtcgacgcagtgccggcaaatggccagactcccatccagcggacaattaagcctgacgttcggagctacaccattacaggtctacagccaggtacagattataagatctatctgtacactcttaatgacaacgctaggtcaagccctgtggttatcgacgccagtacagccatcgacgcaccatctaatctccggtttcttgctactacaccaaatagcttgctcgtatcctggcagccacccagggccaggatcactgggtacattattaaatatgaaaagcctggctcccccccacgcgaagtggttccacggcctcgcccaggggtgaccgaggccacaatcaccggtttagagcccggaacggagtacaccatttacgtcattgccctgaagaataatcagaagagcgaacctctgattgggaggaagaaaactggtcaggaggcactgtctcaaacaactataagctgggccccattccaggatacctccgagtatatcatatcctgccatcccgtgggtacagatgaggagccccttcagttccgggtgccgggaacctccactagtgccacactgaccggactaacccgcggtgccacgtacaacgtgatcgttgaagccctgaaggatcaacagcgccataaggtgagggaggaagttgtgactgttggtaactcggtaaacgaaggtctgaaccagcctaccgacgattcttgtttcgatccctataccgtcagccactacgctgtaggggacgaatgggaaaggatgagcgagtccggattcaagcttctctgtcaatgtctgggattcgggtctggacattttaggtgtgatagctcgagatggtgccacgacaacggtgtgaattataaaatcggtgaaaaatgggaccgacaaggtgagaatggtcaaatgatgtcatgcacatgccttggcaatggtaaaggggagttcaaatgtgatccccacgaggcaacatgttacgacgacggaaagacataccacgtcggcgaacagtggcaaaaagagtacctaggcgcaatctgttcctgcacttgtttcggcggtcagagaggctggaggtgtgataactgtcgccgaccagggggtgaaccctccccagaggggacaacaggacagtcatacaaccaatattctcaacgttatcaccagcgtaccaacactaatgtcaactgcccaattgagtgttttatgcctctggacgtgcaggccgaccgcgaggactccagagagtac

SEQ ID NO: 28703 - DNA, 6798 bp, synthetic construct
  misc_feature 1..6798: note = Description of Artificial Sequence: Synthetic coding sequence
  source 1..6798: mol_type = other DNA
atgctgcgtggccctgggccagggctgttactcctggctgtgcagtgtctaggcactgcagtccctagcacaggagcttctaaatctaagagacaggcacagcaaatggtgcaacctcagtctccagtcgcagtgagtcaatctaagcccggatgttacgacaatggaaagcactaccaaatcaatcagcagtgggaacgaacgtatcttggcaatgctctcgtgtgcacctgctatgggggatctcgtggctttaactgtgaatcgaagcctgaagcggaagagacgtgtttcgacaagtacacggggaacacctaccgggtcggggacacttatgaacggccaaaggacagcatgatctgggattgcacgtgcatcggcgcaggtaggggaagaatctcttgtactattgctaatcgctgtcatgaagggggacagtcttacaagataggcgacacctggaggcgacctcacgagacgggcggttacatgcttgaatgtgtatgcttggggaacggcaagggggaatggacctgcaagcctatcgctgagaagtgtttcgatcacgccgcaggaacctcatacgtcgtgggagaaacgtgggaaaaaccgtaccagggatggatgatggttgactgcacctgcctgggtgaaggttccggacgcatcacgtgcaccagccgaaatcgctgcaacgaccaggatactcgcacctcctatcggataggcgatacatggtcaaagaaggataatcggggaaacctgttacagtgcatctgtacgggaaatggtcgcggtgagtggaaatgcgagagacacactagcgtgcagacgactagcagtgggtccgggcctttcaccgacgtgagggctgctgtttatcaaccacagccacatcctcagccaccgccatacggacattgcgtgacagattccggcgtggtgtatagtgtgggaatgcagtggttaaaaacccagggtaataaacagatgctgtgcacctgcctaggaaacggcgtgtcttgccaagagacagccgtgacccaaacttacggaggtaatagcaacggtgagccctgcgtgttgccatttacatataatggcaggactttttattcatgcactactgaggggaggcaggacggccacttatggtgtagcaccacttcaaactatgaacaggatcaaaagtattctttctgtaccgatcatacggttctggtgcaaacccggggagggaacagcaatggagccctgtgccacttccctttcctgtataataatcacaattataccgattgcacaagcgaaggcagacgagacaatatgaagtggtgtgggacaactcaaaactatgatgccgaccagaagttcggcttttgtccaatggcggcacacgaggagatttgcacaacgaacgaaggggtcatgtacaggatcggtgaccagtgggataagcagcacgatatgggccacatgatgagatgcacatgtgtggggaatgggcgtggagaatggacctgtatcgcttacagccagcttagagaccaatgtattgttgacgatatcacttataacgtgaatgacacctttcacaagagacacgaggagggccacatgctgaactgtacctgctttggccaaggcagaggtcggtggaagtgtgaccccgtggatcaatgccaagacagcgagaccggcacgttctatcaaattggagacagttgggaaaagtatgtgcacggcgtgcggtatcaatgctactgctatgggagaggaattggcgagtggcattgccagccactgcagacatacccgtcctcctccggtcccgttgaggtattcattactgaaactccaagtcaacccaattctcatccaatccaatggaatgcaccgcagcccagccatatctccaagtatatcctgaggtggagaccaaagaactctgtgggcaggtggaaggaggccacaattcctggccatctaaacagctacacaattaagggtctgaagcccggtgttgtctacgaaggccaacttatttccattcaacagtacggccaccaggaggtgactagatttgactttacgaccacttccacttccacccctgtgacaagtaatactgtcacaggtgaaactacccccttttctcccctggttgcaacaagcgagtccgtgacagagatcacggcttcaagcttcgtggtctcttgggtgtccgcatctgataccgtttcaggctttcgtgtggaatatgaactttctgaagaaggcgacgaaccccaataccttgacctgcctagcacagcaaccagcgtcaatatccccgacctgttgcctggcagaaaatacatcgtgaacgtgtatcagatatccgaggatggagaacagtccttgatcctctccactagtcagaccaccgccccagatgctcccccagacaccactgtggaccaggtggatgatacttctatagtggttaggtggtcacgaccgcaagcgcctattactggctacagaattgtgtattctcctagcgtagaaggcagtagcactgaactcaacctgcccgaaacggcaaactccgtcaccctctccgacctccagccgggagtgcagtacaacatcacgatttatgccgttgaagaaaaccaagaatccacacccgtggtgattcagcaggaaacgactggtacaccaagatccgataccgtgccaagccccagggacctgcagtttgtggaagtgacagatgtcaaagtgaccattatgtggactccaccagagtcggctgttactggctatagagtagatgtcatcccagtgaatcttcctggagaacacgggcagaggctcccaatcagcaggaacaccttcgccgaggtgacaggcctcagccccggtgtcacatattacttcaaggtctttgccgtgtctcacggtagagaatctaaacccctgaccgcccagcagaccactaagctggacgcccctacaaacctgcagtttgtcaatgagactgactccactgtactggttagatggacccctccaagagcacagatcaccgggtaccggctgactgtgggcctcactcgacggggacagcccaggcagtacaatgtagggccatctgtctcaaaatacccactccggaacctccagccagcttcagaatacacagtgagccttgtcgctatcaaaggcaatcaggaaagcccaaaagcaacgggggtctttaccaccttacagcccggatcctccatcccaccttataacaccgaggtaacagaaactaccattgtcatcacttggactcccgctcctagaatcggattcaagcttggagtaaggccgtcgcagggaggtgaggcccctcgggaagttacatccgatagcgggagcatcgtggtgtccggcttgacaccaggggttgaatacgtttacaccatacaggtgctgcgagatggtcaggaaagggacgctccaatcgtgaataaagtcgtgacaccgttatcaccacccacgaatctgcacctggaggcaaatcctgatacaggcgtgcttacagtgtcatgggaacgcagtaccactcctgacatcacagggtatagaataaccacaacccccacaaacggacagcagggcaatagcctggaagaggttgtgcatgctgaccagtcatcgtgcacatttgataacctgtccccaggtctggagtataatgtgtctgtgtatactgttaaagacgataaagaatccgtgccgatcagcgacaccattatacccgctgtgccccctcccacagatctgcggtttaccaacattggacccgacaccatgcgggtgacatgggctccacccccatccattgatctgacaaactttctcgtccggtactctcctgtgaagaatgaagaagacgtggctgaactgtcgatctccccatccgataatgccgttgtgttgactaatcttctcccgggaaccgaatacgtggtcagtgtgagtagtgtttacgagcagcacgaaagcactcccctacggggaagacagaagaccggtcttgacagtcctaccggaattgacttttccgacatcaccgccaactcgtttacagtgcattggatagccccacgcgctacaatcacaggctatagaatacggcaccatcctgaacactttagtgggaggccacgagaagatagggtgccacatagtcggaattcaattactctgacaaacctgaccccgggaacggaatacgtggtatccattgtggctctgaatggacgggaagagtcacctctcctgattggacagcagtcgaccgttagcgacgtacccagggatcttgaagtggtcgcagccactcccaccagcctgcttattagctgggatgccccagccgtgacagtcaggtactaccgtattacctacggtgaaactgggggtaattctcctgtgcaggagttcactgttccaggcagcaaaagcacagctaccatcagtgggctgaagcccggagtcgactacacaatcacagtctacgcggttaccggtaggggagactcgcccgcttcctctaaaccaatatctataaattatcgaaccgaaattgacaaacccagccaaatgcaggtgacagacgttcaggacaactccatatcagtcaaatggctgccgagctccagcccagttaccggctatagggttacaaccacacccaagaacggaccaggccctacaaaaaccaagaccgccggtcccgatcagacagagatgacgatcgagggcctccagcctacggttgaatatgtggtctcagtgtacgcccagaacccctcaggggaatctcaaccgctcgtccagactgccgtgacaactattcctgccccaacagatctgaagtttactcaggtcacccctacctcactgagcgcccagtggacccccccaaatgtgcagttgacaggctacagggtgagggtgactcctaaagaaaaaactggccctatgaaggaaatcaacttagcgccagatagctcctcagtggtggtgagtggtcttatggtggcgactaagtatgaagtttcagtttatgcacttaaggacactctgacaagccggccagcccagggggtggtgaccactctggagaatgtgtctccaccacgcagggctagagtgacggatgctactgaaaccactataacgatttcgtggcgaacaaagacagagactatcacaggcttccaggtggacgcagttccagctaatgggcagacccccatccagcggactatcaagcccgacgtgcggtcttatacaatcacaggcctgcaacccggaaccgattataaaatatatctgtatacactaaacgacaacgccaggagcagtcccgtggttatcgacgcaagtacagcaattgacgcgccttcaaatctgcggtttcttgcgaccactccgaactcactactggtttcatggcagccccctcgggctagaatcactggctatatcatcaagtacgagaagcctggtagcccacctagagaagttgtgccgagaccaaggccaggcgtcacggaagccacaataacagggctcgagccgggaactgagtatactatctacgtgatcgctctgaagaacaaccagaaaagcgaacctcttatcggacgaaaaaaaacagacgaattgccccagttggtgacactaccacaccctaacttgcatggaccagagattctggatgtccctagcactgtacagaaaacaccctttgttacacatccgggttacgatacagggaacggtattcagctcccaggaactagtggtcagcagccttccgtcggacagcagatgatttttgaggagcatggtttcaggaggacaactccacctacaaccgctaccccaatcagacacagacctcggccttacccacccaacgtcgggcaggaagcactgtcccagaccacgattagttgggccccatttcaggatactagcgagtatattatcagttgccatcctgtgggcactgacgaagagcccttgcagttcagagtgccaggaacgtctactagcgcaactctgaccggtctgacaagaggagctacctacaatgttatagtggaggcgctgaaggaccaacagaggcataaagttcgggaagaggtcgtgactgttggcaattccgtgaatgaaggattgaaccagcctactgacgatagctgcttcgacccctacaccgtctcacattacgccgtcggtgacgagtgggagcgtatgtcagaaagcggcttcaagttactgtgtcaatgtctgggctttgggagcggccacttccgctgcgatagctctcggtggtgccacgacaatggtgtcaattataaaattggggagaaatgggaccggcaaggcgagaacgggcagatgatgtcctgtacatgcctggggaatgggaagggcgaattcaagtgcgacccgcatgaagcgacttgttacgacgatggcaaaacatatcacgttggcgagcaatggcagaaggagtacttaggggcaatttgctcctgcacttgtttcgggggacagagaggctggcgctgcgataactgtagacgcccaggcggagagccctcaccagagggcactacaggtcaatcctataatcagtattctcaacgctatcaccagcggacgaacactaacgtgaactgccctatcgagtgttttatgcccctggatgtgcaggctgatcgtgaggactcaagagaatag

SEQ ID NO: 28704 - DNA, 6993 bp, synthetic construct
  misc_feature 1..6993: note = Description of Artificial Sequence: Synthetic coding sequence
  source 1..6993: mol_type = other DNA
atgttaaggggacctggccctggtctgctcctactcgccgtccaatgccttggtacagccgtgccctcaactggggcttccaaatcaaagaggcaagcacaacagatggtacaaccgcagagtcctgtcgcagtgagtcaaagtaagcccggatgttatgacaatgggaaacattaccaaatcaaccaacagtgggaacggacctatctgggcaatgccttggtctgtacctgctatgggggtagcagggggttcaattgcgagtctaaacccgaagccgaggagacatgctttgacaagtacactggtaatacgtatcgcgtgggtgatacctacgaacgccctaaagacagtatgatttgggattgtacctgcatcggcgctggtcggggacggattagttgcacaatcgccaatcgttgtcacgagggcggacagagctacaagataggtgacacctggcgcagaccacacgagactggcggatacatgcttgagtgtgtgtgccttggcaacggcaaaggtgaatggacatgtaagcctatcgccgaaaagtgctttgaccacgctgctggcacaagctatgttgtgggcgaaacatgggaaaaaccctaccaaggttggatgatggtggattgtacttgcctgggcgagggatccggacgcatcacttgcactagccggaacagatgtaatgatcaggacactcggacttcgtatcgaataggggacacgtggagtaaaaaggacaatcggggaaaccttctgcaatgcatatgtacaggcaacggtcggggagaatggaagtgcgagaggcatacatccgtgcagactacaagctccggcagcggacctttcacagacgttcgcgcagctgtgtaccaacctcagccacacccccagccacctccatacggccattgcgtaacagactctggggtggtttactccgtcggaatgcagtggctcaagacacaggggaacaaacagatgctttgcacttgcctgggcaatggtgtgagttgccaggaaaccgctgtgactcaaacttacgggggtaatagcaacggtgaaccctgtgtacttcccttcacttataatggtaggacattctattcttgcaccaccgaaggacgacaagatggacacttgtggtgtagcacaaccagcaattatgaacaggaccagaagtacagtttttgcacggaccacacagtgctcgtacagacaagagggggaaactccaatggagcactgtgccacttcccttttctgtacaacaaccacaactataccgattgcaccagcgagggaaggagggacaatatgaagtggtgtgggactacacagaactatgatgctgaccaaaagtttggattctgccctatggccgcacacgaagagatctgcactaccaacgaaggcgtgatgtatcggattggtgaccagtgggacaagcaacatgatatgggccacatgatgcggtgcacgtgtgtaggtaacggcagaggcgagtggacttgcattgcctattctcagctccgggatcaatgcatcgtggatgatattacctacaacgtcaacgataccttccacaaaagacacgaggaaggccatatgcttaattgtacctgctttggccagggcaggggcaggtggaaatgcgacccggttgaccaatgccaggacagtgaaaccggaaccttttatcagattggcgatagttgggaaaagtacgtgcatggtgtaagatatcagtgttattgttatggtagaggcatcggagagtggcactgtcagcctctgcagacctacccaagctcttctggtcctgttgaggtcttcatcacagagactccctctcagcccaatagccatccaattcagtggaatgccccacagcctagccacatatctaaatacatcttgcgctggagacctaagaatagcgtgggacggtggaaggaggcaaccatccccggacatctgaacagctacaccatcaagggattgaaacctggagtggtgtatgaagggcagttaatcagtatccagcaatacggccatcaggaggtgactagatttgacttcaccaccacgtcaacctcgactcccgtaaccagtaatacagtaaccggagagaccacccctttttctcctctggtcgcaacttctgaaagtgtgacagagatcacagcgtcatcctttgtggtgagctgggttagcgctagcgatactgtttcagggttccgcgtggagtacgagctgtctgaagagggggatgagcctcagtacctcgacctgccaagtactgcaaccagtgttaacattccagacctgttgcccggacgaaagtacatagtgaacgtgtatcaaatcagtgaggatggagagcagagtctgatcttatcaacctcccaaacaaccgccccagatgcccctcccgacacgacagttgatcaggtcgacgatacatccattgtggtgagatggagtcggcctcaggccccaattacgggttacagaattgtatactccccgagtgttgaagggtcctctactgagttgaacctgccagaaacagccaattccgttaccctaagcgatttgcagcccggtgtccagtacaacatcacgatctacgcggtggaagaaaatcaagagagtaccccagttgtgatccagcaggagacgaccggcacccctcgcagcgacacggtgcctagtccaagagacctgcagtttgtcgaggtaactgacgtgaaggtaaccattatgtggacaccgcctgagtcagccgtgacgggataccgggtggatgtgattcccgtcaaccttcctggcgagcatggccagcggctgcctatatcccgtaacacatttgcagaagtgacaggactcagtccaggcgtcacatactactttaaagtctttgctgtatcacacggacgcgaatcgaaacccttgacggcacagcaaacaaccaagctcgatgccccaaccaatttgcagtttgtgaacgagacagacagcacagttttggttagatggacacccccaagggcacagatcacaggatatcgactcactgttgggctgacacgcagggggcagcctcgacaatacaatgtgggcccttccgtgagtaaatacccactgcgtaaccttcaacccgcatccgagtacacagtttccctggttgcaatcaagggtaatcaggagtctccaaaggccacaggcgtattcacgaccctccaacccggttccagtatacctccatataacaccgaagtgaccgagaccacgatcgtgattacatggactcccgcacccagaatcggttttaagctcggggtgcgccctagccaaggcggtgaagcacccagggaagtgacaagcgattctggcagcatagttgtgtccggtctaacaccgggagtggagtacgtatacacaatccaggtgctgagagacggccaagagcgagacgcacccattgtaaataaggtggtgacccccctctcgcctcctactaatttacacctcgaggccaacccagacactggcgtactcaccgtatcatgggagaggtcaacgactcccgatatcaccggctatcggattaccacgactccaacaaacggtcagcaggggaattctttggaggaagtcgtacacgctgaccagagttcatgcacgttcgataacctgagcccaggactggagtacaacgtgtcagtgtacaccgtcaaggacgataaggagtcagtccctatttctgatacaattatcccggcagtccctccaccaacagatctacgtttcacaaacatcggacccgatactatgcgcgttacttgggccccacccccatccatagacctgacaaattttttagtcagatacagccccgtcaagaatgaagaagacgtggcagagctgtcaatttctccatcggataatgccgtcgtgttgacgaatctcttacctgggacagagtacgtagtttcggtgagcagtgtgtatgagcagcacgagagtactccactgagaggaagacagaaaacagggttggattcaccgactggcatcgacttttctgatatcaccgctaattcattcaccgttcattggatagcgccacgcgctacgattaccggttatcgcatcagacatcaccctgagcattttagtggcagaccaagggaggacagggtgccacactcaaggaactctatcacactgaccaacctgactcccggaactgaatatgtcgtctccatagtggctctcaacggaagggaagaatcccctctgctgataggacagcagtctacggtttctgacgttcctagagaccttgaggtcgtagctgccacacctacgtctctgttaatcagctgggatgctccagcagtgaccgtgaggtattaccgcataacatacggcgaaacgggtgggaacagtccggtgcaagagttcactgtgcccggatccaagtccacagccactattagtggcctcaagcccggagtggattatacgatcacggtgtacgccgtcacaggcagaggggatagtccagcaagctcaaaacctatcagcataaactacagaacagagatcgacaagccctcccagatgcaggtaaccgatgtgcaggataacagcatatctgtcaaatggctgccttcttcatctcccgtcacaggataccgcgtgactaccacacccaagaatgggcctggtccaacaaaaacaaagactgctgggccagaccagaccgaaatgacgattgaggggctccagcccacagtggaatacgtagtatccgtctacgctcaaaatccgtctggggagagccagccattggtgcagacagccgttacaaatatcgatagacctaagggcttagcatttactgacgttgacgtggactctatcaagattgcttgggaaagtccacaaggacaggtgtcacgttaccgggtcacatatagttcacctgaggatggaattcatgagctctttccagcaccagacggcgaggaggacactgctgaattgcagggcctgcggcctggttcggagtacacggtctccgtggttgcattacacgatgacatggaatcccagcctctcatcgggacccagagcactgccattccagcacccacagatctcaagtttacacaggtgacccccacttccctatccgcgcagtggactccccctaacgtgcagttaactgggtaccgggtgagggtaacgccgaaagagaagactggacctatgaaggagatcaatctcgcccctgatagcagtagcgtggtcgtcagcgggctgatggtcgctactaagtatgaggtgtccgtctacgccctgaaggacacgctgacttcaaggccggctcaaggcgtcgtcactaccctcgaaaatgtgtccccgcctaggcgtgcacgcgtgactgacgcaaccgaaaccaccatcaccattagctggcggaccaagaccgagacgataaccggctttcaggtggacgctgttcccgcaaacggccagacacccattcagcgcactatcaaaccggacgtgcgcagctataccatcaccgggctgcagcctggtactgattataagatctacctctatactctgaatgataacgcacgaagtagtcccgttgtgattgacgcttctacagctattgacgctccttccaaccttcggttcctggccaccacccccaattcacttcttgtgagctggcagccaccaagagcccgaatcaccggttatatcatcaagtacgagaaacccggtagcccaccacgcgaggttgtaccaagaccacgacccggagtaaccgaagctacgattacaggcctcgaacctggcacagagtatacaatctacgtcattgccttgaagaataatcagaagtctgaaccgctgattggcagaaagaagactgtccaaaagaccccatttgtcacacatcccggttacgataccggcaacgggattcagcttcctggcacaagtggacagcagccgtctgtggggcagcaaatgatttttgaggagcacggattcaggcggacaaccccccctacaacggcaactcccattcgtcaccgtccgagaccgtacccccctaacgtgggacaggaggctttatctcagactaccatctcttgggcacccttccaggacaccagcgaatacattatcagttgtcatcctgtggggaccgacgaagagccccttcagttccgggtgccgggtaccagcacctctgccacactcactggcctgacccgtggagccacctacaacgtgatcgtcgaagcgctgaaggaccagcagcgccataaagttcgggaagaagtagtgaccgtaggcaactccgtcaacgaggggctgaatcagcccacagatgatagttgttttgatccctacaccgtatcccactacgctgttggggacgaatgggaacgcatgtcggaaagcggctttaagttactttgtcagtgtctgggattcggctcgggacactttcgatgtgattcctcacgctggtgccatgataacggtgtgaactacaagataggagagaagtgggaccgccagggagagaatggccagatgatgtcatgcacttgcctgggcaatggaaagggcgaatttaaatgcgatcctcatgaggccacatgttatgatgacgggaagacttaccatgttggagaacagtggcagaaggagtaccttggcgctatctgctcctgcacctgtttcgggggacagcgcggttggagatgtgataactgcagacgaccagggggagaacctagccccgagggaaccacaggacagtcttacaatcaatacagccagcgctaccaccagcgcaccaataccaatgtcaattgtccgatagagtgctttatgcctctggatgttcaagcggaccgggaggattcacgtgagtaa

SEQ ID NO: 28705 - DNA, 3312 bp, synthetic construct
  misc_feature 1..3312: note = Description of Artificial Sequence: Synthetic coding sequence
  source 1..3312: mol_type = other DNA
ctgaggtggacccctttgaacagcagcaccatcatcggttaccggatcaccgtcgtggcagctggagagggcatcccgatttttgaggacttcgtggactcttcagttggttactacaccgtaacgggcttggaacctggtatcgactacgacatttctgtgattactctgatcaacggtggggaatctgcaccaaccacgctcacccagcagacggccgtgcctccccctaccgacctcaggttcacgaacatcggtcccgatacgatgcgggtgacctgggcccctcctccgagcattgacctgaccaattttctagttagatactcacccgtaaaaaatgaagaggacgtcgccgagctgagcatcagcccatcagataatgcggtggtccttacgaatctgttgccgggtacagagtacgtggtgagcgtgagcagcgtgtacgagcagcatgaatctacgcccctgcgcggaaggcagaagacaggacttgattctcccacaggtattgacttctcagatataactgctaactccttcaccgtgcactggatagctccaagggctacaatcacagggtatagaatcaggcaccatcccgagcactttagcggtaggcccagagaggaccgggttcctcattcaagaaactcaatcaccctgacaaacctcactcctggcaccgagtacgtcgtgtctattgtggctttgaatgggcgagaggaatccccgttgttgatcggccagcagagcaccgtgagtgacgtacctcgagacttagaagtcgtcgccgcaacgcctactagtctgctgatctcctgggatgctccagccgtgaccgttaggtactaccggatcacatatggcgaaacaggagggaactcacccgtgcaagaatttaccgtgcctggatctaagagtaccgcaaccatatcaggcctgaagcctggcgtagactacaccattaccgtgtacgcagtgacaggcaggggagactcccctgcttctagtaagccaatatcaattaactatcgtaccgaaattgataagccctctcaaatgcaggtgactgacgtacaagacaattccatcagtgttaaatggctccccagctcctctcctgtcactggatatcgggtcacaacaacaccaaagaatggcccagggcctaccaaaacaaagactgccggacctgaccaaacggagatgaccatagaaggccttcagccgaccgtggagtatgtcgtgagtgtttatgctcaaaatccatctggagagagccagcccctggtgcagactgccgttaccactatccccgcacctacagacctcaagttcacccaggtcacccccactagcctgtctgctcagtggactccgccaaacgtgcaactcaccggatatcgcgtgagggtcacgcccaaagagaagaccgggccaatgaaagaaataaatcttgcacccgatagctcctcggtagtggtatctggtctcatggtggcaaccaaatacgaggtctctgtatacgcattgaaagacacacttacctcgaggccagcgcagggagtggttacaacactagagaacgtctctccccctagacgggcacgggtcaccgatgccacggagaccactattacgatcagctggagaacgaagactgagaccatcaccggcttccaagttgacgctgtgcctgccaacggccaaacgcccattcagcgtacaataaagcctgacgtgagatcctacaccattactggattacagccaggaacagattacaaaatatacctatatacccttaatgataatgctcgcagcagtccagttgtgatcgatgctagcactgcgattgatgccccaagcaatctccgattcttagccacgactcccaacagcctgctggtgagctggcagccccctcgggctcgcatcaccggttatataatcaaatacgaaaaaccaggctcaccgccaagggaagtggtccccagacctagaccaggcgtgactgaggccacaatcactggccttgaaccaggcacggaatataccatctacgtaatcgccttgaagaacaatcagaagagtgagcctctcatcggacggaaaaagaccgacgaactccctcaactggtgacactgccgcaccccaatttacacggacccgaaatccttgacgtgccaagtacagttcaaaaaacgccttttgtgacacaccctggctatgacacggggaatggcatccagctgcctggaaccagtggtcagcagccaagcgtgggacagcaaatgatcttcgaggaacacgggtttcggaggacaacacccccaactaccgctacccccattagacacagaccgagaccctaccccccaaatgttggcgaagaaatccagataggccacatccctagggaggatgtggactatcacctatatcctcatggacccggtctgaacccaaacgccagtactggtcaggaggctctcagtcagaccaccatcagttgggcccctttccaggataccagtgagtatataattagctgccaccctgtgggtactgacgaggaacccctacaatttcgagtccccggaacgagcaccagtgctacattgacgggcctgacacgaggcgcaacgtacaatgtgatcgtagaagcattaaaagatcagcagcgccacaaggtgagggaggaggtggtgacagtcgggaactcagttaacgagggactcaaccagccaacagatgactcatgcttcgacccctacaccgtaagccattacgctgtaggcgatgagtgggagcggatgagcgagagtggcttcaagctcctgtgtcagtgccttggctttggatcaggacacttccgctgcgactcatccagatggtgccacgacaatggtgtaaactataaaatcggagagaaatgggaccggcagggtgaaaacggccaaatgatgtcatgcacgtgcttgggaaacgggaaaggcgagttcaaatgtgacccacacgaggcaacctgttacgatgatgggaagacatatcacgtgggcgagcaatggcaaaaagagtaccttggggctatttgtagttgtacctgctttgggggacagcggggttggcgctgtgacaactgccgcaggccaggcggtgagccatcccccgagggaaccactggccagagttataatcagtattcacaacgttaccatcagcgcactaatacaaacgttaattgcccaatcgaatgctttatgccattggatgtgcaagctgatagagaagactccagggaatag

SEQ ID NO: 28706 - DNA, 312 bp, synthetic construct
  misc_feature 1..312: note = Description of Artificial Sequence: Synthetic coding sequence
  source 1..312: mol_type = other DNA
atgcccgtgtcggtgtcaagcgggagaactttccctaagcggggtcagacctgcgttgtgcattatacgggcatgttagaggacggcaagaagttcgacagttctagggaccgaaataaacctttcaaatttatgctgggcaaacaagaggttatccggggttgggaggagggagtggctcagatgtcagtcggacaaagggccaagcttactatctccccagactacgcctacggcgcaactggacatcccggaataatccctcctcacgccactttggtgtttgatgtagaactgctcaagctggagtag

SEQ ID NO: 28707 - DNA, 327 bp, synthetic construct
  misc_feature 1..327: note = Description of Artificial Sequence: Synthetic coding sequence
  source 1..327: mol_type = other DNA
atgggggtacaggtcgaaaccattagtcctggcgatggaaggacctttcctaagagagggcagacctgtgtcgtgcattatacgggcatgcttgaagacggaaaaaaatttgattcctcccgggatcgcaataaaccttttaagttcatgctgggaaagcaggaagtcattcgtggctgggaagaaggcgtggcccagatgtccgtgggtcaacgggctaagcttacaatatccccagattatgcctatggcgcaacagggcaccccggaatcatcccccctcacgctaccctcgtcttcgatgtggagctgctgaaactggaatag

SEQ ID NO: 28708 - DNA, 312 bp, synthetic construct
  misc_feature 1..312: note = Description of Artificial Sequence: Synthetic coding sequence
  source 1..312: mol_type = other DNA
atgcccgtgtcagtgagctcagggcgtacatttcccaagcgaggccagacctgtgttgtgcactacaccggaatgctagaggacggcaaaaagttcgactcttccagagacaggaataagccgtttaaattcatgttgggtaagcaggaagtcataaggggatgggaggaaggtgtggcccagatgtctgttggtcaacgtgccaagctgactattagcccggactacgcatatggggctaccggccatccgggtatcatccccccacatgcgaccctggtgttcgatgtggagctgctaaagctggaatag

SEQ ID NO: 28709 - DNA, 327 bp, synthetic construct
  misc_feature 1..327: note = Description of Artificial Sequence: Synthetic coding sequence
  source 1..327: mol_type = other DNA
atgggagtgcaggtggaaacaattagccccggtgatgggcgaaccttccctaagcggggacagacctgtgttgttcactacactggcatgttagaggacggtaagaagttcgactcaagtagagatcgtaacaaaccctttaagtttatgttaggtaagcaggaagtgattcgaggctgggaggagggcgtagctcaaatgtctgtgggtcagagagccaagctgacaattagccccgactacgcatacggcgctaccgggcaccccggtattattcctcctcacgccaccttggtgttcgacgtggagctcctgaagctggagtag

SEQ ID NO: 28710 - DNA, 279 bp, synthetic construct
  misc_feature 1..279: note = Description of Artificial Sequence: Synthetic coding sequence
  source 1..279: mol_type = other DNA
atgggggtccaggtcgagaccattagtccgggtgatgggatgcttgaggacgggaaaaaatttgattcatcaagagataggaataaacccttcaaatttatgctgggcaagcaggaagtgatcagaggttgggaggagggcgtagcccaaatgtccgtgggacagcgggcaaagctgaccatctccccagattacgcatatggggcaacaggacacccgggaatcatccccccacacgccacccttgtgtttgacgtggaactgctgaagctggaatag

SEQ ID NO: 28711 - DNA, 1143 bp, synthetic construct
  misc_feature 1..1143: note = Description of Artificial Sequence: Synthetic coding sequence
  source 1..1143: mol_type = other DNA
atggggattcagggactggccaaactgatagcagacgtggcaccgagtgctattcgggagaatgatatcaagtcgtatttcggacgcaaggtggcaatcgacgcttctatgtctatataccagttcttgatcgcagtgcggcagggcggtgacgtgttgcaaaatgaggaaggcgagacgacaagccatttgatgggcatgttctaccgtacaattcgcatgatggagaacgggataaaacccgtgtacgtcttcgatggcaaaccccctcagctcaagagcggtgaactggctaagaggtcagaaaggcgggctgaggccgagaagcagctacaacaggcccaggccgcaggtgctgagcaggaggtggagaaatttaccaagcggctcgtgaaagtgactaaacagcataacgacgagtgtaagcacttactcagcctcatgggcatcccatatttggatgcacctagtgaggcggaggcttcctgtgcggctctcgtgaaagctggcaaggtgtatgctgctgccaccgaggatatggactgcctgacattcgggtcaccagtgcttatgaggcacctgacagcttccgaggccaaaaaactgcccattcaggagtttcacctgagccggattctgcaggagttgggcctaaatcaggagcagtttgtggacctttgtatcctgctgggcagcgactactgtgaatccattcgcggaatcggaccaaaacgagccgtggacttgattcagaagcacaaaagcattgaagaaattgtcaggcgcttggatcccaacaagtaccccgtgcctgagaattggcttcacaaggaagctcatcaacttttcctcgagcctgaggtgctcgatcccgagtcggtggagctgaagtggagcgagcccaatgaagaagagttgataaagttcatgtgtggggaaaaacaatttagcgaggaacggatacgctccggagtcaaacgactaagcaaatccagacaggggagcacacagggcaggttggatgactttttcaaagtcactggtagcctgtcttccgcaaagagaaaagaaccggagcccaagggatccacaaaaaagaaagccaagaccggggcagctgggaaatttaagcggggaaaatag

SEQ ID NO: 28712 - DNA, 498 bp, synthetic construct
  misc_feature 1..498: note = Description of Artificial Sequence: Synthetic coding sequence
  source 1..498: mol_type = other DNA
atgggaattcaaggtctggcaaaactgatagctgacgtggccccatcagccattagggagaacgacattaagtcttatttcggacggaaggtggccattgacgcaagtatgagtatctaccagttcctaattgcagtgagacaagggggagatgtgctgcagaacgaagaaggcgagacaacctcgcacctgatgggcatgttctacaggaccatccgtatgatggaaaatggcatcaaaccagtatacgtgtttgacgggaagcctccacagctgaaatccggcgagctcgccaagagaagcgaaaggcgggctgaggcagagaagcagctgcagcaggcgcaggccgctggtgctgagcaggaagtggaaaaattcacaaagcgacttgtgaaggtgacaaagcagcacaacgacgagtgcaaacaccttttgagcttgatgggcattccctacctggatgcccctagcgaagccgaagcttcttgcgctgcgtag

SEQ ID NO: 28713 - DNA, 4017 bp, synthetic construct
  misc_feature 1..4017: note = Description of Artificial Sequence: Synthetic coding sequence
  source 1..4017: mol_type = other DNA
atggtaagctactgggataccggcgttctcctgtgtgctcttctttcctgtttgctgttgaccggatcttcttcaggatccaaactgaaagatcccgagctatccttgaagggcacccaacacattatgcaagccggacaaaccctgcaccttcaatgtaggggcgaggcagcacataaatggtcgctaccagagatggtttctaaagagagcgagaggctgagtatcactaagtcagcctgcggtaggaacggcaagcagttctgttccacgttaacgcttaacacggcacaggctaatcacactggattttactcttgcaagtatttggcagtgcccaccagcaaaaagaaagagactgagagcgcaatttacatttttatctctgacactgggcgaccattcgtagaaatgtactctgaaatccccgagatcattcacatgacagaagggcgagaactcgtgatcccttgccgcgtgacttccccgaatatcacagtaactcttaaaaagttcccactcgacactctaattcccgacggtaagagaatcatctgggacagccgcaagggttttattatcagcaacgccacctataaggaaataggactcctgacttgtgaggctacggtcaatggccacctttataagactaactatctcactcacaggcagacgaacaccatcattgatgttcaaatttccacgccacgccctgttaaattgctacggggacacaccctcgtgctaaattgtaccgccactacgcccctgaacactagagtccagatgacatggagctatcctgacgaaaaaaataagcgtgcatccgtgagacgcaggattgaccagtccaactcccacgctaacattttttatagtgtgctcaccattgacaaaatgcaaaataaggacaaagggctgtatacctgcagagtgcgatccggcccttccttcaaaagtgtgaacacctcggtacacatctacgacaaagcatttattaccgtgaagcatcgaaaacagcaagtgcttgagacagtggcagggaagcgcagctacagactgtcaatgaaagtaaaggcctttccgtcccctgaagtggtttggctgaaggatggactcccggcaacagagaaatcggccaggtacctcacccggggatactctctgattatcaaagacgttaccgaagaggacgctggcaattacacaatcctcttatccattaagcagagtaacgtttttaagaatttgactgcgacactgatagtgaacgtcaagccgcagatttatgagaaggcagtcagttcctttccggatcccgcactgtacccattgggctcccgccagatactaacctgtactgcctacggaatacctcagcctacaatcaaatggttttggcatccttgtaaccacaaccattctgaggctcgctgtgacttttgcagtaacaatgaagagtcatttattctggatgctgactctaacatgggaaacagaattgaaagcattacacagcgtatggctatcattgaggggaaaaacaagatggcaagcactctggtggttgcagattctcgaatatcaggcatctacatttgcattgccagcaacaaggttggtacagttggtagaaatatttctttttacataacggacgtaccaaatgggttccacgtaaacctggagaagatgcctacagaaggcgaggacctcaagctctcttgtaccgtgaataaattcctttacagggacgtgacatggatcctcctccgaactgtgaacaatcgcacaatgcattactccatcagtaaacagaagatggcaattacgaaggaacactccataaccctgaacctgacgattatgaacgtgagcctccaggactcagggacatatgcttgcagagcgcgaaatgtctacactggggaagagatccttcaaaaaaaagaaattaccatcagagatcaagaggctccctacttactcagaaatctatcagaccacaccgtggccatcagctcatctacaacccttgactgccatgccaacggggtgcctgagccacaaataacgtggttcaaaaacaaccataagatacagcaggaaccaggcatcatccttggcccagggagttccaccctgttcattgagcgcgtgactgaggaggatgagggagtgtaccattgtaaggcaactaatcagaagggctctgtggaatcatccgcctacctgactgtgcagggtacatccgacaaatctaaccttgagctaataacgctcacttgcacgtgtgtcgccgcaaccctcttctggctgttacttaccctcttcattcgtaagatgaaacgaagcagcagcgagattaagactgattacctgtccatcattatggatcccgacgaagtcccactggatgaacagtgtgagagactgccttatgatgcatcgaagtgggagttcgccagagaacgattgaaactgggcaaaagtctgggtcgaggggcatttggcaaagttgtacaggcatctgcctttgggatcaagaaatctccaacatgtcgaactgttgccgtgaagatgctaaaagaaggcgctaccgcgtcagagtacaaggccctgatgactgaactgaaaattctgacccacattggacatcacctgaacgttgtgaacttactgggcgcttgtactaaacaggggggacctcttatggtgatcgtagaatattgtaaatacggcaacctcagcaattaccttaagagcaaacgggatctgtttttcctaaataaggatgccgctctgcacatggagcccaaaaaggaaaagatggaacccggattggagcaggggaagaaaccaagactagactcggtaaccagcagtgagtcgttcgcctccagtgggtttcaggaagacaagagcttgtccgatgtggaggaagaggaagactccgatgggttctacaaagagcccataaccatggaggacctcatctcttactccttccaggtggcccgaggcatggaatttctctcatcccggaagtgcattcaccgcgacttggcagccaggaatattttactaagcgagaacaacgtcgtcaagatttgtgatttcggtctggctcgcgacatttacaagaatcctgactacgttcggaaaggggacactagattgccactgaagtggatggcccctgaatctattttcgataaaatttattctacaaaatcggatgtctggagctacggtgtcctcctctgggagatcttcagtctgggtggctctccttatcctggcgtgcagatggacgaagatttctgttctaggctcagagagggaatgcgtatgagggctcctgagtactcaacgcccgaaatctaccaaatcatgttagactgctggcatcgcgaccccaaggagcggcctagattcgcggagctggtagaaaaactgggtgatctactgcaggcaaatgtgcagcaggacggcaaagactacatccccattaacgctatccttacgggcaactccggttttacttattcgacccccgctttcagtgaggatttctttaaagagtccatctcggctcccaaatttaacagcgggagctcagacgatgtgcggtatgttaacgctttcaaatttatgtccctggagcggatcaaaacctttgaggaactgcttcccaatgcgacctccatgttcgatgactaccagggagacagtagtacattgttggcttcacctatgctgaaaagatttacctggactgattctaaacccaaggcatctttgaaaatagatctgagggtcacaagcaaaagcaaagagtcaggtttgagcgacgtgagccgcccaagcttctgccacagttcatgcggccacgtgtcagaaggaaagcggagatttacctatgatcacgctgaactggagaggaagatagcctgctgctcacctcccccagattacaactctgtcgtcctatactcaactcccccaatctag

SEQ ID NO: 28714 - DNA, 531 bp, synthetic construct
  misc_feature 1..531: note = Description of Artificial Sequence: Synthetic coding sequence
  source 1..531: mol_type = other DNA
atggtcagttactgggataccggagtattgctgtgcgcactcctgtcttgtttacttttgaccggctctagctcaggatcaaaactcaaagatccagaattaagtctgaagggtacccagcatataatgcaggccggacaaaccctgcatctgcagtgtaggggtgaagccgcacacaaatggagcctgcctgagatggtgtccaaagagagcgagcggctgagcatcaccaaaagcgcgtgcgggcgaaacgggaaacagttttgttctaccctaacactaaatactgctcaggctaatcataccggcttctactcctgcaagtatctcgccgtccctaccagtaaaaaaaaagagactgagagcgccatctatattttcataagcgacaccgggagacctttcgtggagatgtattccgaaattccagagattatccacatgactgaaggcagagagctagtcatcccttgcagagtgactagtccaaatatcacggtaacactcaagaaaaagaataagagagcctag

SEQ ID NO: 28715 - DNA, 1626 bp, synthetic construct
  misc_feature 1..1626: note = Description of Artificial Sequence: Synthetic coding sequence
  source 1..1626: mol_type = other DNA
atggtgtcttattgggacaccggcgtactgctgtgtgcgttgctatcttgcctgcttctgactggctccagtagtggctccaagctgaaggacccagagctgtccctaaaaggaacccaacacataatgcaggccggacagacgctgcatcttcaatgccgcggagaggcagcacacaagtggtcccttcctgagatggtgagcaaagagagcgagcgcctgagtataactaagagcgcttgcggcaggaatgggaagcaattttgtagcacattgaccctcaataccgcccaggcgaatcacacgggtttttatagctgtaaatacctagcagtgccaacctctaaaaagaaggaaactgagtcagcaatctacatcttcatcagcgatacgggtcggccatttgttgaaatgtactccgaaatccctgagatcattcacatgaccgaaggcagggaactcgtgataccatgccgcgtaacatcaccaaatatcacagtgacactgaaaaagttcccactggacacactgatccccgatgggaaaagaattatatgggattcgcggaaaggcttcattatctccaatgctacgtataaagaaattggactactcacctgtgaagccactgtgaacggccacctgtacaagaccaactatctgacgcataggcagacaaataccatcattgacgtgcagatctctacaccacggccagttaaacttttaagagggcacaccctggtgctgaactgcaccgccacaactccgcttaacactagggtgcaaatgacatggtcttatcccgatgagaagaacaagcgcgcttcagtgcggcgacggattgatcaatcaaactctcatgctaacatcttttattctgtcctgactatcgataaaatgcagaataaggataaaggactatacacgtgcagagtgcggtccggacccagcttcaagtccgtcaatacctcagtgcacatttatgacaaggctttcatcaccgtcaaacatcgcaagcagcaggtgctggaaaccgtcgccggaaagcgcagttataggttgagcatgaaggtcaaagcatttccgtcccctgaagtggtgtggcttaaagatgggctgcctgccactgaaaaaagtgcgaggtacctcacccggggatactcccttatcatcaaggacgtcaccgaggaggatgcgggaaattataccatccttttatctattaaacaatctaacgtatttaaaaatctaacagccacactcatcgttaacgtgaaaccccagatatacgagaaagccgtctcaagcttccctgaccccgcactctaccctctgggttcccgccagatcctgacgtgtactgcctatgggattccccagccaactatcaagtggttctggcacccctgtaatcataaccattccgaggctcgttgcgatttttgttctaataacgaggaatccttcatattggacgccgacagtaacatgggcaaccggatcgaatccatcacacagaggatggctattatcgaggggaaaaacaaactgcctccagctaactcgtcattcatgctccccccaacctccttcagctccaattactttcacttcttgccttag

SEQ ID NO: 28716 - DNA, 1671 bp, synthetic construct
  misc_feature 1..1671: note = Description of Artificial Sequence: Synthetic coding sequence
  source 1..1671: mol_type = other DNA
atgaaaaggagcagcagtgaaattaaaactgactacctctctatcattatggaccccgacgaagtgcctctggatgagcagtgcgaacgcctgccctacgacgcctccaaatgggaatttgcccgtgaacgcctcaagttgggaaagtctctaggtaggggtgccttcgggaaggtggttcaagcctcggcattcgggattaagaaatcacccacttgtcgaactgtagccgtgaaaatgctgaaggagggagccaccgcctctgaatacaaggcactaatgacagaactgaagatacttacccacataggccatcacctgaatgtcgttaatctcctgggcgcttgtaccaagcaaggcggtcccctgatggtgatcgttgagtattgtaaatacggaaatttgtctaattacctgaagagtaaacgagacctgttctttctgaacaaagatgcagccctgcatatggagccaaagaaggagaaaatggagcctggcctggagcaggggaagaaacccaggctggactccgtgacaagctcagagtcctttgcatcctcaggttttcaggaagacaaaagccttagcgacgtagaggaggaggaagattccgacggcttctataaggagcccatcacaatggaggacctgatttcgtattcttttcaggttgcgagaggaatggaattcctgagctcccgcaaatgcatccatagggatcttgctgcacggaacattctgctgtcggaaaataatgtggtgaagatttgcgactttggcttagcaagggatatttataagaatccggactacgttcgtaaaggggacacgagactgccattgaagtggatggctcccgagagtattttcgataagatctacagtaccaagtccgacgtctggagctacggcgtgcttctctgggagattttctcgctcggaggtagcccctaccccggtgtgcagatggatgaagacttttgttcccgtctgagggaagggatgagaatgagggcaccagagtactcaactccggagatctaccaaattatgctcgactgctggcatagagatccaaaagagagaccgcgattcgctgagctcgtggaaaagctgggcgatttgcttcaggccaatgtccagcaggacggaaaagactacatccctatcaacgccatcctcacggggaatagcggattcacatactcaacacccgcattttccgaggatttttttaaggagtctatctctgcacctaaattcaactcaggatcttcggacgacgttagatacgtgaatgccttcaagttcatgtctttggagagaatcaagacctttgaggaattgctcccaaacgccacttccatgttcgacgactatcagggtgactcctccactttgctcgcctctccaatgttgaaaaggttcacctggaccgactccaaacctaaagccagcctgaaaatcgatctgcgggtgacgtccaaaagtaaagagtccggcttgagcgacgtatctcggccatcgttctgccatagctcttgcgggcacgtctcagagggaaaacgcagatttacctacgatcatgcagaactcgaaaggaagatcgcctgttgttctccacctcccgactacaattcagtggtcctttacagtacgccacctatttag

SEQ ID NO: 28717 - DNA, 45 bp, synthetic construct
  misc_feature 1..45: note = Description of Artificial Sequence: Synthetic coding sequence
  source 1..45: mol_type = other DNA
gaacttagcaacttcgagtgcctgcatccatgctctcaggaatag

SEQ ID NO: 28718 - DNA, 2202 bp, synthetic construct
  misc_feature 1..2202: note = Description of Artificial Sequence: Synthetic coding sequence
  source 1..2202: mol_type = other DNA
atggtttcatattgggacactggagtgctgctgtgcgcccttctatcctgccttcttctgaccggtagttcatccggcagcaaattgaaagacccagaactatctctgaaagggacccagcacattatgcaggcagggcagacattgcatttgcagtgtcgtggcgaagctgcccacaagtggtcactgcctgagatggtatcaaaggagtcggaacggctttctatcactaagtctgcatgtggtcgcaatggtaaacagttctgtagcacgcttactttgaacactgcacaagccaatcacacaggcttttattcatgtaagtacctcgcagttcccacttccaaaaaaaaagagacagaatcagcaatctatatctttatatccgacacaggcaggccatttgtggagatgtactctgagatcccggaaatcatccatatgacggagggcagggagctggtgattccctgccgggttactagtccgaacatcaccgtaaccctgaagaagttccctctcgacactctgataccagacggaaaaagaatcatctgggacagcaggaagggttttattatctcaaatgccacatataaagagataggattactcacttgcgaggccactgtgaacggccatctgtacaaaacgaattatctcacccaccggcaaacaaacaccattatagatgtgcaaatcagtactcccaggcctgtgaagctgcttcggggtcatacacttgtcctcaactgcacggcaaccacacctttaaatacaagggtgcagatgacctggtcgtaccccgatgagaaaaacaaaagggcaagcgtgagaaggaggattgatcagtcaaatagtcacgcaaatattttttattcagtcctgaccatcgacaaaatgcagaacaaggataagggtctctacacttgtcgcgtacgcagcgggcctagctttaagtccgtgaatacatccgtccacatttacgataaggccttcatcactgtgaaacacagaaaacagcaggtgctggagacggtggcaggaaaaagatcctatcgattaagtatgaaggtgaaagccttccctagccccgaggtcgtctggctcaaagatgggctgcctgcgactgaaaagtccgcccgatatctgacaaggggttactccctgattattaaggatgtgaccgaagaagacgctggcaactatacaatcttactgagtataaagcagagtaatgttttcaagaacctgactgctactctcatcgtcaatgtgaagccgcaaatctatgagaaggctgtctccagttttcccgaccccgcactgtaccccctggggagcaggcaaattctgacctgtactgcctatggaatcccccagcccacaatcaagtggttctggcatccttgcaaccacaatcacagcgaagcccgttgcgatttttgtagcaataacgaagaaagttttatactggatgccgactctaacatgggtaaccggatagaaagtatcacgcagcgtatggctatcatagaaggtaagaataagatggcctcgacgttagtcgtggcagattccaggatcagtgggatctatatttgcattgcctccaataaggtcggcacagtgggaaggaatatttcattttacattacggacgtgccaaatggattccacgtgaatctggagaagatgccaactgagggtgaagatctcaaactgtcctgtaccgtgaacaagtttctttaccgcgacgtgacctggattctgctgcgcacagtgaataatcgtactatgcattatagcatctctaaacagaaaatggccatcaccaaggaacacagtataaccctgaacttgacgatcatgaatgtttccctacaagacagcggaacatacgcgtgcagagcgagaaacgtgtacaccggagaggaaattctccagaaaaaggaaatcacaatcagggaccaggaggctccttacttactaagaaatcttagcgaccatacagtggccatttcctcatccacaacactggattgccacgcaaacggagtgcctgaacctcagattacatggttcaagaacaatcacaagatccagcaggagcccgaactatatactagtacttcgccttctagcagcagctcttctccactttcctcctcgagctcatcctctagtagctcctccagttag

SEQ ID NO: 28719 - DNA, 1086 bp, synthetic construct
  misc_feature 1..1086: note = Description of Artificial Sequence: Synthetic coding sequence
  source 1..1086: mol_type = other DNA
atgaattcagacctgctggtcgattccgacggcttctataaagagcccataactatggaggacctcatctcctactcctttcaagtggcacgaggcatggagtttttatctagtaggaagtgcatccatcgtgatctggctgccagaaacattttgttgtcagaaaataacgttgttaaaatttgcgacttcggactcgcaagagatatatacaagaaccccgactatgtgcgcaaaggcgacacacgactgcctctgaagtggatggccccagaatctatattcgataagatttattctacaaaaagcgatgtctggtcttacggtgtattgctgtgggagattttcagcctggggggatctccttacccaggcgtgcagatggacgaagacttctgtagcaggctgcgagaggggatgcgcatgagagctccagagtatagtacgcctgagatttatcagattatgctggactgttggcaccgagatccaaaggagagaccgagattcgcagagttggtcgaaaagctcggcgaccttctgcaagcgaacgtgcagcaagacggcaaagattatatacctattaacgcaatccttaccggaaacagcgggttcacctatagcacccccgctttcagtgaagatttctttaaggaatccatcagtgctcccaaattcaattcggggtcctctgatgatgtcagatacgtgaatgccttcaaatttatgtctcttgagaggatcaagacgttcgaagagttattacccaacgctactagcatgttcgacgactaccaaggagactcctccaccctgctggcctctcctatgctgaagcgattcacgtggacagactctaagccaaaggcgagtcttaagattgatctgcgcgtcacctcaaaatctaaagagagtggcctgagtgatgtgagccgcccttcattttgtcactcgagttgcgggcacgttagcgaaggtaaacggagatttacgtacgaccatgccgagctggagagaaagattgcctgctgcagccccccacccgattacaactctgtagtgctctattcaacccctccgatctag

SEQ ID NO: 28720 - DNA, 75 bp, synthetic construct
  misc_feature 1..75: note = Description of Artificial Sequence: Synthetic coding sequence
  source 1..75: mol_type = other DNA
ctgcctcctgccaattctagtttcatgctacctcctaccagtttttccagcaattatttccacttcttaccttag

SEQ ID NO: 28721 - DNA, 1062 bp, synthetic construct
  misc_feature 1..1062: note = Description of Artificial Sequence: Synthetic coding sequence
  source 1..1062: mol_type = other DNA
atggagttgaccgaactgctgttagtcgtgatgctgctgttgacagctcggctgacattgagctctccagcaccccctgcttgcgaccttcgcgtgctgtctaaactgctacgggatagtcatgttttgcactctcgcctgagccaatgtcctgaggtccatcccctgccaaccccagtcctgctccccgctgtcgatttttccctgggtgagtggaaaacccagatggaggagactaaggcgcaggatatcctcggtgccgtaacccttctacttgaaggggttatggccgcaaggggacagctcggcccaacttgtctgtcttctctgttaggacaattgagtggacaggtgagactgctactgggcgctctgcagtcattgcttgggacccagttgccgccacagggccgaaccaccgcccataaggaccctaacgccatttttctgtcttttcagcacctactcagaggcaaggtcaggtttttgatgctggtcgggggtagcaccctgtgcgtgcgcagagcacctccgactacagcggtgccctcccggacttccctggtgctcacactgaacgaactaccaaatagaacctcgggcctccttgaaacaaacttcacggccagcgcacgaaccactggctccggattattgaagtggcaacagggattcagagcaaaaatacctgggctgctgaaccagacgagtaggtccctggaccagatacctgggtatctgaaccgcatccacgagctattgaatggcacacggggtctctttcccggacctagccgcaggacgttgggagcccctgatatatcctctggcacatcagatacaggctccttgccacctaacctacagccgggttattccccgtcacccactcaccctcctaccggccagtacaccttgttccccttaccacccactctcccaacaccagtggtccaattacaccctctcctcccagacccatcagcccctacccccacaccgacttctcctctgctcaacacctcttacacccattctcaaaacctctctcaggagggctag

SEQ ID NO: 28722 - DNA, 537 bp, synthetic construct
  misc_feature 1..537: note = Description of Artificial Sequence: Synthetic coding sequence
  source 1..537: mol_type = other DNA
atgaccgtgcttgctcccgcatggtctccaaccacttatctgctgctgcttctgcttctttcgagcggcctcagcggtacacaggattgctcttttcagcacagccctatatcaagcgacttcgcagtgaaaattcgggagttaagtgactaccttctgcaggactaccccgtcaccgttgcctcgaacctccaagatgaggaattgtgcggaggactctggcgtctggttctggcacagcgctggatggagaggctaaagaccgtcgccggttccaaaatgcaagggctgttagaaagggtgaacactgagatccacttcgtgactaagtgtgctttccaacccccaccttcttgtctcaggttcgtccaaacaaatatttcccgtctcctgcaggaaacctctgaacaattagtggcccttaaaccatggattactcgtcaaaacttctccagatgcctggagttgcaatgccaacctgttgaaacggtcttccatcgcgtaagccaggacgggctggatctgttgacttcctag

SEQ ID NO: 28723 - DNA, 708 bp, synthetic construct
  misc_feature 1..708: note = Description of Artificial Sequence: Synthetic coding sequence
  source 1..708: mol_type = other DNA
atgactgtccttgcacccgcttggtcaccgaccacttatctgctgcttctgctactgctgtcctctgggttatctggcacacaggactgttcttttcagcactccccaatcagcagtgactttgcagtaaaaatccgggaactttctgattaccttctccaagactatcctgttacagtcgcgagcaatttacaggatgaagagctgtgcgggggtctgtggcggctcgttctggctcagaggtggatggagcggcttaaaacagtggctggcagcaagatgcagggcctcctggaacgggtgaacacagagatccattttgttaccaagtgtgcctttcagcctccccctagttgcctcaggttcgtgcaaactaacattagtcgcctgctgcaggagacgagtgaacagctcgtggctctgaaaccgtggatcaccagacagaatttcagccgctgcctcgagttacagtgccagcccgactctagtactctgcctccaccgtggtcacccaggcccctggaggcaacggcccctactgctcctcaaccacctctactgctgctactcctcctgcctgtcgggctgttgttactggccgctgcttggtgcttacattggcagaggacccgcagacgcacccctcgccctggggaacaggtgccgccagtccccagcccccaggacctgctgctggttgagcattag

SEQ ID NO: 28724 - DNA, 4092 bp, synthetic construct
  misc_feature 1..4092: note = Description of Artificial Sequence: Synthetic coding sequence
  source 1..4092: mol_type = other DNA
atgcagcgcggagccgctctctgcctccgcctctggttgtgcttggggctgctggatgggctggtttctggatactccatgacccctcccactctgaatatcaccgaggaaagtcacgtaatcgatactggtgactccttgtccattagctgcagaggccagcatccgcttgagtgggcatggccgggagcacaggaagccccagccacaggagacaaagacagcgaggacacgggggtcgtgagagattgcgagggtaccgacgctagaccctactgcaaggtcttgctcctgcacgaggtgcacgctaacgatacaggttcttatgtgtgctactataaatatatcaaggcgaggattgagggaactaccgccgcttccagttatgtgttcgtgcgggacttcgaacagccctttataaataagccagacactctcctggttaaccgtaaagacgccatgtgggtcccctgcctcgtttccataccagggctgaacgtgaccttacggtcccagtcttcagtcctgtggcccgacggccaggaggttgtgtgggatgatcggaggggtatgctggtatcaacgccattactacacgatgcactgtacctccagtgcgaaacgacttggggagaccaagatttcctgagtaacccattcctcgtgcacattacgggcaacgaactctacgacatccaactgcttccccgtaaatccctggagcttctggtaggagagaaactcgttctcaactgtacagtgtgggctgagtttaactccggggtcactttcgactgggattatccaggtaaacaggcagagcgaggcaaatgggtccctgaacggaggagccagcagacccatactgagctcagcagcattctcacaatccacaacgtctcacaacacgacttggggagctatgtttgcaaggccaataatggtattcagcggttcagggaatccactgaggttatcgtccatgagaatccatttattagcgtggaatggttgaagggccctatactagaggccacagccggtgacgagttagtgaagctaccagtcaagctcgcggcttacccacctcctgaatttcagtggtacaaggatggtaaggccctgtcgggtaggcactccccccatgctcttgtcctcaaggaggtgaccgaggcatcaaccggaacttatactctggcgctgtggaatagtgcagccggactccgacggaacatttcgctggagctcgtggtcaatgtgccccctcaaatccatgagaaggaggctagtagcccaagcatatacagcaggcacagcaggcaagctctcacctgtaccgcttacggcgtgcctctgccgctgtcaatacagtggcattggaggccttggacaccgtgcaaaatgttcgcccagcgaagcctgagaagacgccagcagcaggatctgatgcctcagtgcagagactggcgagcggtgactacacaggacgccgtgaacccaatcgagagtctggacacttggactgagttcgtggagggtaagaataagaccgtttctaagctggtaatccagaatgctaacgtctccgccatgtataagtgcgtggtttccaacaaggttggtcaggacgaaaggctgatctacttttatgttacgaccattccagacggctttactatcgagtctaaaccctctgaagaattgttggaagggcaaccggtgctgctctcttgccaggccgactcatacaagtacgaacacttacgttggtaccgcctaaacctcagcactctacacgatgcccacggcaatccacttttgctggactgtaagaatgttcatctgtttgcgacacctcttgcggcttccctggaagaagtggccccaggcgcaagacatgccaccttatctctttctatcccccgagtcgctccagagcatgagggccactacgtttgtgaagtccaagatcgcagaagtcacgataagcattgccacaaaaaatatctgagcgtgcaggctctggaagcccctaggctcacacagaatctgacagatctactcgtgaatgtgagtgacagcctggagatgcagtgcttggtggccggagcacacgccccatcaatcgtgtggtacaaggacgaacgccttctggaggagaaatcaggtgtggaccttgccgattccaaccaaaagttatccattcagcgcgtgagagaggaagacgccggtagatacctttgctctgtatgcaacgccaaggggtgcgtcaactcctccgcgtcggttgccgtggagggctcagaggacaaagggtccatggagatcgtgatattagtcgggacaggggtgattgctgtttttttttgggtcctgcttctattaatcttttgcaatatgcgacggcctgcccacgccgatattaagacgggctacctgagtatcatcatggatccaggggaagttccgttagaggagcagtgtgaatacttaagttacgatgcctctcagtgggaattcccacgggagaggctccatctcggtagagtgcttggatatggcgctttcggaaaggtcgtggaggcaagcgcctttggaatacataagggcagctcttgcgatacagtggccgtgaaaatgttgaaggagggggctaccgcaagtgagcatcgggctctgatgtcggagctgaagatcttgattcacattggtaaccatctgaacgtggtcaacctgctgggggcatgcaccaagccacagggtccgttgatggtcattgtggaattttgtaaatacggcaatctgagtaattttctcagggcgaaacgagacgccttcagcccatgtgcagaaaaatcccctgaacagcgaggcagatttcgcgctatggtagagctggcgaggctggacagacgcagaccagggtcttccgatcgcgtgctttttgcgagattcagcaagactgagggtggtgccaggcgggcatccccggaccaggaagcagaagatttgtggctgagccctttaactatggaagatctggtctgttacagttttcaggtagcgcgtggcatggagttcttagcttctcggaagtgcatccatagggaccttgcggcacggaatattctgctgtctgaatccgatgtcgtaaaaatctgtgactttggccttgccagggacatatacaaagatccagattacgttcgcaaaggatccgcacggctgccgctcaagtggatggcacctgagtctattttcgataaagtgtacactacccagagcgacgtttggagcttcggcgtcttgctgtgggagatctttagtctcggagcttccccttacccgggagtccagataaacgaggagttttgccagaggctgagagatgggacccgcatgagggccccagagctggcaactccggcaatcaggcgcattatgcttaattgttggtctggggaccccaaggcaaggcccgctttctccgagttagtcgagatcctgggggacctcctgcaggggaggggactccaggaggaggaggaggtgtgtatggcccctaggtccagccagtcttctgaggaaggctctttcagtcaggtgtccaccatggcccttcacattgcccaggctgacgcagaggattcacctccctccctgcagaggcatagcttagcagcacggtattacaactgggtcagctttccagggtgtctggccagaggagctgagaccagaggttcatcgaggatgaagactttcgaagaatttcctatgactcccactacatacaaaggctccgtggataatcagactgactcgggcatggtgctggcatctgaggagtttgagcagattgagagccgtcaccgacaagaatcgggcttctcctgtaagggtccgggtcaaaatgtggctgtgacgcgtgcccaccctgattcacagggtaggcggcgaaggccagagaggggagcacggggtggccaggtcttctacaactccgaatacggggaactgtcagaaccctcagaagaggatcactgctcgcccagtgctagagtgactttcttcacagacaattcgtattag

SEQ ID NO: 28725 - DNA, 2283 bp, synthetic construct
  misc_feature 1..2283: note = Description of Artificial Sequence: Synthetic coding sequence
  source 1..2283: mol_type = other DNA
atgttagtatcgactcccctgcttcatgatgccctgtatctgcagtgtgagaccacttggggagatcaggattttctgtccaatccattcctagtgcacattacgggaaacgagctttatgatatccagcttctcccaaggaagtccttggaactcttagtaggagagaagctggtactgaactgcacggtctgggccgagttcaatagcggtgtgacgttcgactgggactacccaggcaaacaggcagaacggggtaagtgggtacctgaacgcaggagccaacaaacccacaccgaactatcatctattctcaccatccataatgtatcccagcacgatcttggatcatacgtttgcaaggctaacaatggcatccagagattcagggaatccacagaggtcatcgtgcatgaaaatccctttatttctgtggaatggctcaaggggccaattttggaggcaacagcgggagatgaactggttaaactgcctgtgaagctggctgcctatccccctccagagttccagtggtacaaggacggcaaggctctcagcggcagacactctcctcacgctctggtattaaaggaagtgactgaagcgtccacaggcacatacacactagctttgtggaactctgcggcaggactacgacggaatatatcattggagctcgtggtgaacgttccaccgcagatacatgaaaaggaagcttcttctccatctatctactcacggcactccaggcaggcccttacttgcactgcatatggagtgcccttgcctctgtccattcagtggcactggcggccatggacgccctgcaaaatgttcgcacagagatctctgagacggaggcaacagcaggatctgatgcctcagtgtcgcgactggcgcgctgtgactacccaggatgccgtaaatccaatcgagagcttggacacctggacagagttcgtagagggcaagaataagactgtttctaaactggttatccagaacgcaaatgtgagcgccatgtataagtgtgtggtgtctaacaaggtcggccaggacgagagactcatttacttttatgtcactaccatccccgacggttttacaatcgagagcaagccgagtgaggagctccttgaaggacagccagtgctcctgtcttgccaagcagactcatacaaatacgagcacctgcgatggtacaggctgaatttgtccaccctgcacgatgcacacgggaatcccttactgctggactgcaagaatgtccatcttttcgcgacaccactggctgcgtcactggaggaggtagcaccaggcgcaagacacgccaccctctctctgtccatcccacgagtggcccctgaacatgaaggccattatgtctgtgaggtgcaggatcggcgttctcatgacaagcattgtcataagaagtatctgagcgttcaagctctcgaagccccacggctaactcagaatcttacagacttactggtgaacgtgtccgattctcttgaaatgcagtgtctggtcgcaggagcccacgcaccaagcatcgtgtggtacaaggatgagagattgctggaggagaagtctggggtagatctggcagactctaatcagaagctttctatacagagagtgcgtgaagaggacgcagggagatatctatgcagtgtttgcaacgccaaaggatgcgtgaattcatcggcctcagtcgctgtggaaggcagcgaggacaaagggtcaatggaaattgtgattctggtgggcaccggcgtgattgccgtcttcttttgggtgctgctcctgttaattttttgtaacatgcgacgacctgcgcatgctgacatcaagaccggctacctgtctattatcatggatcccggagaggttccccttgaagagcagtgtgagtacctttcgtacgacgccagccagtgggagttccccagagaaaggctgcatctgggaagggtcctgggctatggagcctttggtaaggtcgtcgaagctagtgccttcggtattcacaaaggaagctcttgcgacaccgtcgccgtaaagatgctcaagggtgtaggaagcgctggcggacgcggttccctagctggtgaagaacagcagctgggggtgggtcggtgggatggcaattccggaagggagacagaggctggtagccagtcacacccaaggttttacagggaagccgcaggttttagagctgaagggcctccagagcccccatcagtggggcctgccggatgtcctggcggaccatag

SEQ ID NO: 28726 - DNA, 3897 bp, synthetic construct
  misc_feature 1..3897: note = Description of Artificial Sequence: Synthetic coding sequence
  source 1..3897: mol_type = other DNA
atgcagcggggagcagctttgtgccttcgactctggttgtgtctgggcctcttggacggcttagtctcaggatacagcatgaccccccctacattaaacattacagaggaatcacatgtgatagataccggggactctctcagcataagctgtaggggccagcatcccctggagtgggcatggcccggagctcaggaggccccagcaacaggagataaagacagtgaagatacaggggtcgtaagggactgtgaaggaactgatgcgagaccttattgcaaagtgctcctgctgcatgaggtgcacgccaatgacaccggaagctatgtttgttattataaatatatcaaagccaggatcgagggcactacagccgcatcatcatacgtgtttgtgcgcgatttcgaacagccatttattaacaaacctgacacattgctggtgaatagaaaggacgcaatgtgggtgccatgtttggtttcgatccccggactgaatgtcacactacgcagccagtcttcagtcttgtggccagacgggcaggaagtggtgtgggatgatcgtagggggatgctcgtctccacccctctcctgcacgacgctctgtacctgcagtgcgagaccacatggggggaccaggatttcttgtcaaatccatttttggtacatatcaccggcaatgaactgtacgatatccaattactgccacgcaagagcttggagcttctggttggcgaaaagctcgtgttgaattgcacagtctgggcggaatttaactctggcgtgacctttgactgggactaccccggtaagcaggccgagcggggaaagtgggtcccagagagacggagccagcagactcacaccgaactgagttcaatcctgacaatacacaacgtgtcacagcatgatcttggaagttacgtttgcaaggctaataacggcatacagagattccgggaaagcacagaggtgatcgtgcacgagaatccctttatttctgtggagtggttaaaagggcctatcctggaggctactgcgggagacgagctagtgaagctaccggtgaaactggctgcctacccgccacccgaattccagtggtataaagacggcaaggccctgagcggtcgccactctcctcatgctctggtcctgaaggaagtaacagaggctagcacagggacctacacccttgcactctggaattccgcagccggactgcgacggaacatcagcctcgaactggtggtgaacgtccctccccagatccacgagaaggaagcttcctcccccagcatttatagtcgccacagtagacaagcacttacttgcaccgcctacggcgtaccactgccgctgtcgatccagtggcactggcgtccttggacaccgtgtaagatgttcgcgcagaggagcctgcggcgtcggcagcaacaggatcttatgccacaatgcagggactggcgagccgtgacaactcaggatgccgtgaaccctattgagagcctggatacttggaccgaattcgtcgaggggaaaaataagaccgtgtctaagcttgttattcaaaacgctaatgtctctgccatgtataagtgcgtagtctcgaacaaggtgggccaggacgaacgcctgatttatttttacgttaccaccattccagacggatttaccatcgagagtaaaccttctgaagaactgctcgaaggtcagcctgttttgctctcatgccaggccgatagttacaaatacgaacaccttcgatggtaccggttaaatttgtcaactctccatgatgcacacgggaatccactcctccttgactgcaaaaatgttcatctgttcgcgacacctttggcagcaagtttagaggaggtcgcccctggtgcccgtcacgcaactctttccttgtccatccctcgggtcgcgcctgagcacgagggccattacgtatgcgaggtccaggatcgaaggtcccacgataagcattgccacaaaaaatatctgtcagtgcaggccctggaagcacccaggctcacacagaacctcaccgacctcctcgtgaacgtttctgattctctggaaatgcagtgcctcgtggccggagcacacgccccaagtatcgtctggtacaaggatgagagattgcttgaagagaagtccggtgtcgacttggctgactccaatcaaaagctttccatccaaagggtccgcgaagaagatgccggaagatacctctgtagcgtatgcaacgcgaagggctgcgtcaactcctcagcaagcgtggctgtggagggttcagaggataaggggagcatggaaatcgtgatcttagtcggtacaggcgtgatcgccgtctttttttgggtgctcctgctgcttatcttttgcaacatgcgcagaccagcacatgcggatattaaaacgggctacctgtcgatcattatggaccctggagaagtgcccctggaagaacaatgtgaatacttgtcgtatgacgcctcccaatgggagtttccaagggagagactgcacctgggcagggtgttaggctacggggctttcgggaaggtggttgaagctagtgcctttggcatccataaaggaagctcctgtgatactgtggcagtgaagatgctgaaagagggagccacagcctcagagcaccgggctctgatgtcagagttaaaaatacttattcacatcggcaatcatctgaacgtcgtgaatctgctcggggcttgcaccaagccgcagggccctctcatggtgatcgtcgagttctgtaagtacgggaacctgtcaaacttcctccgcgcaaagcgggacgctttcagcccgtgcgcggagaagagccccgagcagcggggtcgcttccgggctatggtcgaactggctcgccttgatcgccgaagacctggatcgagtgaccgggttctttttgctagattctccaagactgagggtggggcacgcagagctagtccggaccaggaggcggaggacctttggttaagccctcttacaatggaagatctagtgtgctacagctttcaggttgctagaggtatggagtttctcgcgagcagaaagtgcatccaccgcgacctggccgcacggaacatcctcctgagtgaatcagatgttgtgaaaatttgcgatttcggcctggctagagacatctacaaggaccctgattatgtgcggaaaggaagtgctaggctcccactaaagtggatggcccctgagtccattttcgacaaggtttacacaactcaatctgatgtgtggtcattcggggtgctgctgtgggaaatcttctccctgggggcatcgccataccccggagttcagataaacgaggagttctgccagcggctgcgcgatgggacacgtatgcgtgccccagagctggctacgcccgctatccggagaataatgttgaattgctggagcggggaccccaaggcacgtccagccttcagcgaactcgtggaaatcctgggcgacctgctgcaaggtcggggtctgcaggaagaggaagaagtgtgtatggcgcctcgctcaagccagagtagcgaggagggatctttctcgcaggtcagcacgatggccctccatatagcacaggcagatgccgaagattcgcccccaagcctgcagcgtcactcattagcagccaggtactacaattgggtgtctttccccggatgtcttgcgaggggcgcagaaacccgagggtccagtcggatgaaaacctttgaagagtttcccatgacaccaacgacatacaagggttccgtcgacaatcagacagatagcggtatggtgctcgcctccgaggagtttgaacagatcgaatcaagacaccggcaagaatccggatttcgttag

SEQ ID NO: 28727 - DNA, 3921 bp, synthetic construct
  misc_feature 1..3921: note = Description of Artificial Sequence: Synthetic coding sequence
  source 1..3921: mol_type = other DNA
atgcaaagaggggcagccctctgtctgcgactttggctgtgcttaggccttttggatggcctcgtgtcaggatatagcatgacccctcccactctcaatattacagaggaaagtcatgtcatcgataccggagattccttgtcgatttcttgtcgaggccagcatcctcttgaatgggcatggccaggcgctcaggaagcgcctgctacaggcgataaggacagtgaagatacaggagtcgttcgggattgtgaaggaaccgatgctaggccttactgcaaagtactccttctgcatgaggtccacgccaatgatactgggagctatgtgtgctactacaagtatatcaaagccagaattgaaggcacgacggctgctagcagctacgtgtttgtaagggatttcgagcagccatttattaacaaacctgacaccctgcttgtgaaccggaaggatgcaatgtgggtcccttgtttggtgagtatcccaggactcaacgtgaccctacggtcccagtcctctgtgctgtggccggatggccaggaggtggtctgggacgatcggaggggcatgttagtaagcactccccttcttcacgatgccctctaccttcagtgtgaaaccacctggggcgatcaggacttccttagtaacccatttttggtacatataaccggcaatgagctctacgatatccagctgttgccgagaaaatctctggagctcttagttggggaaaagctcgtgctgaactgtacagtctgggcggagtttaacagtggggttacgtttgattgggattacccagggaagcaggccgagcgaggcaagtgggtccctgaaagaagatcacagcaaacacacaccgagttgagcagcatcctcaccatccacaatgtcagccaacatgacttaggaagttacgtctgtaaggccaataatgggattcagaggtttagagaatccacagaggtgattgtgcacgagaatccttttatcagtgtagagtggctgaagggcccaatattagaggcgacagctggcgacgagttggtgaaactcccagttaagctggcagcctacccaccccctgagttccaatggtacaaagacggtaaggccttatccggaaggcactctccccacgcgctcgtgctaaaggaagtgactgaagcgtccacaggcacatatacactggccctgtggaactcggccgctggcctaaggcgcaatattagtctggaactcgtggttaatgtgccgcctcaaatccatgagaaagaagcgagctcaccgagcatctactctcggcacagccgtcaggcgctcacatgtactgcctacggcgtgcctcttcccctgtcaatccaatggcattggcggccatggactccttgtaaaatgttcgcacaaaggtcgctgagacgcagacagcaacaagatctaatgccccagtgcagagattggcgggctgtgacaacccaggacgctgtcaacccaatcgaatccttagacacttggacagagtttgtggaaggaaaaaacaaaaccgtttcgaagctggtgatccagaacgcaaatgtgtccgccatgtataagtgcgtggtgtctaacaaggtgggtcaggatgagaggctcatttacttctacgtgaccacgattccagatggattcactatcgagtcaaaaccctctgaggaactcctggaaggacagcctgtgcttctgtcctgccaagccgacagttacaagtacgagcaccttaggtggtacaggctgaatctgagtaccctccacgacgcgcacggcaacccactcctgctagattgcaaaaacgtccatctgtttgctacaccccttgcggctagcctcgaagaagtggccccaggagccaggcacgctacactttccctgtctatcccgagagttgcccctgaacatgaaggacattatgtgtgtgaggtgcaggatcggaggtcgcatgataagcactgccacaaaaagtacctgtcggtgcaggccctggaggccccaagactcacccagaatctgaccgatctcttagtgaatgtgtccgactctctggagatgcagtgccttgtggctggagcgcacgctcctagcattgtgtggtacaaagacgaaaggctgctggaggaaaagtccggagttgatctggccgattcgaatcagaagttgtccatccagagggtacgggaagaagatgccggacggtacctgtgcagtgtatgcaatgctaaaggttgcgtgaactcctcggcatctgttgcagttgagggttcggaagataaaggaagtatggagatcgtcattctggttggaacaggcgtaatagctgtgtttttttgggtcctgctcctgctgatattctgtaacatgcgcaggccggcacatgcagatattaaaacaggataccttagtatcattatggaccccggagaggttcccctggaggaacagtgtgagtacctcagttacgacgcttcacaatgggaatttcccagagaacggttgcatctgggccgagttcttggatatggtgccttcggcaaagtggttgaggccagtgcctttggcattcataaagggagctcctgtgataccgtggctgtgaagatgctgaaggagggcgctacagcctcggagcaccgagccttgatgtccgaattgaaaattctcatacacataggcaaccatttgaatgtggtaaatctgctgggggcatgcaccaaaccccagggccctctgatggtgatcgtggagttttgcaagtatggcaacttatcaaacttcctaagagccaagcgggacgctttctcaccttgcgctgagaagtcgcccgagcagaggggtcgattcagggctatggtagagcttgcccgtctagatagaagaaggcctgggtctagcgatcgggttcttttcgcacgcttttctaagacagaggggggagctaggcgtgcctcccccgaccaggaagcagaggacctgtggctgtcgccactcactatggaagatctggtttgttattcattccaggtcgcaagaggtatggagttccttgcgagccgaaaatgcatccatcgggacctagccgctcggaacatcctgctaagcgaatctgatgtagtgaagatctgcgactttgggctggccagggacatttataaagacccagactatgtgcgcaagggtagcgcccgattacccttaaaatggatggcccctgagtccattttcgataaggtgtataccacccaaagtgatgtgtggtcattcggcgtccttttgtgggagattttctccttgggagcgtcaccttatccaggagtacagatcaatgaagagttttgtcagagattaagagacggtaccaggatgagagcccctgaactggccaccccggcaatccggaggatcatgcttaattgctggtcaggggacccaaaggcccgacccgcattcagcgaactcgtagagatattaggcgacttgcttcagggccgtgggctgcaagaggaggaagaggtctgcatggcacctcgcagcagccaaagcagcgaggagggcagtttcagtcaggtgagcacaatggcgctgcacatcgcccaagccgatgctgaggacagtcccccttctttgcaacggcactccctcgcagccagatattacaattgggtatcgttcccgggatgcctcgccagaggagccgagacaaggggtagttctcgtatgaaaaccttcgaagaatttcctatgactcctacaacatataaaggctctgtcgacaatcagacggactccggcatggtgctggctagcgaggaattcgaacaaatcgagtcaagacaccgccaggaatccggctttagaggcacacgcagaaccagaggcgcttag

SEQ ID NO: 28728 - DNA, 1740 bp, synthetic construct
  misc_feature 1..1740: note = Description of Artificial Sequence: Synthetic coding sequence
  source 1..1740: mol_type = other DNA
atgaacgccattgttgctctttgtcatttttgcgagttgcacggacccaggaccctgttctgtacggaggtacttcacgcgccattaccacagggagatgggaatgaagactctccaggccagggcgagcaagccgaggaggaagagggaggcatacagatgaacagccggatgcgcgcacatagtcccgcagagggggcttcagtggagagctcttctcctggcccaaaaaaatcagatatgtgcgaaggctgcaggtcgctggcggctggtcatcctggctacatttcccatgataaggaaacctcaattaagtacgtgtctcaccagcacccctctcatcctcagttattcagcatcgtcagacaagcgtgtgttcggagtttatcttgtgaagtgtgccccggtcgagagggccctatttttttcggcgacgagcaacacggattcgtgtttagtcatacgttctttatcaaagattcacttgctcgtggttttcagcggtggtatagcatcatcactatcatgatggacaggatctacttaattaacagctggcctttcctactcgggaaagtccgtggcatcatagatgagcttcagggcaaagctctgaaagttttcgaggcagaacaatttggctgccctcagagggctcagcggatgaatacggccttcacgcccttcttacaccagcgcaacgggaacgctgcccgatccttgacttctcttaccagcgatgacaacctctgggcctgtttgcatacatctttcgcctggttgctgaaggcctgcggttcccgactgacggaaaaattacttgagggagctcccacagaggataccctggtgcagatggagaagctggctgaccttgaggaggaaagtgaatcttgggacaactctgaggctgaggaggaggagaaggcgcctgtgcttcctgaatcaaccgagggaagagagctcactcaggggcctgcggaatccagtagtctgtctggctgtggctcatggcagccaagaaagctgccggtctttaaaagcctgaggcacatgagacaggtccttggcgcaccatctttccgcatgctggcctggcacgtactaatggggaatcaggttatttggaaatccagggatgtcgatctggtccagtcagcttttgaagtactgcgcactatgttgcctgtcggctgcgtccgaatcataccctactccagccagtacgaggaagcgtatcgttgcaatttcctcggtctatctccacatgtacagatccctcctcatgtgctctccagcgaattcgccgtgatagttgaagtacacgccgctgcaaggagcacactgcatcccgtcggatgtgaagacgatcagagtttaagtaagtatgaattcgtcgtgacatcagggagccctgtggctgccgatcgcgttggcccaaccatcttgaacaagatcgaggctgccctcacgaatcagaacttatctgtggatgtcgtggaccagtgcctcgtgtgtctcaaagaggaatggatgaataaggtgaaagttctgtttaagtttaccaaggtcgactcccgaccgaaagaagatacacagaaactgttgtctattttgggagctagcgaggaggataacgtgaaattgctgaagttttggatgaccggactgagtaaaacctacaaaagtcacctgatgtctaccgttcgctccccgaccgcctcagaatctaggaattag

SEQ ID NO: 28729 - DNA, 594 bp, synthetic construct
  misc_feature 1..594: note = Description of Artificial Sequence: Synthetic coding sequence
  source 1..594: mol_type = other DNA
atgaatgccatagtcgccctctgccatttctgcgagctacatgggccaagaactctgttttgtactgaggtgctccacgctcccctccctcagggtgacggcaacgaagattctcctgggcaaggggagcaagccgaagaggaagagggcggtattcagatgaacagtcgaatgcgggcacactcacccgctgaaggggcttctgtcgagagttcctcacctggcccaaaaaagtccgatatgtgtgaaggctgccggtcactcgctgcaggtcacccaggatatataagccatgataaggaaacctccattaaatatgtgtcccaccagcatccctcccacccgcaactgttctcaatcgtgaggcaggcctgcgtgaggtcactgtcttgcgaggtctccctggtcgcaaccgaaccagtgtcagtcggcgctcacatgctgcccggagcattggggggtctcggagcgtccattgcacagggcggtcgccactggtcttcgttgcgtgcagacccacagatatctacggctcaaggaaccggcaggctgccctgcccggagctaagggaggagagctgttggacctgctag

SEQ ID NO: 28730 - DNA, 1029 bp, synthetic construct
  misc_feature 1..1029: note = Description of Artificial Sequence: Synthetic coding sequence
  source 1..1029: mol_type = other DNA
atgaacgctattgtggccctatgccatttctgtgagctgcatggtccacgaaccctgttttgtacagaggttctgcatgccccactgccccagggagacggtaacgaggatagtccaggacagggtgaacaggcagaggaagaagaagggggtattcagatgaacagtcggatgcgcgctcacagccctgctgagggcgcatccgtagagtcctcgtctcccggtccaaaaaagtcagacatgtgcgaggggtgtaggtctctcgcagctgggcaccctggctatatttcccacgataaagaaacctccatcaagtacgtttcccatcagcacccatcccacccccagctattcagtatcgttcggcaagcgtgcgtgcgcagcttgtcttgtgaggtgtgtccgggaagagaggggcctatcttctttggcgacgaacagcatgggtttgtgttctctcataccttctttattaaggactctctggcacgcggatttcagcgttggtattcaataatcaccataatgatggatcgcatctacctaatcaactcttggcctttcctgcttggaaaggttagaggtatcattgatgagctccaaggaaaggccctcaaagtgtttgaggccgaacagttcggatgcccgcagcgagcccagcggatgaatacagcgtttacgccctttttacaccaaaggaacgggaacgctgcaaggtctcttacctccctgacatctgatgacaacttgtgggcatgtttgcataccagctttgcctggctgctcaaagcctgtggcagccggctaaccgaaaagctgctggagggagcgcctacagaggacaccttggttcagatggagaaactggccggagaggctggtgtgttacttcctggtccatggcctggctggccttgggggggtactagctgcctgctatcatggcaggagtccttgagagaaggaaatgctgcactcaatcagcccagaactagcctacgggaagcccatccacctatatctgtctag

SEQ ID NO: 28731 - DNA, 594 bp, synthetic construct
  misc_feature 1..594: note = Description of Artificial Sequence: Synthetic coding sequence
  source 1..594: mol_type = other DNA
atgaatgcaattgtggccctgtgtcacttttgcgagttacatgggcctagaaccctgttttgcaccgaggtgctgcacgccccactgcctcagggtgatgggaatgaagatagtccagggcagggcgaacaggccgaagaagaggagggaggcattcagatgaatagcaggatgcgcgctcactctcctgccgagggcgcttcagtagagtctagctctcctggtccgaagaaatctgacatgtgtgagggatgccggagcctggccgcaggacatccaggctatatttctcatgacaaagaaacatccatcaagtatgtgagccaccaacaccctagtcatccccagctgtttagcattgtacggcaggcatgcgtgaggagcctgagttgcgaggtgtccttagtcgcaactgaaccagtgtcagttggagcacatatgttaccaggcgcacttgggggtcttggagcaagtatcgctcagggaggtcggcactggtcctcattgcgcgctgatcctcagatcagtaccgcccaggggacgggccgtctcccatgcccagagcttcgtgaagagtcctgttggacctgctag

SEQ ID NO: 28732 - DNA, 462 bp, synthetic construct
  misc_feature 1..462: note = Description of Artificial Sequence: Synthetic coding sequence
  source 1..462: mol_type = other DNA
atgaattcgcggatgagagcccactcaccggcagaaggcgctagtgtcgagtcctcttcgccgggacccaagaaatctgacatgtgcgaaggctgccgctcactggctgctggccacccagggtacatatcccacgacaaggaaactagtatcaaatacgtgtcccaccaacaccctagccatccccaactgttttcaatagttagacaggcctgtgttagatctttgtcatgtgaagtctgtcctggacgtgaaggacccatatttttcggagatgaacaacacggcttcgtcttctcacacacctttttcatcaaagattcattagccagagggttccagaggtggtacagcattatcaccataatgatggacaggatctacctgattaattcctggccgtttctcctcggaaaggtgcggggaatcatcgacgagctgcagggaaaggcactgaagtag

SEQ ID NO: 28733 - DNA, 1419 bp, synthetic construct
  misc_feature 1..1419: note = Description of Artificial Sequence: Synthetic coding sequence
  source 1..1419: mol_type = other DNA
atgctgggtacagtgaaaatggagggtcacgagacctcggactggaactcctattatgcagatactcaagaagcctattcgagcgtgcctgttagtaatatgaattcaggcctggggagcatgaattctatgaacacatatatgacaatgaacaccatgactactagtggcaacatgacgccagccagtttcaatatgtcatacgctaatccaggactgggagccggtctcagccccggtgccgtggctggtatgccaggaggaagcgctggagcaatgaattcgatgacagcggctggagtcacagctatgggtaccgctctctccccctctggaatgggcgctatgggcgctcaacaagcagccagtatgaacggacttgggccatacgctgccgctatgaatccgtgtatgtctccaatggcctacgcaccctcaaacttgggccgttcccgggctggcggtggcggagacgccaaaacattcaagagatcctatcctcatgcaaagcccccatattcatacattagcctgatcacaatggccattcaacaggcgccttctaagatgctcactttgtcagagatctaccagtggattatggatctttttccttactaccggcagaatcagcagcgatggcagaatagcatcaggcactcgctttcctttaatgactgtttcgttaaggtcgccaggagccccgataaacctggaaaagggagctactggacgttacatccagattctgggaatatgtttgaaaacggttgttatctgcggagacagaaaaggtttaagtgcgagaagcagccaggtgccggtggaggaggcggttctggttccgggggaagcggggctaagggcggtccagagtctcgcaaggacccttcaggggcaagcaacccatcggccgacagcccacttcatcgaggagtccacgggaaaacaggacagctggaaggtgcgcctgcccctggccctgccgcaagcccccagaccctggatcactccggtgcaacagccaccgggggagccagtgagctgaagacgcctgcaagctcaaccgcccctcccattagctctgggccaggggctctcgctagcgtcccagcaagccacccggcacacgggctcgcccctcatgagtctcagctccatctgaagggcgacccacattactcctttaaccaccctttttcaattaacaacttaatgagctcctcagagcagcagcataaactggatttcaaagcctacgaacaggccctccagtacagcccatacgggtccaccttgcccgctagtttgcccctgggatccgcctccgtcacgacccgctccccaatcgaacccagtgccctggagcccgcatattaccagggcgtttattcacggccagtactcaacacatcctag

SEQ ID NO: 28734 - DNA, 1320 bp, synthetic construct
  misc_feature 1..1320: note = Description of Artificial Sequence: Synthetic coding sequence
  source 1..1320: mol_type = other DNA
atgaatagcggtctggggtcaatgaacagcatgaatacatacatgaccatgaacacaatgactacatccggaaatatgacgccagccagtttcaatatgtcatatgcaaatcccggactgggagctggtctttcacctggagccgtggctggtatgcctggcggaagcgccggagcgatgaactcgatgaccgctgccggtgtgactgccatgggtactgcactcagtccgagtggaatgggggcaatgggcgctcaacaggctgccagcatgaatggactaggaccctatgccgctgccatgaatccatgcatgtcacccatggcatatgcgccttctaatctcggccgtagcagagccggaggaggtggcgacgccaagacatttaaacgtagctatccacatgcgaagcccccttattcatacatttctctgatcactatggctatacagcaggccccttccaaaatgcttacactgtccgaaatttaccagtggataatggatctctttccttattaccgccagaatcagcagcggtggcaaaacagtataagacattcccttagtttcaacgattgcttcgtcaaagttgccagatcacccgataagccagggaaaggctcttattggaccttacaccccgacagcggaaatatgtttgaaaacggatgttatctccgtaggcagaaacgcttcaagtgtgaaaaacagcccggagcagggggtggcggaggcagcgggagcggcggatccggcgctaagggaggaccagagtcccgcaaggatccttctggcgcatcgaacccaagcgccgacagccccctgcatcgcggagtgcacggaaaaacaggtcagctcgagggtgcacctgctccaggcccagccgcaagtccgcagacactggatcattcaggtgcgaccgcgacaggtggtgcaagcgagctcaagacaccagcctcatctacagctcctcccatctcctctgggcctggtgctcttgcgagcgtgcccgcatctcaccccgctcacggcctggccccacacgaatctcaattacacctcaaaggagatccccattactcatttaaccatccgtttagcattaacaatcttatgtcttcttctgaacagcaacataagcttgacttcaaagcgtacgagcaggccctgcagtacagcccctatgggagcacccttcctgctagcctgcctctgggttcggcaagtgttacaacacgaagtcctatagagcccagcgccctagagccagcatactaccaaggcgtctattcacggcctgtgctgaacactagttag

SEQ ID NO: 28735 - DNA, 1506 bp, synthetic construct
  misc_feature 1..1506: note = Description of Artificial Sequence: Synthetic coding sequence
  source 1..1506: mol_type = other DNA
atgcaggctcgatattccgtcagcgatccgaatgctcttggcgtcgtgccctatttaagtgagcaaaattattacagagccgctgggtcctatggaggtatggcttcccccatgggcgtctacagtggacatcctgaacagtattccgctggcatgggacgtagctatgccccatatcatcaccatcagcctgctgctccgaaggatctcgtgaaacctccttacagttacattgccctgataaccatggctatccagaacgctcccgagaagaaaatcacccttaacggtatttatcagtttatcatggacaggtttccattctatagagagaacaaacaaggctggcagaattccatccgccataacctttcccttaacgaatgcttcgtgaaagtaccccgagatgacaagaaacccggtaaaggaagttattggaccctggatcccgacagctacaacatgttcgagaacggctccttcctccgtagacggcgaaggtttaagaagaaagacgtgtcaaaggaaaaggaagaaagagcccacctcaaagaaccacccccagccgcaagcaaaggcgctcccgcaacgcctcaccttgctgatgctcccaaggaggcggaaaaaaaggtcgtgataaaaagcgaggctgcgagccccgcactgccagtgattaccaaggtcgagactctgtctcccgagtccgcccttcagggttctcccaggagcgccgcaagcacccctgcagggagccccgatggcagcctgcccgaacaccatgcggcagcccctaacggccttcccggtttttccgttgaaaatatcatgaccttgcgcacttctcccccagggggtgagctcagtcccggtgccggtcgcgctggcttagtagtaccccctctggctctaccatacgccgctgcacctccggctgcgtacggacagccttgtgcacaagggcttgaggcaggtgctgccggtggctatcagtgttcaatgagagccatgagcctgtacaccggcgcagagaggcctgctcacatgtgtgtaccacctgcactggacgaagctctgtctgaccaccccagtggccctacctctccactcagcgcactgaacttggccgcaggccaagagggggctttggccgctaccggtcatcaccatcagcaccacggtcatcaccacccgcaggcgcctcccccacctcccgcaccacagcctcagccgacaccacagcccggtgccgcagctgcccaggcagccagttggtacctcaatcatagtggcgacctgaatcacttaccaggccacactttcgcagcacagcagcaaacattcccaaatgtcagagaaatgttcaactcccacaggttaggcattgagaacagcaccctgggagaatcccaggtctcgggaaacgcctcttgccaattgccttatagatctacaccacccctctatagacatgcagctccctactcgtatgactgcaccaagtactag

SEQ ID NO: 28736 - DNA, 1968 bp, synthetic construct
  misc_feature 1..1968: note = Description of Artificial Sequence: Synthetic coding sequence
  source 1..1968: mol_type = other DNA
atggcggaggcacctcaagtagtagagattgaccccgactttgagccgctgccacgccctcgatcatgcacgtggcccttaccacgtccagagttcagccaaagcaatagcgcaacaagctctcccgctccctcaggtagtgctgccgctaatcccgatgccgcagccggtttgccttcggcctcagctgcagcagtgagcgccgactttatgagcaacttgtcactactggaggagagcgaagacttcccacaggctccgggttctgtggccgcagctgtcgccgcagcagcagcagcggcagctacaggaggcctgtgcggggacttccaaggcccagaggcagggtgtctccatcccgctcccccacaacctccaccgccagggcctctttctcaacaccccccagtgccacctgccgctgctggcccattagcaggccagccaagaaaatcatcatccagtaggaggaatgcttgggggaatctgagttacgccgacctgattacaaaggctatcgaaagttccgcagagaaacgattgacactgagtcagatatatgagtggatggttaagtctgtaccctacttcaaggacaaaggtgactctaacagttctgccggatggaagaacagcattcgtcacaatctgagcttacactctaaattcatcagagttcagaatgagggaaccggaaaatcttcctggtggatgctgaaccccgagggagggaaaagcggtaaaagccctcggagaagggcggctagtatggataataattcaaaatttgcaaaatcacgcagtagagcggctaagaaaaaggcgtcactgcagagcggacaggagggtgccggtgactcaccaggctcacagttctctaagtggccggcaagtccaggtagtcactcaaatgacgatttcgacaattggtccactttccgacccaggacaagctctaatgcatccaccatctcaggccgactcagtccgattatgacagaacaagacgacctgggagaaggggatgtccactccatggtctaccctccatcagctgcaaagatggcctcaaccttaccgagcctgtcagagatctcaaatcccgaaaatatggagaacctcctcgacaatttgaatctgttatccagccctacatcgcttacggtgagtacccagtcgagccccggaaccatgatgcagcagacaccctgttacagctttgcacctcctaatacctcacttaattccccaagtcccaactatcagaaatacacctacgggcagtcatccatgtctccactgccccaaatgccgatacagaccctccaggacaacaagagcagctacggagggatgtcccagtacaactgcgccccaggtctgctgaaggaactgcttacaagcgactcaccgccacataacgacatcatgacccccgtggacccaggcgtagctcagcccaactcacgcgtactcggacagaacgtaatgatgggtcccaactccgtcatgagtacttacggctctcaggcttcccataacaaaatgatgaacccaagtagccacacccatcccggtcatgcgcagcagacttccgcggtgaatggccgaccactgcctcacactgtgtcaaccatgcctcacacctccggcatgaacagactgacgcaggtcaaaacacccgttcaagttcctttgccccaccctatgcagatgtcagccctgggcggttattccagtgtgtcatcctgcaacggctatggacgcatgggacttctgcaccaggaaaagctgccgtcagatctagacgggatgtttatcgagcgactggactgtgacatggagtcgatcatcagaaatgatctgatggatggggataccctcgactttaatttcgataacgtgcttcctaaccagtcatttccgcacagcgttaagaccacaactcattcctgggttagtggctag

SEQ ID NO: 28737 - DNA, 2022 bp, synthetic construct
  misc_feature 1..2022: note = Description of Artificial Sequence: Synthetic coding sequence
  source 1..2022: mol_type = other DNA
atggccgaggcccctgcatctcctgctcctctttccccactcgaagttgagctggaccctgagttcgagccacagtccagacctagaagttgtacctggcccctacagaggcctgaattacaggcctctccagcaaaacccagcggggaaaccgctgccgacagcatgattcccgaagaggaggacgatgaagatgatgaagacggcggaggcagggccggaagtgctatggccattggcggtgggggaggcagcggcactctggggagtggactgttactggaggatagcgccagggtgttagcgccagggggacaagaccctgggtcaggaccagctactgcagctggtggtctgtcagggggtacacaagccctcctgcagcctcaacaaccactaccaccaccacaaccaggagctgctggagggagcggccagccgcgtaagtgctcttcccgcagaaacgcttggggcaatctgtcttacgcagatctgatcactagagcgatagagtcatcaccagataaacgcctgacgctcagtcagatttatgagtggatggtgagatgcgtaccctactttaaggacaaaggtgatagtaattccagcgcgggttggaaaaattccataagacacaatctgagtttgcatagcaggttcatgcgggtgcaaaacgagggtacaggtaagtcatcttggtggatcattaatcccgacgggggtaaatctggaaaagccccaaggaggcgcgctgttagcatggacaacagcaataaatacaccaagtcccggggacgggctgccaaaaagaaagccgcattgcaaacagccccagaatccgcagacgatagccccagtcagctgtctaaatggccgggatcacctacctcccgatcatctgatgagctggacgcctggaccgatttccggtcccgaactaactcaaacgccagtactgtttccggtcgattaagcccgatcatggcttctactgagctagatgaagtgcaagacgacgatgccccactttctccaatgttgtactcgtcatctgcttccctgtcaccatccgtctcaaagccttgcaccgttgagctgccaagactcacagatatggccggaacgatgaacctgaacgacggcttgacggaaaatctcatggatgatctcctggacaatatcacactcccgccttcacaaccaagccccaccggagggctgatgcaacgctcttcttctttcccatacaccacaaagggatcaggcctagggtccccgactagttccttcaatagtacagtatttggcccatccagcctgaatagcttgagacagagtcccatgcagactattcaggagaataagcccgctacgttttcttctatgagtcattatggaaaccagacactccaagaccttttgacatctgattcactctcccattcagacgtaatgatgacccaatccgacccactgatgtcgcaagcctccactgccgtatccgcacaaaacagtagacgcaatgttatgctgaggaatgaccccatgatgagtttcgcagcccagcccaatcaggggtcgctggtgaatcaaaatctgctgcatcaccaacatcagacccagggtgcacttgggggtagccgcgctttgtcaaattcagtgtccaatatgggactttctgagtcttccagtttggggagcgctaaacatcaacagcagagccctgttagtcagtctatgcagactctgtccgactcccttagcggctcaagcctgtattcgacatcagccaatctgccagtaatggggcacgagaaattcccatctgatttggacttagatatgttcaacggctctttggagtgcgacatggaatcgataatacgctcagaactgatggatgccgatggcttggattttaattttgattcccttatcagcacgcagaatgtggttgggctgaatgttggaaactttactggtgccaaacaggcttcttcccagagctgggtgccagggtag

SEQ ID NO: 28738 - DNA, 2022 bp, synthetic construct
  misc_feature 1..2022: note = Description of Artificial Sequence: Synthetic coding sequence
  source 1..2022: mol_type = other DNA
atggcagaggccccagcttcacccgcacctctgagcccactagaggtcgagctggaccccgaattcgaaccacagagtcgcccacgatcttgcacctggcctctgcagcgcccagagctgcaggcatcacctgccaagccaagcggggagacagcagctgactccatgattcctgaggaggaagacgacgaggatgatgaggacggcggaggaagagcaggtagtgcaatggctatcggtgggggagggggatcaggaacgctcgggtcgggcctcctccttgaggactccgcacgtgtgctggcacctggaggacaggatccaggctcagggccagccacagccgcaggtgggctttcagggggtacccaggctctgctgcaaccacagcagcctctgcctcccccacagcccggagctgcaggagggtcaggccagcctcggaagtgtagttcccgcaggaacgcatggggcaatttgtcctatgcagatttaatcactcgggctattgagtcgtccccagacaaaagactcacattgagccagatttacgaatggatggtgcgatgcgtgccctactttaaagataagggcgacagcaattcttctgccggatggaagaattcaatcagacataatctgagcctgcactcacgttttatgcgggtgcagaatgagggcactggcaagtcaagctggtggattattaatccggatgggggaaagtccgggaaggctcctaggcgcagagcagtctccatggacaattctaacaagtacactaagagccgcggtcgcgctgccaagaagaaagcagcgttacagacggcaccagaatctgccgatgatagtcctagccaactgagcaagtggcccggttcaccgaccagcagatcttcggatgagctggacgcatggaccgatttcaggtctcgtaccaacagtaacgcctctaccgtttccggacgactgtcgccaatcatggcatccacagaactggatgaagtccaggatgacgatgctcccctgtctcccatgctttattcctcctctgctagcttgtccccttctgtgtctaagccctgtacggtggagctccctcggctcactgacatggcgggaaccatgaaccttaacgatggcctcacagaaaaccttatggatgaccttcttgacaatatcacactacctccatctcaaccaagcccaactggcggactcatgcagaggtcttcttctttcccatataccacaaagggttccggcctggggtccccgaccagttcctttaatagtacagtttttgggccatcctcccttaactctttacgacaatcccctatgcagaccattcaggagaacaaaccagcaactttttcctccatgagccactacggaaaccaaactctgcaggacttactgacgtccgactccctgtctcactctgacgtaatgatgactcagtctgatccactcatgtcacaggcgagcacagccgtgtctgcccagaattccaggcgcaatgtgatgctgcggaatgatcccatgatgagcttcgctgctcaacctaaccaaggatcactcgtaaaccagaaccttctacatcaccagcaccaaacccagggagctcttggtggctcacgagctttgtctaattcggtctccaatatgggcctcagtgagtcctctagcttgggcagcgccaagcatcagcagcagagcccagttagccaatcgatgcagacattgtcagactcacttagcggctcctccctgtactccacctcggccaatctgccggtgatggggcatgaaaagtttcccagcgacctcgatctggacatgttcaacggcagcctggaatgtgacatggaatctataatcaggtctgaactgatggacgctgacgggctcgacttcaattttgactccttgataagtacccagaacgtggtgggcctcaacgttggtaactttacaggcgctaaacaggcatctagccagtcctgggtgcccggttag

SEQ ID NO: 28739 - DNA, 1302 bp, synthetic construct
  misc_feature 1..1302: note = Description of Artificial Sequence: Synthetic coding sequence
  source 1..1302: mol_type = other DNA
atgcgggtgcagaatgaggggaccggaaagtccagttggtggatcatcaacccagatggaggcaaaagcggaaaggcccctcgaaggagggctgtgtccatggacaacagcaataagtacaccaaatctagaggacgggcagccaaaaagaaggctgctctgcagacagcacctgagagtgccgatgactccccttcacagctgtctaaatggcctgggagccccacttctcggagctctgacgagttagacgcttggaccgatttccgctctaggaccaattctaatgcttccaccgtgtccggccgactctctcctataatggcttccaccgagctcgacgaggtgcaggatgacgacgctcctctctcccctatgctgtatagctctagcgcatctctctctccctctgtgtccaagccctgcaccgtcgaactgcccagactcacagacatggcgggaaccatgaacctcaacgatggcctgaccgaaaatttaatggatgacttgttggataatatcaccctgcctccaagccagccgtcgcctacaggcggtctgatgcaacgctcctcttctttcccgtatacgacgaagggctctggccttggctcgcccacttcctcttttaatagcaccgtcttcggaccctctagcttaaactcattaagacagagccccatgcagaccattcaagagaacaaacctgccacgttcagttctatgtcccattacggaaatcagacattacaagacctgctgacaagcgattccctttctcacagtgatgtcatgatgacccagagtgatcccctgatgtcccaggcttctaccgccgtgtcagcacagaacagtcggcgaaacgtcatgctacgtaacgatccaatgatgtcttttgctgcacagcccaatcaggggagcctggtgaaccaaaatctcctgcaccatcagcaccaaactcagggagccttggggggttcgagagccctaagcaatagtgtgtcaaatatgggcttgagtgagtcctccagcctgggctccgccaaacatcagcagcagagtcctgtgtcacagtccatgcaaacactgtccgattctctctcaggatcaagcctgtattcaaccagtgccaacctgccagtgatgggacacgaaaaatttccaagcgaccttgatctggacatgtccatgggtgcctggaatgtgacgtggagccctctttccgtggtgaacagttggatgcttatgggatggatactcacactaatcccgtcttctccacataggatgctgctggtgtag

SEQ ID NO: 28740 - DNA, 1362 bp, synthetic construct
  misc_feature 1..1362: note = Description of Artificial Sequence: Synthetic coding sequence
  source 1..1362: mol_type = other DNA
atgcgggtgcaaaatgagggtactggcaagtcttcttggtggattataaatcccgacggtgggaagtcggggaaggctcccaggaggagagccgtgagtatggataactccaataaatatactaagtctaggggcagagctgcgaagaagaaagctgcacttcaaacagcacccgaatcagcagatgacagcccctcacagctgtctaaatggcccggatcccctacgagtagaagcagcgacgagctggacgcctggaccgactttcgcagccgcactaacagcaacgcctcaacagtgagtggcagattatcccccatcatggcttccacggagctggacgaggtccaagacgatgatgctcctctgtccccaatgctctactcgagctcagcaagcttaagcccaagtgtaagcaaaccctgtactgtcgaattgcccaggctgaccgatatggccggaacaatgaacttaaacgatgggctgaccgaaaacctgatggatgatctcttagacaatataacgcttcccccaagccagccttctccaacgggcggtctgatgcagcgttcttcgtcctttccctacactacgaaaggcagcggccttggctcaccgacatcctcattcaatagcacagtgtttggccctagtagccttaattcactgcggcagagccctatgcagactatccaggaaaacaaacccgctacattctcctcaatgtctcattacggtaaccagaccttgcaggatctgctaacgtctgactctctgagccactccgacgtcatgatgactcagagcgaccccctaatgtcccaggcctccaccgccgttagcgcacagaattcacggcgtaatgtaatgctgagaaatgatcctatgatgagttttgcggctcaaccaaatcagggcagcttggtgaatcagaatctgctgcaccaccagcaccagacacagggcgctctagggggaagccgggcactgtcgaactctgttagtaatatggggctctctgagtcctcttccttgggatcggcgaagcatcaacaacagtcgcccgtgtcccagtccatgcagactctctcagactccctttcaggaagttccttgtattcgacttccgcaaacctaccggttatgggacacgaaaagtttccttcagatctggacttggatatgttcaacggaagtctggagtgcgatatggaatccatcatcaggagcgagctcatggatgccgacggcttagatttcaactttgactctttaattagtacgcaaaatgtagtcgggctaaatgtcggcaacttcacgggagctaaacaggcgtccagccagagttgggtgcctggatag

SEQ ID NO: 28741 - DNA, 444 bp, synthetic construct
  misc_feature 1..444: note = Description of Artificial Sequence: Synthetic coding sequence
  source 1..444: mol_type = other DNA
atgtccttcaggttcggtcagcatctgataaagccttccgtggtcttcttaaaaacagagctatcattcgcattggtgaaccgcaagcccgtggtgcccggacatgtcttggtttgtcccctcaggccagtcgaacggtttcacgatctgagacctgatgaagtggccgatcttttccagacgactcagagagttgggacagtggtggaaaaacactttcacggcacaagtctgacgttctcaatgcaggatggccctgaagccggacagaccgtcaaacatgtacatgtgcatgtgctgccccgtaaagctggagatttccaccgcaatgactctatttacgaagagctgcagaaacatgataaggaggattttcctgcatcttggagatctgaagaggaaatggcagcggaagctgctgccttaagagtgtatttccagtag

SEQ ID NO: 28742 - DNA, 444 bp, synthetic construct
  misc_feature 1..444: note = Description of Artificial Sequence: Synthetic coding sequence
  source 1..444: mol_type = other DNA
atgtccttcaggttcggccagcatctgataaagccgagtgtggtcttccttaaaacggagctgtcgtttgccctggtcaaccggaagccagtagtccctggccatgtgctcgtttgcccacttcgcccagtggaacgctttcacgacctccgccctgacgaggtggctgacctatttcagaccacgcaaagggttggaaccgtggtggagaaacattttcacggcaccagtctcacattttctatgcaggatggacccgaagccggacaaaccgtgaagcacgtgcacgtccacgtcctgccaagaaaagctggcgacttccacaggaatgactccatctacgaggaactgcagaagcatgacaaggaagacttccctgcaagctggaggagtgaagaggagatggcagccgaggcagcagccttgagagtttacttccaatag

SEQ ID NO: 28743 - DNA, 444 bp, synthetic construct
  misc_feature 1..444: note = Description of Artificial Sequence: Synthetic coding sequence
  source 1..444: mol_type = other DNA
atgagtttccgttttggccaacatctgattaagccttcagttgtcttcctgaagactgagctctccttcgccttggttaaccgaaagcctgtcgtgccaggccatgtgctggtctgtcctttgcggcctgtggaaagattccacgacctccgtccagacgaagtggctgacctgttccagacaacccagcgcgtgggtaccgttgtcgagaaacatttccacggaacctccctgacattcagcatgcaagacgggcctgaagccggacagactgtaaagcacgtgcacgtccacgtgttgcctcggaaggctggtgactttcaccgcaatgactctatttatgaggagcttcagaagcatgacaaggaggactttcctgcttcttggagatctgaggaggaaatggcagccgaggctgccgctcttagggtatacttccaatag

SEQ ID NO: 28744 - DNA, 240 bp, synthetic construct
  misc_feature 1..240: note = Description of Artificial Sequence: Synthetic coding sequence
  source 1..240: mol_type = other DNA
atgtccttccgtttcggacagcatttaatcaagccaagtgtggttttcctcaagacagagctcagcttcgcattagttaaccggaaacccgtggtccctggacacgtgttagtatgccctctccgccctgtggaacgctttcatgatctgcgccctgacgaggtcgccgatctatttcaaacaacacagagggtgggaactgtcgtggagaagcactttcacggtaccagcttgacatag

SEQ ID NO: 28745 - DNA, 444 bp, synthetic construct
  misc_feature 1..444: note = Description of Artificial Sequence: Synthetic coding sequence
  source 1..444: mol_type = other DNA
atgtcttttcggtttggacagcacctcattaagccaagcgttgtcttcttaaagacggagctaagttttgctctggtgaaccggaagccagtcgtgcctgggcacgtactggtgtgtccactccgcccagtggaacggttccacgatctcaggcccgatgaggtggccgatttatttcagactacccagcgcgttggaacagttgtggaaaagcattttcacggtaccagtctcacattctctatgcaggatggacccgaggcaggccagacagtaaagcatgtgcacgtgcacgtgctcccgagaaaggccggtgacttccatcgcaacgatagcatttatgaggaactgcagaagcacgataaggaggatttcccggcatcttggagatctgaggaagaaatggctgccgaggccgcagctttgcgcgtgtatttccagtag

SEQ ID NO: 28746 - DNA, 1725 bp, synthetic construct
  misc_feature 1..1725: note = Description of Artificial Sequence: Synthetic coding sequence
  source 1..1725: mol_type = other DNA
atgagagatccgggagcagcggctcccctctcttccttgggactttgtgcccttgtgctcgccctgctgggggctctgagcgccggtgccggtgctcagccttatcacggagaaaaagggatttctgtacccgaccatggcttttgccagcccatttcaatccctttgtgtactgacatcgcctacaaccaaactatcttgcctaatctgctcgggcacaccaatcaagaagatgcagggttagaggttcaccagttttatcctctcgtcaaggttcagtgcagtccggaactaagattcttcctgtgttcaatgtacgctccagtctgcacggtgctggatcaggccattccgccatgccgctcactttgcgagcgcgcaagacaaggctgcgaggctctgatgaacaaattcggtttccagtggccggaacggctgcgctgtgaaaactttccagtccacggagccggagaaatctgcgtgggtcaaaacacaagcgacggaagcggcggaccaggtgggggaccgacggcttatcccactgcaccctacctacccgacctgccttttaccgctctccctcccggtgcctcagatggtaggggccgtcctgctttcccattttcctgtccccgtcagctgaaagttccgccatatctcgggtacaggttcctgggtgagagggattgcggtgccccttgcgagcccggtcgggcaaacgggctgatgtatttcaaggaggaggagcgtaggtttgcccgactgtgggtgggtgtctggtccgtcctgtgctgtgcatccaccctcttcaccgtattgacatatctggtcgatatgcggcgtttcagctaccccgagcggccaataatcttcctcagcgggtgttattttatggtggcagtagctcacgtggctggcttcctgttggaggatagggccgtctgcgtcgagagattttccgatgatggatatagaaccgtggcgcaaggcactaagaaagagggctgcaccatcctgttcatggtgctctatttcttcggcatggcttcttctatttggtgggtaatcctttcactaacttggtttctggcagccggaatgaagtggggccacgaggccatcgaggcgaatagccagtattttcacttggccgcttgggccgttccggcagtgaaaaccattaccatcctcgcgatggggcaggttgacggggacttgttatcaggagtgtgctatgtgggcctgtcaagtgtggatgcccttagagggtttgtgctggccccacttttcgtatacttatttattggtacctccttcttgctggctgggttcgttagcctatttaggattagaaccattatgaaacatgacggcactaagaccgaaaagctcgagaagttaatggttagaataggggttttctccgtactgtatactgtccctgcgacaatcgtgctcgcgtgttacttttacgagcaggcgttccgcgagcattgggaaagaacatggctcctacagacctgtaagagctacgcggtaccctgccctcctggccactttccccctatgtcacctgatttcactgtgtttatgataaaatacttgatgactatgatcgtggggattacaactggcttttggatttggtctggcaagaccctgcagtcgtggcggcgattctatcatcgattgtcacactcctcaaaaggcgagacagctgtgtag

SEQ ID NO: 28747 - DNA, 654 bp, synthetic construct
  misc_feature 1..654: note = Description of Artificial Sequence: Synthetic coding sequence
  source 1..654: mol_type = other DNA
atgagctttcgtggaggaggcagagggggattcaatagaggcggaggcggtggcggtttcaacagagggggttcttcaaaccacttccggggtgggggtggagggggaggaggaggaaactttcggggaggcggacggggaggttttgggcgtggaggaggaagggggggtttcaacaaaggtcaggatcagggtcctcctgaacgcgtggtgcttttgggagagttcctccacccatgcgaggacgatatcgtgtgtaaatgtacaaccgatgaaaataaagtgccttacttcaacgccccagtgtacctggaaaacaaagaacagatcggcaaggttgatgaaatctttggacaattgagagacttctattttagcgttaagctctctgagaacatgaaggcttccagtttcaaaaagttgcagaagttttacatagatccatacaagctcctgcctctccagagattcctgccacgaccccctggggaaaagggaccaccacgcggaggaggtcgcggtggacgcggaggtggtcgaggtggaggtggacgtggcggtggccgaggtggagggtttcggggtggaagggggggtgggggaggcggatttcgaggcggaagaggagggggtttcagaggccgtggccattag

SEQ ID NO: 28748 - DNA, 1533 bp, synthetic construct
  misc_feature 1..1533: note = Description of Artificial Sequence: Synthetic coding sequence
  source 1..1533: mol_type = other DNA
atgtaccgcgcactccggttgctggccagatccagacccttggtgcgtgcccctgctgccgctcttgcttccgccccagggcttggtggtgctgctgtgcccagcttctggcctcccaatgcagccagaatggcaagtcaaaactctttcaggatagagtatgacacctttggggagctcaaggttccaaatgacaaatattatggtgcacagaccgttcgcagcactatgaattttaagattggtggggtaacggagagaatgcccacgcccgtcatcaaggccttcggaatcctgaagagagccgcagccgaagtgaatcaagactatggacttgaccccaagattgccaatgccatcatgaaggccgctgacgaagttgcggagggaaaactcaacgaccacttcccactggtggtgtggcaaacaggaagcgggactcagactaatatgaatgtgaacgaggtcatctcgaatcgcgcaattgagatgttggggggtgaactggggtccaaaatcccagtgcaccccaacgatcacgtgaacaagtctcaaagtagcaatgacaccttcccaaccgccatgcacatcgctgccgctatcgaagtgcatgaggtgttgctgccaggtctccagaagttacacgatgccttagacgctaaatccaaggagtttgcccaaattatcaagatcgggaggactcacactcaggacgcagtgcccttgacactggggcaggagttctccggctatgtccagcaggtgaagtatgccatgactcgcatcaaggccgctatgccacggatctatgaactagccgcaggcggtacagccgtgggaactggcttgaacacccggattggctttgccgagaaggtcgccgctaaagtggcagctcttaccggactgccttttgtgacagccccaaataagttcgaagcactcgccgctcatgatgcccttgtagagttatcgggcgcaatgaataccacagcttgttcactgatgaaaatcgccaacgacatccgctttctagggagcggtcctcgcagtggcctgggagagctgatcttgcccgaaaatgagccaggttcttcgatcatgcctggaaaggttaatcccacacaatgcgaagccatgaccatggtggccgcacaagtaatgggcaatcacgtggctgtgacagtgggtggctctaacgggcatttcgaactgaatgtttttaaacccatgatgatcaaaaacgtactgcactcagcgaggctgctgggtgacgcatctgtgtcattcactgagaactgcgtggtgggaatccaggccaataccgaacgaattaacaaactcatgaacgaatcactcatgctggtgactgctctaaatcctcacatcggctacgataaggcagccaaaattgccaaaacagcccataaaaacggatcaaccctgaaggagaccgcaatcgagttgggttatctcacggcggagcagtttgatgaatgggtgaagcccaaagacatgctcggccctaagtag

SEQ ID NO: 28749 - DNA, 537 bp, synthetic construct
  misc_feature 1..537: note = Description of Artificial Sequence: Synthetic coding sequence
  source 1..537: mol_type = other DNA
atgtccccgagtgggcgactgtgcctcctcacaatcgtgggactcatactcccgacgaggggtcagacactgaaggacacgacgagcagcagcagcgcggactcaactatcatggatatccaggtccctactcgagctccagatgccgtttacactgagttgcagcctactagtccgacaccaacttggcccgctgatgaaacaccacagccgcagacacagacacagcagctggagggaaccgacgggcctttagtcacggaccccgagacccataagtcaactaaggctgctcacccgacagatgatactaccacactgagtgagcggccatctccctccaccgatgtgcagacggatccacagacactcaaaccatcagggttccatgaggacgatccttttttctatgatgaacataccttgagaaaacggggtctcctggttgccgcagtgttattcatcacaggtataatcatacttacgtccggcaagtgcagacagctcagtaggctgtgcaggaatagatgtcgatag

SEQ ID NO: 28750 - DNA, 324 bp, synthetic construct
  misc_feature 1..324: note = Description of Artificial Sequence: Synthetic coding sequence
  source 1..324: mol_type = other DNA
atgcagacactgagtaatattccatgtttctgcctccatggcagcctgctcccatcgacagaccttgctacgctttcagctcacccgaccgacgacacaaccacgttgtcagagcgcccttcacctagcactgatgtgcagaccgaccctcaaaccctgaaaccgtccggttttcacgaagatgatccgtttttttacgatgaacacaccttgcgaaagcgcggactgcttgtggccgcagtcttatttataacaggcataatcatattgacctctgggaagtgtcgccagctgtcaaggttgtgccggaaccgctgcagatag

SEQ ID NO: 28751 - DNA, 291 bp, synthetic construct
  misc_feature 1..291: note = Description of Artificial Sequence: Synthetic coding sequence
  source 1..291: mol_type = other DNA
atgagcccatccgggaggctgtgcctgcttacaattgtgggcctgattttgccaactagagggcaaactctgaaggacactacaagttcctcaagtgcagattctactataatggacattcaggttccaaccagagcacccgatgcggtgtacacagagctacaaccaacaagtcctacaccaacgtggcctgcagatggagcctatatcactgcctacggcgttacccactttctgatgaacatgctggccgtgtcgtcctttttctgtctacacactgctccccagtag

SEQ ID NO: 28752 - DNA, 537 bp, synthetic construct
  misc_feature 1..537: note = Description of Artificial Sequence: Synthetic coding sequence
  source 1..537: mol_type = other DNA
atgtctccctccggacgactgtgtcttctgacgatcgtgggtcttatccttcccacaagaggtcaaaccctgaaggacactacatccagctcttccgcagacagcactataatggacatccaggtgcccacacgcgcacccgacgccgtatacactgagttgcagccaactagtcccaccccaacttggccagccgacgagaccccacagccgcaaactcagactcaacaactcgagggcaccgacggtcccctggtgaccgatccagagacacacaaatccacaaaagctgcacacccaactgatgataccactacactttcggagcgaccatctccctcgaccgacgtgcagacggatcctcagaccctcaagccatcaggattccacgaggacgacccgtttttctacgatgagcacacgcttcgcaaaagaggtctgttagtggcagcggtgctatttattacaggaatcataattctgactagtggtaagtgtcgtcagctgagccgattatgtcgaaatcgttgccggtag

SEQ ID NO: 28753 - DNA, 537 bp, synthetic construct
  misc_feature 1..537: note = Description of Artificial Sequence: Synthetic coding sequence
  source 1..537: mol_type = other DNA
atgtccccgtcaggtcgtctgtgtctcttgaccattgtgggtttgattcttcccacccgaggtcagactctcaaggacactacctcttctagctctgcagactcaaccatcatggacatacaagttccgacaagggccccagacgccgtgtacaccgagctgcagccaacaagccccacacccacctggcccgctgacgaaaccccacagccccagactcagacgcaacagctggaggggacagacggtcctttggtgacggaccccgaaacccataaaagtacaaaagccgctcaccccaccgatgatacaaccactctgtccgagaggccctccccatccaccgatgtacagacagatccacaaactttgaagccttctggatttcacgaggatgatccttttttctatgatgaacatactttgcgcaaacgtggcctccttgtcgcggcagttttgttcattacgggcatcataatcttgacatctggaaagtgcaggcaactgtctcggctctgtaggaaccgttgtcgttag

SEQ ID NO: 28754 - DNA, 537 bp, synthetic construct
  misc_feature 1..537: note = Description of Artificial Sequence: Synthetic coding sequence
  source 1..537: mol_type = other DNA
atgagcccaagcggcaggctttgtcttctgacaatagtcggactgatacttcccactagggggcaaactctgaaggatactacaagctcctctagcgccgactcaacaattatggatatccaggtgcctacacgggctcccgatgcagtgtacaccgaattgcagcctacttcccccacccccacttggccggcagacgagactcctcagcctcaaacgcaaacccagcagctagaaggtactgacggcccattggtcaccgacccggagacccacaaatcaacaaaggctgcccatccgacagatgatacaaccaccctgtccgaacggccaagtcccagtacagacgtgcagactgatccccagacgctgaagcctagcggattccacgaggacgatccatttttctacgacgagcacacactgagaaaaagaggactgctcgttgctgcggtcctgtttatcaccggcattataattctgacgtcagggaagtgcagacaactgtcacgtctgtgcagaaatcgctgtagatag

SEQ ID NO: 28755 - DNA, 585 bp, synthetic construct
  misc_feature 1..585: note = Description of Artificial Sequence: Synthetic coding sequence
  source 1..585: mol_type = other DNA
atgagccctagcggcagactgtgcctgctaacgatagtgggtctgatccttccgacccggggacagaccctgaaagataccactagctcaagctcagcggactctacgataatggacattcaagtgccaacgcgcgcaccagacgctgtctacacagagctgcaacctacttcccccaccccaacctggcctgccgacgagaccccacaacctcagacacaaacccagcaactcgaggggacagatggcccactggtaaccgatccagagactcacaaatctactaaggctgctcatcccacggatgacacaactaccctcagcgagcgtccgtcccctagcacagatgtccagactgatccccaaactctgaagccgtccggttttcacgaagacgacccattcttctacgacgagcacaccttgaggaaacggggactgctggtcgccgcagtgctgtttatcaccgggatcataatccttactagcgaaaactggggttgggttggacgaactcccaggcctggaggtggattgatgaccgaagggtgggtgctaaagggtccttgggctatactgttttag

SEQ ID NO: 28756 - DNA, 1518 bp, synthetic construct
  misc_feature 1..1518: note = Description of Artificial Sequence: Synthetic coding sequence
  source 1..1518: mol_type = other DNA
atgtccaatatctgtcaacggctgtgggagtatttagagccttacttaccctgtctctcaactgaagccgataagtccaccgttattgagaaccccggagccctgtgctctccccagagccaaagacacggtcactattttgtcgccctgtttgattatcaggcgaggactgccgaggacttatccttcagggccggagataaactacaggtactagatacccttcacgaaggttggtggtttgccaggcacttggaaaagagacgagatggcagctcccaacagctccagggatacatcccaagcaattatgtcgcagaggataggagcttacaggccgaaccgtggttcttcggtgcgattggtcggtccgatgcagaaaaacaactactctatagcgaaaataagaccgggagtttcttgatccgggagagcgagtcgcagaagggagagttttcgctgtcagtgttggatggcgcagtggtgaagcattacaggataaaaagattagatgagggcggattttttctgaccagaagacgcatattctcaacgcttaatgagttcgtgtcccactacaccaagacctcagacggcctgtgcgtcaagttaggcaagccatgcttgaagatccaggtccctgcgccatttgacctcagttacaaaacggtggatcaatgggaaattgatcgaaattcgattcaactcctgaagagactcggctctggccagtttggtgaggtttgggaagggctgtggaataacacaacaccagtcgccgttaagacattgaagccaggcagcatggatccaaacgatttcctccgtgaggctcagatcatgaagaatctccgccatcccaaactcattcagttatacgctgtctgcacccttgaggaccctatctatatcatcactgagctgatgcgccacggaagcctgcaggagtaccttcagaatgataccgggtccaagatccacctgacccagcaagtggatatggctgctcaggtagccagcgggatggcatacttagagtctagaaactacattcatagagacctcgcagccagaaatgttctggttggagagcacaatatttacaaggtcgctgatttcgggttagcacgtgttttcaaggtggacaacgaggacatttatgaatcccggcacgagattaagctccctgttaaatggactgctcctgaagccatacggtccaataaatttagcattaagtcggatgtttggagctttggcatattgttatacgagatcatcacatacgggaaaatgccatactcaggtatgactggcgctcaggtgatccagatgctggcccagaactatcgcctaccacagccgagcaattgtcctcagcagttttacaatatcatgctcgagtgctggaatgcagagccaaaagagcgcccaaccttcgaaaccctgaggtggaagttggaggattacttcgaaactgactccagctacagcgacgctaataacttcatcagatag

SEQ ID NO: 28757 - DNA, 1092 bp, synthetic construct
  misc_feature 1..1092: note = Description of Artificial Sequence: Synthetic coding sequence
  source 1..1092: mol_type = other DNA
atggatagtacatcattgctccccaacccatggatccgcgtgctggacggcgctgtggttaagcactaccgcataaaaaggctagacgagggcggtttcttcctcacacgaagacggatcttttctactctgaacgagttcgtatcgcattacaccaagaccagcgatggcctctgtgtgaagctgggtaagccatgcctgaaaattcaggtgccagcccctttcgacttgtcttataaaaccgtggatcagtgggaaatagatagaaactccatccagctgttaaagagactggggtcaggacagttcggagaagtctgggagggactgtggaataatactacgcccgtagcggtgaagacactgaagcccggtagcatggaccccaatgacttcctacgggaggcccagatcatgaaaaatctgagacatccaaagctcatacagctgtatgcggtctgtactctggaggatcctatatatattatcactgaacttatgaggcacggcagtctccaggaatatctgcagaatgatacaggatcaaagatccacctgacgcaacaggtcgacatggctgctcaggtcgcgtctgggatggcctacctggagtcaagaaattatatccatcgcgatctcgcagccagaaatgtactagtgggtgagcataatatttataaggttgccgatttcggtctcgccagggtatttaaggtagacaatgaggacatttatgagagcagacacgaaattaagttaccagtcaagtggacagcaccagaagccatcaggagtaacaaattctcaattaaatcagatgtgtggagttttggcatacttctctatgagatcatcacgtatggtaaaatgccgtacagcggtatgaccggagcccaggtgattcagatgctagcccaaaactaccggttacctcagcctagcaactgccctcagcagttctataatataatgttagagtgctggaatgcggaacccaaggagaggcccacttttgagaccctccggtggaagttagaggactatttcgaaactgatagcagctattctgatgccaataacttcattcgatag

SEQ ID NO: 28758 - DNA, 1128 bp, synthetic construct
  misc_feature 1..1128: note = Description of Artificial Sequence: Synthetic coding sequence
  source 1..1128: mol_type = other DNA
atgcgatcagtggctccctctgggcctaagatgggcaatatcactgctgataattcttctatgagctgcacaatcgaccacactattcatcagacgctggcccctgtggtctacgtaacggtcctagtagtgggcttcccagccaattgcctcagcctctacttcgggtatctgcagattaaggcacgcaacgaattgggggtatacctctgtaatcttacagtggccgacctgttctatatatgctccctgccattttggctgcagtacgtgctgcagcatgataattggtcccacggcgatctgtcatgtcaagtctgtggcattctgctatatgagaacatctacatttccgtgggcttcctgtgctgtatcagtgtagatcgttaccttgctgttgcacatcccttcagatttcaccagtttcggacccttaaggccgcagttggggtgagcgtggttatatgggcaaaggagcttttaactagcatctacttcttaatgcatgaggaagtgattgaggacgaaaaccagcaccgggtctgcttcgagcattaccccatccaggcatggcaacgagccatcaattactaccgcttcctggtgggcttcctcttccccatctgcttgttactggcctcctaccagggaattttgagggcagtgcgccgttcgcatgggacgcagaaatcgcggaaagatcagattcagcggctcgtgttgagtacagtggttatcttcctcgcgtgtttcctgccgtatcatgtcttgctgctggtacgcagcgtgtgggaggcgtcatgcgactttgccaaaggcgtgtttaacgcataccatttcagcttattactcacctcctttaattgcgtcgcagacccagtgctgtactgctttgtgtccgagaccacccaccgggatctggccagactgaggggagcctgtctcgcctttctaacctgctccagaactggtcgcgctagagaggcttatccactgggcgctcctgaggctagcgggaaatccggtgctcagggtgaggagccagaactgctaactaaactgcatccggcattccagacaccaaacagtcccggttctggcggttttcccacgggtcgcttagcttag

SEQ ID NO: 28759 - DNA, 1017 bp, synthetic construct
  misc_feature 1..1017: note = Description of Artificial Sequence: Synthetic coding sequence
  source 1..1017: mol_type = other DNA
atgggcaatatcacagcagacaattcttcaatgagctgcactattgaccataccatccaccagactctagccccagttgtttatgtgaccgtattagtggtcggcttccctgcgaattgtctctcactgtactttgggtatttgcagatcaaagcaaggaacgaactaggagtatacttatgcaaccttacagttgcggatttgttttacatctgttctttacccttctggctccagtacgtgctgcagcatgataattggagtcacggcgatctcagctgtcaggtgtgcgggattctactgtacgaaaacatttacatctcagtcgggtttctgtgttgcatttccgtagaccgctatttagctgttgcccaccctttccggtttcatcagttccgtactctcaaagctgcggtcggcgtctcagtagtcatttgggccaaggaactgttgaccagcatctatttcctgatgcatgaggaggtgatcgaggacgagaatcaacatcgggtgtgcttcgaacattatcccatacaggcctggcaacgggcaattaattactacagattcctcgtcggtttcctgttcccaatttgcctccttttagcatcgtaccaggggatattgagggctgtgaggagatcccacggtacccagaagtcacgaaaggaccagatacagcgactggtgctgtcgactgtcgttatattcctcgcatgttttctgccctaccatgtgttgctgctggtccgttctgtgtgggaggcctcctgcgattttgcaaagggggtcttcaatgcgtaccatttctcactgctgctgactagcttcaactgtgttgcagatcctgtcctgtattgcttcgtgtcagaaaccactcatagggacttagctcgccttcgaggagcgtgtttagcttttctaacttgtagtcgcacaggccgagctcgcgaggcctatcctttaggtgcccctgaggccagtgggaaatccggagctcagggcgaagaaccctag

SEQ ID NO: 28760 - DNA, 1098 bp, synthetic construct
  misc_feature 1..1098: note = Description of Artificial Sequence: Synthetic coding sequence
  source 1..1098: mol_type = other DNA
atgggcaacatcacagccgacaattcaagcatgagctgcacaatcgaccatactatccatcagaccttggccccagtggtttacgtgaccgtgcttgtcgtagggttcccagcgaattgtctctcgctatatttcggatatctgcagattaaggccaggaacgagttgggcgtgtacctgtgtaacctgactgtcgctgacctgttctacatatgcagtctccctttttggctgcaatatgtgttacagcacgacaattggagccacggtgacctttcttgtcaggtatgtggaattctgctttatgaaaacatctacattagtgttgggtttctctgttgcatatccgtggatcggtaccttgctgtggcccacccgtttcgcttccaccaatttcggacgctgaaagctgccgtcggagtgtccgtggtgatttgggcaaaggagcttctcaccagcatttattttctgatgcacgaagaggtgatcgaggacgagaaccaacatagagtctgcttcgagcactatccaatccaggcatggcagcgcgctatcaattattacagatttctggtggggtttctcttcccgatttgcctcctgctggcctcttatcagggcatattaagggcagtgcgacgatcacacgggacccaaaagtcacggaaagaccagattcagaggctcgtcttatccactgtagttatcttcctagcctgctttctgccctaccacgtactcctgctggttagatccgtctgggaagctagctgcgactttgccaagggtgtgttcaatgcttatcacttctccttattactgacctctttcaattgcgtggcagatcccgtgctttattgcttcgtgtctgaaaccacccacagggatctggctagacttcgaggcgcttgccttgcatttctgacatgcagcaggactgggagagccagagaggcctaccccctcggggcacctgaggccagcggaaagtctggcgcacagggggaagagccggaactccttacaaagctacacccggcatttcagactcccaatagccccggttctggaggctttcccacaggtcgactggcctag

SEQ ID NO: 28761 - DNA, 1098 bp, synthetic construct
  misc_feature 1..1098: note = Description of Artificial Sequence: Synthetic coding sequence
  source 1..1098: mol_type = other DNA
atgggaaacataaccgcagacaacagctctatgtcttgcacaattgatcacacgattcatcaaacattggccccagtggtgtacgtaacagttctggtggtgggctttccagctaactgcttaagtctgtattttggctacttacagattaaagctcgaaacgagctgggcgtgtacctctgtaaccttactgttgccgatctgttttatatttgcagtctgccattctggctgcaatacgtccttcagcacgataactggtcgcacggtgatctttcctgccaggtgtgcggaattctgctgtacgaaaatatttacatctccgtgggattcttatgttgcatctctgtagatcgctacctggcagtggcccatcctttcagattccatcaattcaggacactaaaggcagcggtaggcgtcagtgttgtaatctgggccaaagaactgctcaccagcatctatttccttatgcacgaggaggttatcgaagacgaaaaccaacacagggtttgctttgagcactaccctatccaggcctggcaaagagcaatcaattattatcgattccttgtgggcttcctcttccctatctgccttctgcttgcttcttaccagggcatcctgagagctgtacggaggagccatgggacccagaaaagccggaaagaccaaatacagcggctcgtcttatccactgtggtgatatttctcgcgtgtttcttgccgtaccatgtgcttctgctggtaagatcggtatgggaagcctcctgtgacttcgccaagggggtgtttaacgcataccacttttctctgctcctcaccagcttcaattgcgtcgctgatcctgtgctgtactgcttcgtgagcgagaccacgcacagagacctggcccgtctgcggggtgcttgcctggctttcctgacctgttcccgaaccggcagggcgagagaggcttacccactcggcgctccagaggccagcggaaagtccggcgcacagggcgaagaaccagagctgctgactaagcttcatcccgcattccaaacgccgaactctcctggtagcggcggatttcctacgggacgactggcatag

SEQ ID NO: 28762 - DNA, 2100 bp, synthetic construct
  misc_feature 1..2100: note = Description of Artificial Sequence: Synthetic coding sequence
  source 1..2100: mol_type = other DNA
atgaccttacgtcggaaatgcaatgaagacgatgaggtctttttcggtcctttcggtcacaaggagcgctgcatagctgctagcctcgagttaaataatcccgtgcccgaacagcccccactcccaacgagcgaatcaccatttgcttggagtcctttagctggggagaagttcgtcgaggtctataaggaagcacacttgctggcactccacattgagtcttcatcacggaatcaggcagcacaggccgcaaagcctgaagacccaagatcacagggcgtggagagatttatccaggagagtaagttgaagatcaatttattcgagaaggaaaaggagatgaagaagtcccccacgagtcttaagcgggaaacctactatctgtccgattcacccctccttggaccgccagtgggcgaacctcggctgctcgctagtagcccagctctcccctcaagtggtgcacaggccagactcacacgcgctcccggaccaccccacagcgcacacgcgctaccacgtgaatcatgcactgcccacgccgcatcacaggcagccacgcagagaaaacctgggacaaaacttctgctccctagagccgctagcgtgaggggtagatccattcctggggcagctgagaaacctaagaaggagatacccgcttcaccatcccggacaaaaattcccgcagagaaggagtcccatagggacgtcctaccagataaaccggctcctggggcagttaacgtgccggctgcaggctcacatctgggccaaggcaagagggccatccccgtgcctaacaaactgggtctgaagaaaacattgctaaaggctcctgggagcacatccaacctggctcgcaaatccagctcgggacctgtctggtctggggcttcttccgcttgcacctctcctgccgtcggtaaggcaaaatccagtgaattcgcaagcatccctgccaacagcagtcggcctctgagtaatatctccaaatcagggagaatgggacctgccatgctacgaccagctttgcctgccggtcctgtgggagccagcagctggcaggccaagcgggtggatgtaagcgaacttgccgcagaacaactcaccgcccctccttccgcgagtcccacacagccccaaactcctgaaggtgggggacagtggctcaattcaagctgcgcctggagcgaatcctctcagctgaacaagacacgttccattcgcaggcgagactcctgtctgaactcgaaaacaaaagtgatgcctactccgaccaaccagtttaagataccaaaattttccattggggatagccctgactcttctactcccaagctctcgagagcgcaaagaccacagtcttgtacaagcgtgggacgagtgacagttcacagcactccagtgaggagatccagtggccctgcccctcagtcactgctgtctgcctggcgcgtatctgcgcttcccacccccgcaagcaggcgctgcagcggcctacctcccatgaccccaaaaaccatgcccagggccgtgggttcaccactctgcgtccctgctagacgcagatcatctgaaccaaggaagaacagcgccatgcggaccgaaccaacacgtgaatctaaccgaaaaaccgacagtaggctagtggacgtgagccctgaccgaggctcacctcccagtcgggtaccacaggcgctgaatttcagccccgaagagagcgattctactttcagcaaatccacggcaactgaggtggccagagaggaagcaaagcctgggggagacgcagccccttctgaggccctcctggtggatattaagctggagccactcgctgttacaccagacgctgctagccaacccctcatagatctgcctctcatcgacttttgcgacacacctgaggcgcatgtggctgtgggatccgaaagccgcccacttattgacctgatgacaaacactccggacatgaacaagaatgtggccaaaccttcacctgtggtgggacagctgattgacctctcctctcccctgattcaactgtcaccagaggctgacaaagaaaatgtcgactcccctttgttgaagttctag

SEQ ID NO: 28763 - DNA, 2220 bp, synthetic construct
  misc_feature 1..2220: note = Description of Artificial Sequence: Synthetic coding sequence
  source 1..2220: mol_type = other DNA
atggagggagggggtggtcgggatgagcccagcgcgtgtagagctggtgatgtcaatatggacgaccctaagaaggaggacatcctactgctcgcagatgagaagttcgactttgacctatccttgtcctcaagctctgccaacgaagatgatgaggtgtttttcggcccatttggtcacaaggagcggtgcatcgcagcctccctggagcttaacaaccccgtacccgaacagcccccactccccacgtctgaatctccatttgcttggtcccctctggctggcgagaaatttgttgaagtgtataaagaggcccacttgctggccctgcatattgagagtagctcccggaatcaggccgctcaggctgctaaacccgaagatccccgttcacagggagtggaacgcttcatccaggaatctaagttgaaaattaacttgtttgaaaaagaaaaggagatgaaaaaaagccccactagtttgaaacgcgagacatactatctttcagattctcctctgctggggccacctgtgggggagccacggttgcttgcctcgtcacctgccctgccatcttctggcgcacaggctaggttgacgagagcacccggaccccctcacagtgcacacgccctgccacgcgagagctgtacagcccatgctgctagtcaagccgctacacagcggaagcctggtactaaactcctgctgcctcgcgcagcctcagtcagaggcagaagtattcctggagccgctgagaaacccaaaaaggaaattcctgcatctccctccaggacaaagattcccgcagaaaaggaaagccacagggatgtgctgccggacaagcctgcccctggcgcagttaatgtgccagccgcagggtcccatctgggccaaggcaagcgcgcaatccccgtacctaataagttagggcttaaaaaaacactgctcaaggctcctggcagcacgtctaacctcgcaagaaaaagctcgtctggaccggtttggtccggcgcaagctccgcttgtacctcccctgcagtggggaaggcaaaatcctcagagtttgctagtattccagcaaacagcagcagacctctcagcaatatctccaagtctggacggatgggcccagccatgctgcgcccagctctgcctgctggtcccgtaggggcttcgtcatggcaggccaaacgcgttgatgttagtgagctggccgcagagcagctgacagcacccccatccgccagccccactcagccgcagacgccggagggtgggggacagtggttgaattcctcatgtgcttggagtgaatccagccaacttaacaagaccagaagtattcggaggcgcgattcctgtcttaactccaaaactaaggtgatgcccacccctacgaatcagtttaagatcccaaaattcagcattggtgattcacctgactcgagcacccccaagctgtctcgagcgcaacggcctcagtcatgcacatccgttggacgagttactgtacactcaacccctgtacgtagatctagtggtcctgcacctcagtcgctcctctctgcttggagggtgtccgcactgcccacgccagcctctcgtaggtgtagcggcctgccccctatgacacccaagacgatgcctagagcagtggggtcaccgctctgcgtgcccgctcggagacggtcctccgaaccacggaaaaactccgcaatgaggacagagcctacacgggaaagcaaccgtaagacagattctagactggtggacgtttcgccagacaggggaagccctccaagtcgggtcccacaggcacttaacttttcacccgaggagtctgattctactttctcaaagagcaccgcaactgaagtggccagagaggaagcgaagcctggtggagatgccgcaccctcagaggccctcttagttgacatcaagcttgaaccattagccgtgacaccagacgccgcttcccagccccttatcgatctgcctcttatcgatttctgcgataccccagaggctcacgtggcagtaggctcagagtccagacctttgattgacttgatgaccaacacgccggatatgaacaaaaacgtggctaaaccatccccagtggtcggacagctgatcgatctatcttctcccttgatccagctctctcctgaagctgacaaggaaaatgtcgactccccactgctaaagttctag

SEQ ID NO: 28764 - DNA, 1149 bp, synthetic construct
  misc_feature 1..1149: note = Description of Artificial Sequence: Synthetic coding sequence
  source 1..1149: mol_type = other DNA
atgggtgactggtctgctcttggtaaactgctggataaagtccaggcatatagcacagccggtggcaaagtgtggctttcggttctcttcatattccgaatactgttgctggggactgccgtcgaatctgcctggggagatgagcagtccgcgttcagatgcaacacccagcagccgggatgcgagaatgtttgctacgataagagcttccccatctcccacgtgaggttttgggttcttcagataattttcgtgtctgtccctaccttattgtatctggcccacgttttctacgttatgcgcaaagaggaaaaacttaataagaaggaggaagaactgaaggtcgctcaaactgatggcgtcaatgtggacatgcacctgaaacagatcgagatcaaaaagtttaagtacggtatcgaggaacacgggaaggtgaagatgcggggaggtttgctgcgtacttacatcatcagcatcctgttcaagtcaatatttgaagtggcttttctgctgatccagtggtatatctacggattctcgctatctgctgtatatacctgcaagcgcgacccctgtccccaccaggttgattgctttctcagtcggccaaccgagaaaactatattcatcattttcatgctggtcgtgagccttgtttctctcgctctaaatattattgagttgttctatgtcttcttcaaaggtgttaaggatagagtgaaaggcaagtctgatccctaccacgctaccagcggggctctgtctcccgctaaggattgcggaagccagaaatatgcctacttcaacggatgttcctcacccaccgcaccactatctcccatgagtcctcccggatataagttggtaaccggagatagaaacaactcaagctgccgcaattataacaagcaggctagcgagcagaactgggccaactacagcgccgagcagaacagaatgggccaggccggaagtacgataagcaactcacacgcccagcctttcgacttccctgacgacaatcagaacagcaagaagctggccgctggacacgagcttcagccactggctatcgtcgatcagcgcccttcatcgcgggcttcctctcgcgcttcctcccgcccaagacctgacgacttggaaatctag

SEQ ID NO: 28765 - DNA, 1101 bp, synthetic construct
  misc_feature 1..1101: note = Description of Artificial Sequence: Synthetic coding sequence
  source 1..1101: mol_type = other DNA
atgggggattggtcggccctggggaaacttctagacaaggtccaggcgtattcaacggctggcggaaaagtgtggctctccgcttggggagatgaacaatctgccttccggtgcaatacgcaacagcccggttgtgaaaacgtttgttacgacaaatcattccctatctcgcatgtgcggttctgggtgttgcagatcatctttgtgagtgtccctacactgctgtacttagcccacgtgttttacgtcatgcggaaggaggagaagttgaacaaaaaggaggaggagctcaaggtcgctcagacagacggcgtgaatgttgacatgcatcttaaacaaatagagatcaaaaagttcaaatacgggattgaggagcacggaaaggtgaagatgagaggagggctgttaagaacctacatcatttcaattctttttaagtccatatttgaagtcgcttttctgctgatccaatggtacatttacggattttcgcttagcgctgtctacacctgcaaacgcgatccttgccctcaccaggtcgactgctttctgagtagacctactgagaaaacaatatttatcatttttatgcttgtcgttagtctcgtgtctctagctcttaacatcattgagctcttttatgttttttttaaaggcgtgaaggaccgagtaaagggcaagtctgacccgtaccacgccactagcggggctttgtctccagctaaagactgtggcagccagaaatacgcttattttaacggttgcagctcacccaccgcgccactctcacctatgtctcccccaggatacaaactggtgaccggagatagaaataactcctcgtgtagaaactataataaacaagccagtgaacagaattgggccaattatagcgctgaacagaatagaatgggacaagctgggtccacaatttccaattcccacgcccaaccctttgatttcccagacgataatcagaattcaaaaaagctggccgcaggccatgagttacagcccctggccattgttgaccagagaccttccagtcgcgctagcagcagggcttcctcccgaccccgacccgatgatctcgaaatctag

SEQ ID NO: 28766 - DNA, 2673 bp, synthetic construct
  misc_feature 1..2673: note = Description of Artificial Sequence: Synthetic coding sequence
  source 1..2673: mol_type = other DNA
atggattcaaacactgcaccacttggacctagctgtccacagccacccccagctccccagcctcaggcgcgttctcgacttaacgctacggcgtctctggagcaggaaaggtccgagcgcccaagagcacccggaccccaggccggaccaggccctggagtgcgggatgctgccgcacctgctgagcctcaagcccagcacacccgtagcagggaacgggctgatgggacaggacccactaaaggggacatggagattcccttcgaggaggtgttggaaagggccaaggccggagatccgaaagcacagacagaggtaggcaagcattatctccaactcgcaggggatactgacgaagagttgaattcttgtacagctgtggattggcttgtcctggctgccaaacagggccgacgagaggcggtgaagctgctgcggagatgcctggccgatcggcgagggattacctccgaaaacgagagggaggttcgccaattgtcaagtgaaacagatctcgagcgggcagtccgcaaggctgcactggtcatgtactggaagcttaaccctaaaaaaaagaagcaagtggctgtggctgagctgctcgaaaacgttggtcaggtgaatgaacacgacggtggtgcccagccgggaccagtgcccaaatcactccagaagcaacggcgtatgttggaaaggctggttagttccgagagcaagaattacatcgcacttgacgatttcgtcgagattacaaaaaagtacgctaagggcgtgatcccatctagtctctttttgcaagacgacgaggatgatgacgaactggccggaaagtctccggaagacctgccactcaggctgaaagtggtgaaataccctttgcacgcgatcatggagattaaggagtatctgattgacatggcctctcgtgccggaatgcactggttatctaccataatcccaactcatcatatcaatgcccttattttcttttttattgtgtcaaatctgacgatcgatttcttcgcgttctttatccctctggtcattttttacttaagtttcatatcaatggtgatctgcaccctgaaagtttttcaggatagtaaggcctgggaaaattttcgaaccctaacagatctgttgttgcgctttgaaccgaatctcgacgtcgaacaagccgaagtcaatttcggttggaatcacctggaaccctacgctcatttcctcctcagtgtcttttttgttattttcagtttccccattgcttccaaggactgcatcccctgcagtgaactggccgtcattacaggctttttcaccgtcaccagctatttaagtctgagtactcacgccgaaccatacacaagacgcgcattagccacggaggtgactgccggactgctctccctgctacctagcatgcctctgaactggccatatctaaaggttctcggccagacgtttattacggtccctgtcgggcacctggtggtgcttaacgtgagcgtgccatgtctcctgtacgtgtatcttctgtatctgtttttccggatggcccagctgagaaatttcaaggggacctactgttacttagtgccttacctggtgtgtttcatgtggtgtgagctatctgtggtaatcttacttgagtccacggggttaggcctgctccgcgcttccatcggctattttctctttttgttcgcgctcccaattctagtagcgggtctggccctggtgggcgtgctccagtttgctaggtggtttacctccttggaacttaccaaaatcgctgtgacggtagcagtctgttccgtgcccttgctgctacgatggtggaccaaggcttcgttttcagtggtcggaatggtcaagtctctgactcggtcttcaatggtcaaattgatcctggtgtggctcacagctattgttctattctgttggttctacgtgtatcgatccgaggggatgaaagtgtataatagtaccctgacgtggcagcaatacggagccctgtgtggccctagggcatggaaggaaaccaatatggccaggacacagatcttgtgttcccatttagaggggcatcgagtcacctggacgggaagattcaaatatgttagagtgaccgacatcgataactcagccgaaagcgcgataaatatgcttcctttctttattggagactggatgcgttgtctctatggagaggcctatccggcttgttcccccggtaacacctcaaccgccgaagaggaactctgtcggctaaagctgctcgcaaaacatccctgtcatatcaagaaatttgataggtacaagtttgagattaccgtggggatgcctttcagctcaggagctgatgggtctcgttctagagaagaagatgacgtgaccaaagacatcgttctcagggccagctctgaattcaagagtgtgctgttatctttgaggcaggggtctctcatcgagtttagcaccatcctggaaggtcggctcggcagcaaatggccggtgttcgaactaaaagccatatcctgtctgaactgtatggcacagctgtccccaacaaggcgccacgtcaagatagagcatgactggagatcaaccgtccacggcgcagtcaagttcgcctttgatttcttttttttccctttcctcagcgctgcttag

SEQ ID NO: 28767 - DNA, 654 bp, synthetic construct
  misc_feature 1..654: note = Description of Artificial Sequence: Synthetic coding sequence
  source 1..654: mol_type = other DNA
atgtcgtttagaggaggagggagagggggtttcaaccggggagggggtggcggaggattcaacagaggaggatctagtaaccattttcgcggaggcggaggcggaggcggtggcggaaatttccgcggtgggggtaggggaggtttcggacgcggaggaggtaggggcggatttaataagggtcaggatcaggggcctcccgagcgggtggtgcttctgggcgagtttctgcacccctgcgaggacgatattgtctgtaaatgtacaacggatgagaacaaagtgccatactttaacgctcccgtctacctggagaataaagaacagatagggaaagtggacgagatcttcggccagctccgggatttttacttcagcgtgaagctgtctgagaatatgaaagcatcatccttcaagaaattgcagaaattttatattgacccttataagctgctgccacttcagcgctttctacccagaccccctggagagaaggggcctcctcgagggggaggtcgcggaggtaggggcggtgggagggggggtggcggaagaggcggaggtagaggaggaggtttcaggggtggacgaggaggaggcggaggcggattcagaggcggtcggggtggagggtttcggggtagaggacattag

SEQ ID NO: 28768 - DNA, 1590 bp, synthetic construct
  misc_feature 1..1590: note = Description of Artificial Sequence: Synthetic coding sequence
  source 1..1590: mol_type = other DNA
atgggttgtgtcttctgcaaaaaattggagcccgttgccaccgccaaggaagacgcaggattggagggcgacttcagatcctatggagctgctgaccactacggtcccgacccaaccaaggctcggccagccagctcctttgcgcacattcccaactacagtaactttagtagccaggcaatcaaccctggatttctggattccggcacgatcaggggcgtcagcggtatcggggtgaccctcttcattgctctgtatgactacgaggcccgaaccgaagacgaccttacatttaccaagggtgagaaattccacatcctgaacaatacagagggtgattggtgggaggccagaagccttagcagcggaaaaaccggatgtattcccagtaattatgtggctcccgtggactcaattcaggccgaggaatggtatttcgggaaaattggacggaaagatgcagaacgccagctcctttctccaggcaaccctcagggggctttcctgatcagggaatccgagactacaaagggtgcatatagtctttcaataagggattgggaccagacacgtggcgaccacgttaagcactacaaaattagaaagctggatatgggcggatattacatcacgacccgtgttcaattcaacagcgtgcaagaacttgtgcagcactacatggaggttaacgatggattatgcaacctgctgattgcaccctgtaccatcatgaaacctcagaccttgggcctcgcaaaggacgcctgggaaatatctagatcaagtataactctggagagaagactgggtactggctgtttcggtgatgtgtggctgggaacttggaacggctctacgaaagtcgccgtgaaaaccctgaagccagggacgatgagtcctaaagcatttctcgaggaagcccaagttatgaagcttctgaggcacgacaaactggtgcagttgtatgctgtggtgtctgaggaaccaatttacatcgtgactgagtttatgtgccacggttctttactggattttttaaagaaccccgagggccaagatctgagattgccacaattggtggatatggctgcacaggttgcagagggcatggcgtatatggagcgtatgaattatatccacagagatctgcgagcagctaatattttagtgggggagcggctggcttgcaaaattgcggactttggcctggctcgacttatcaaggatgacgaatataatccctgccagggctccaaatttccgatcaagtggacggcccctgaagccgcacttttcggccgttttacaataaaaagtgatgtgtggtcttttgggattctcctgaccgaactgataactaagggcagaattccctatcctggaatgaacaagagagaggtgctcgaacaggtggagcaggggtatcacatgccatgcccacctgggtgccctgcctccctctacgaggccatggagcagacctggcgattggaccccgaggaaagaccgacatttgagtatttgcagagttttctggaggattactttaccagcgcggagccacaatatcagcctggcgatcagacatag

SEQ ID NO: 28769 - DNA, 1590 bp, synthetic construct
  misc_feature 1..1590: note = Description of Artificial Sequence: Synthetic coding sequence
  source 1..1590: mol_type = other DNA
atggggtgtgtcttctgcaagaagttagaaccagtggccaccgccaaggaggacgccggactggagggtgacttccgctcttacggcgcagcggaccactacggcccagatcctacaaaggcaagacctgcgagttcgttcgcgcacatccctaactattctaatttcagctcacaggcaatcaaccctggcttcctggactcaggtacgatcagaggcgtaagtgggatcggggtaacgctattcatcgctctgtatgattatgaagcacgaacggaagacgatcttacattcacgaaaggcgagaaattccacattctgaataacacagagggagattggtgggaagctaggtcattgtcaagcggcaagaccggatgcatacctagcaattacgtggctccggttgatagcatacaagccgaagagtggtactttggtaagattggcagaaaggatgccgagcgtcagctgctttcccccggaaatccacaaggcgcattcttgatacgcgaaagcgaaacaactaagggagcttactcactcagcatcagggattgggatcagactcgcggtgaccacgttaagcactataagattcgtaagctcgacatgggcggttattatatcacaaccagggttcagtttaattcggttcaggagcttgtacagcattacatggaagttaatgacggtctgtgcaacctcctcatagccccatgcactatcatgaagccccagaccctcggtcttgctaaggacgcctgggaaattagtcgcagttcaataaccctggaacgacgactgggaaccggatgcttcggcgatgtgtggctggggacctggaacgggtcaacaaaagtcgctgttaaaacgcttaaaccagggaccatgtctcccaaggccttcttagaggaagcacaagttatgaaactcctgcgccacgacaaactggtgcagttgtatgcagtggttagtgaggagcctatctatatagtgactgaattcatgtgccatgggtcactcctggattttttgaagaatccagagggacaagacctacgcctgcctcagctcgtagatatggctgcgcaggtggccgagggcatggcttacatggagcggatgaactacatccatagagacctgagagcagcaaacattcttgtgggagagcggctagcatgcaagattgctgacttcggcctcgccagactcatcaaggacgatgaatacaatccctgtcaaggcagcaaattcccgatcaaatggaccgccccagaggcagccctattcggccgatttacgattaagtctgacgtctggtccttcggaatactgctgacagaattgattactaaaggtcggatcccatacccaggaatgaataaaagagaagttctggagcaagtggagcaaggttaccatatgccctgccctccagggtgccctgctagcttatatgaggctatggagcaaacttggaggctggacccagaagagagaccaacttttgaatatttgcagtcttttcttgaagactatttcacgagcgccgagccccagtatcaaccaggagatcagacttag

SEQ ID NO: 28770 - DNA, 1590 bp, synthetic construct
  misc_feature 1..1590: note = Description of Artificial Sequence: Synthetic coding sequence
  source 1..1590: mol_type = other DNA
atgggctgtgttttttgtaaaaaattggaacctgtggctactgccaaagaggatgctggccttgaaggtgactttcgcagttacggcgctgcggaccactacggtcccgatcctactaaagctaggccagcttcgtcttttgcccacattccgaattatagtaattttagctctcaggcaattaacccagggttcctcgacagcgggaccattcggggagtctctggcatcggcgtgacattgttcattgcattatacgattacgaagctagaacagaagatgacctgaccttcaccaagggggaaaagttccatattttgaataacacagaaggggactggtgggaggccagatcgcttagttccggaaagactgggtgcatcccgagcaactacgtggcccctgtggacagtatccaggctgaggagtggtatttcggtaaaatcggtcggaaggacgccgagagacaactgctcagccccggaaaccctcagggtgctttccttattagggaaagtgaaacaacgaagggggcatattctctctctattcgagactgggaccagacaagaggtgatcacgttaagcactacaagatcagaaagctggatatgggcggatactacattaccacccgcgtgcagttcaatagcgtgcaagaactggtacagcattacatggaggtgaacgatggtctctgtaacttattaatagcaccgtgtacaataatgaagccccaaaccctgggactggcaaaagatgcttgggaaatctcaagaagcagcatcactttggagaggcgacttggaacaggttgctttggtgacgtctggcttgggacctggaacggctctaccaaagtggcggtcaagactttaaagcccggaaccatgtctcccaaagcattcttagaagaggcgcaggtgatgaaattgttgcgacacgacaagctggtacagctatatgcagtcgtgtccgaggaaccaatatacattgttaccgaattcatgtgccacgggtctctcctggacttcctaaagaatccagaagggcaggatctgcggctgccccagctggtggatatggccgctcaagtcgcagaggggatggcctatatggagagaatgaactacattcatagagatctaagagccgctaatattcttgtgggagagcgattagcatgtaagatcgcggatttcggcctggcaagattgataaaggatgacgaatataacccatgccagggctcaaagttccccattaagtggaccgctcctgaggcggcactttttggcagattcacgataaaatctgacgtttggtcttttggcatcttactaaccgagttgattacaaaaggtcggataccctaccctgggatgaataagagggaggtgctggaacaggttgaacaaggctaccatatgccttgcccaccaggctgccccgcttctctctatgaagccatggagcagacctggcgactggatccggaagagaggcccacgtttgagtatctccagtcctttctcgaagattactttaccagtgctgagccgcagtaccagccaggagatcagacctag

SEQ ID NO: 28771 - DNA, 1590 bp, synthetic construct
  misc_feature 1..1590: note = Description of Artificial Sequence: Synthetic coding sequence
  source 1..1590: mol_type = other DNA
atgggctgcgttttctgtaagaagctggaaccggttgccaccgctaaagaagacgccggattggaaggcgactttcgctcttacggcgcagcagatcactacgggccagaccctacaaaagcaaggccggctagttcctttgcgcatattccgaactactctaacttctcttcccaggccatcaatccaggcttcttggatagcggtacaattcgcggagtgagcgggattggtgtgaccctcttcattgccttatacgattacgaggcacgcacggaagacgacctgacattcactaagggagagaaatttcacatcctgaataacacagagggtgactggtgggaggccagaagcctgtctagtggcaaaaccggttgcatcccaagcaactacgtggcccctgtggattcgattcaggcagaggagtggtatttcggcaagattggcaggaaggatgcagagcgccagctgctgtctcctggcaacccccagggcgcattcctgatcagagaatcagagacaaccaagggcgcttacagtctgtcaatccgcgactgggaccagactaggggcgatcatgtaaaacattacaaaatccgaaagctggatatgggaggatattacatcacgacaagggtccagtttaacagcgtccaggagctcgtccagcattatatggaagtgaatgatggtctgtgcaacctccttatcgccccttgcacaatcatgaaacctcaaacgctggggctggcaaaggatgcgtgggagatctctaggtcttcgatcacgctggagaggcgccttggtaccgggtgctttggtgacgtgtggctgggaacatggaatgggagtaccaaagtggccgtgaagaccctgaagcctgggaccatgagccccaaagcgtttctagaggaagctcaggtaatgaagctgctgagacacgacaagctggtacagctttatgccgtggtgtctgaggaacctatctatatagtgacggaatttatgtgtcacgggtccttgttggactttctgaaaaaccccgaaggccaggacctgaggctcccacagctggtcgatatggccgcacaggttgccgagggaatggcctacatggagcgtatgaactatatccaccgtgacctgcgcgctgccaacatcctggtcggtgagcggttagcctgcaagattgcagacttcggcctggctaggctgattaaggatgatgagtataacccctgtcagggaagtaaatttccgattaaatggaccgcacccgaagctgcactgtttggtagattcactatcaaaagcgatgtgtggtctttcggtatactccttacagaacttatcacaaaggggaggatcccctatccaggcatgaataaacgagaggtgctggaacaggtggagcagggttaccatatgccctgccctccgggttgccccgctagcctctatgaggctatggaacagacttggcggctcgacccagaggagaggcctaccttcgagtatttgcagtcatttcttgaggattactttacctcagcagagcctcaatatcagccaggcgaccagacatag

SEQ ID NO: 28772 - DNA, 942 bp, synthetic construct
  misc_feature 1..942: note = Description of Artificial Sequence: Synthetic coding sequence
  source 1..942: mol_type = other DNA
atgggttgcgtgttctgtaagaagctggagcctgtggcaacggcaaaggaggacgcaggactggagggggattttcggagctacggggcagccgatcactatggacctgatcctacgaaggcgagacccgcttctagttttgcccacatccccaactacagtaacttctccagccaagcaatcaatcccggattcctggattcagggacgatccgtggggtaagcggaatcggggtcaccctttttatcgctctctatgattatgaagccagaaccgaagacgacctgacattcacgaaaggggaaaagtttcatatcctgaacaatactgaaggggattggtgggaagcacgctctctgtctagtggtaagacgggatgtattccctctaactatgtggcaccagtcgacagcatccaggctgaggagtggtatttcggcaagattggacgcaaggacgccgaacgccagctgttgtctcccggaaatccccaaggcgcttttctgattcgtgagtcagagacgacgaaaggtgcatacagcctgagcattcgagactgggatcagactcgtggcgaccacgtcaagcactacaagatccggaagctggacatgggtggctattacattacaacccgggttcagttcaactctgtccaggagctggtacagcactacatggaggtcaacgatggcctgtgtaatctgctgatcgcgccttgtactattatgaagccccagaccctcggattggccaaggatgcctgggagatcagtcgaagcagcatcacactcgaaaggaggctcgggacgggttgcttcggtgacgtttggttgggaacctggaatggttccacaaaggtggctgtcaaaacactgaaacccggtaccatgtccccaaaagcttttctggaggaagcccaagtgatgaaattgctgtag

SEQ ID NO: 28773 - DNA, 1392 bp, synthetic construct
  misc_feature 1..1392: note = Description of Artificial Sequence: Synthetic coding sequence
  source 1..1392: mol_type = other DNA
atgggttgtgtattttgtaagaagctagagccagtcgcaactgccaaggaggacgcgggactcgagggcgactttcgttcatatggcgcagccgaccactacggtccagatccaacgaaagcgaggcctgcctcgtcttttgctcatatccctaactatagtaacttttctagccaggcaataaatccgggtttcctggacagcggaacaatacggggagtttccgggataggcgtaaccctcttcatcgccctgtacgactatgaggcgaggaccgaggacgacctgactttcacgaagggggagaaatttcacattctgaacaacacggaaggggcatattcactgagcattcgagactgggaccaaaccagaggggaccatgtgaaacattacaaaatccggaaacttgatatgggcggatattatataacaacaagggtgcaattcaacagcgttcaggagctggtccagcattacatggaggtgaatgatggattatgtaaccttctaatagcaccttgtaccattatgaagccccaaacactcggcctcgccaaggatgcctgggagatcagtaggtcttctatcacattggagcgcaggctcggtaccggatgctttggagacgtctggctcggcacttggaacggaagtacaaaggttgcagtgaagaccttaaagccaggcacgatgtcccccaaagcgtttctcgaagaagcccaagtgatgaaactgctcagacatgataaactggtgcagttatatgctgtggtctctgaagaacctatttacatagtgacagaattcatgtgccacggctcacttctcgacttcttaaaaaacccagagggtcaggatctcaggcttccccagctcgtggacatggcagcccaggttgccgaagggatggcctatatggagagaatgaattatatacatagagacttgcgggctgcgaacattcttgtgggggaacgattggcttgtaagatcgccgatttcggactggccaggctgattaaggatgacgagtacaacccatgtcaaggatcaaaattcccaatcaagtggacagctcctgaagccgcactcttcggtcgtttcactatcaaatctgacgtctggtcattcgggatactcctgaccgagctcatcaccaaaggacgtatcccatatcccggtatgaacaaacgcgaggtcttggaacaagtggagcaggggtaccatatgccttgccctcccggatgtcccgcaagcctgtacgaggccatggaacagacatggcgactggaccccgaggaaagacccacattcgagtatctgcaatcattcttggaagactatttcacttcggcagagcctcagtatcaaccaggcgatcaaacctag

SEQ ID NO: 28774 - DNA, 1005 bp, synthetic construct
  misc_feature 1..1005: note = Description of Artificial Sequence: Synthetic coding sequence
  source 1..1005: mol_type = other DNA
atggagttccccggtctcggttctctggggacctcagaaccactgccccagttcgtggaccctgccctcgtgagcagtactccggaatctggcgtgttctttcccagcggacctgagggacttgatgccgcagcctcctccactgcacccagtacggcaaccgccgctgcggcagccctggcatactatcgggacgcggaggcctacagacacagtcctgtctttcaggtgtaccccttattgaactgtatggagggaatcccaggagggagcccatacgccggttgggcctatggtaaaactgggctttatccagcgtccactgtgtgcccaacaagagaggattctccacctcaggctgtcgaggacctcgatggcaagggcagtacttctttcctcgaaacactcaagaccgagcgactcagccccgacctcctgacgttgggcccagctctgccgtcaagtctgccagtgcctaattccgcttacggcggacccgacttctcttctactttcttctcgccgaccgggagtccgctgaatagtgctgcgtactcatcaccgaaactgcgtggtaccctgccactccctccctgtgaggcgcgagaatgcgtgaattgtggggcaaccgccacaccactctggcgcagagaccgaactggtcattacttatgcaatgcatgcggactgtatcacaagatgaatggccaaaatcgtcccctcatccgcccaaagaagcggctgatagtgtccaaaagagctggcactcaatgcaccaattgtcaaacgacaacaacaactctgtggaggaggaatgcgagcggtgacccagtctgcaacgcatgcggcctgtattacaagctccaccagcattattgcggcggtagcgcgcaactgatgcgcgcacagagcatggcgagcaggggcggtgtggtttctttttcatcttgttcccagaactccggccaaccaaaatcacttgggccaaggcaccccttggcatag

SEQ ID NO: 28775 - DNA, 1242 bp, synthetic construct
  misc_feature 1..1242: note = Description of Artificial Sequence: Synthetic coding sequence
  source 1..1242: mol_type = other DNA
atggagtttccgggactaggaagccttggtacctcagagccactcccccagttcgtggaccccgctctcgtgagcagcacacccgagtccggggtgtttttcccctccggccctgaggggctcgacgccgctgctagctcaaccgccccttcgaccgccaccgctgctgccgctgctcttgcgtattacagagatgcagaagcctaccgccactcacctgtctttcaggtataccccctcctaaactgtatggaaggaattccgggaggttcaccctatgctggatgggcgtacggcaaaaccggcctctaccccgctagtacagtctgccctactcgtgaggactctccccctcaggccgtggaagacttagacggcaaggggagcactagctttctggaaacccttaagacggagcgccttagccctgacctcctcacgctcggtcccgctctgccgagcagcctgcctgtccctaacagtgcctacggagggcctgacttcagcagcaccttcttttctcctacaggctctcccttgaacagcgcagcttacagctctcccaaactgcggggaacgctgcccctgccaccgtgtgaggcccgagaatgcgtcaactgcggcgcaactgccacaccactttggagacgtgataggaccggtcactatttatgtaatgcatgcggcctgtaccacaagatgaatggccaaaatcgaccgctgattagacccaagaagaggttgattgtgtctaagcgcgcagggacccagtgtaccaactgtcagacaacgaccaccaccctgtggcgaaggaacgccagtggcgatcccgtgtgcaacgcttgtggcctttattacaaactccatcaagtcaatcgaccactgacaatgagaaaagatggcatccagacacggaaccgcaaggcttctggaaagggcaagaaaaaacggggtagctctttggggggtactggggctgccgagggcccagccggaggttttatggtagtggctggcggaagcggaagcgggaattgtggggaggttgcttccggactgacactagggccacccggaacagctcacctatatcagggcctaggtcccgttgtcctgagtggcccagtctctcacttaatgccattccccggtccgctactcggctcaccaaccggaagcttcccaacaggccctatgccccctactacctccactaccgtagtcgcgccactcagctcctag

SEQ ID NO: 28776 - DNA, 369 bp, synthetic construct
  misc_feature 1..369: note = Description of Artificial Sequence: Synthetic coding sequence
  source 1..369: mol_type = other DNA
tgacagaatcgtcccctgatccgtcccaaaaaacggttgatcgtgtccaagcgggcaggcacacaatgcaccaactgccaaaccacaaccactactctttggagaagaaatgcaagcggcgatccggtgtgtaacgcctgtggtctatactacaagctgcatcaggtcaaccgtccccttaccatgcggaaagacggcatacagacaaggaaccggaaagcctcaggcaagggcaagaaaaaacggggttcctcactggggggtactggagcagcagaaggcccagcactgttatggtggctccgcagcgctcacgaaggtacagagcacgggctgcagaggagaggtggcgtactgcttctactttag

SEQ ID NO: 28777 - DNA, 1332 bp, synthetic construct
  misc_feature 1..1332: note = Description of Artificial Sequence: Synthetic coding sequence
  source 1..1332: mol_type = other DNA
atggaggtgaccgccgatcagcccagatgggtttcccaccatcatcctgccgttctgaatggtcagcatcccgatacccaccaccccggattatcacacagctatatggacgccgctcagtatcccttgcctgaggaggtcgatgtattattcaacatcgatggtcaaggtaaccacgtgccaccctattacggcaacagcgtgagggctaccgtccagaggtacccacctacccaccacggaagtcaggtgtgtagaccgcctttgctccacggttctcttccatggctggatggaggcaaggctctcggatcgcatcacacagccagcccttggaacctctcacctttctccaagacctcaattcaccacggaagccccggtccactgtccgtttacccccctgcctcgtcctcctctctaagtggtgggcatgcctccccacatctcttcaccttcccaccaacgccccctaaggacgtgagccccgacccatctctctcaactcccggaagcgcagggtcagctaggcaggatgaaaaagaatgcttgaagtaccaggtgcccttgcctgattccatgaagctggagagcagccattcgaggggtagtatgactgccctggggggtgcgtcttcatccactcaccatcccattacaacctatccgccatatgtgccagaatacagctctggtttattcccaccgtcttccctgttggggggatcaccaactggatttggctgcaagtcgcggcctaaggcgaggagtagcactggacgagaatgtgtgaattgcggggctacgtcgacgccattatggcgtcgggacggcacaggccattatctgtgtaatgcatgcggcctataccataagatgaacgggcagaatcggccacttatcaaaccgaaacgcagactgagcgcagcacggagagccggtaccagctgcgctaattgtcagaccactaccaccactctctggcggcgaaatgctaacggtgatcccgtgtgcaacgcttgcggactttactataagttgcacaatatcaatcggcctctcaccatgaagaaggagggtatccagactcgaaaccgtaaaatgtcctctaaatccaaaaagtgtaaaaaggtgcacgattcccttgaggattttcctaagaactcctcctttaatcctgccgcactgtcccgacatatgtcgtccctttctcatatatcgccattctctcattcatcccatatgttgacaaccccaaccccaatgcacccaccttcatcattatcgtttgggccacatcatcccagttcaatggtaactgcaatgggatag

SEQ ID NO: 28778 - DNA, 1335 bp, synthetic construct
  misc_feature 1..1335: note = Description of Artificial Sequence: Synthetic coding sequence
  source 1..1335: mol_type = other DNA
atggaggtgaccgccgatcaacccaggtgggtgagccatcaccacccagcggtgctgaacgggcaacaccccgatactcatcatccaggactatcgcatagctacatggatgcggcacaatacccacttcccgaagaagttgacgtgttatttaatatcgatggacaaggaaatcacgtcccgccatactacggaaacagcgtgcgggcaaccgtgcaaaggtacccacccactcatcacggctcacaggtgtgtcggcctcctttgctccatggttctctgccttggctcgatggtggcaaggcactcggaagccaccatacagcctccccttggaatctctcccccttcagcaagaccagcatccaccatgggtcaccaggccctctgtcagtgtacccaccagcctcttcttcatccctcagcggaggccatgcctccccccatctgttcacttttccccctactccccctaaagatgtgtcacccgatcctagtctgagtacaccgggaagcgcagggagcgccaggcaagacgaaaaggaatgtctcaagtatcaggtacccctgcctgactcgatgaaactcgaatcatcgcattcccgcggaagcatgacagccctgggtggggctagtagctccacccaccatccaattaccacctatcccccttacgtacctgagtatagcagtggtcttttccccccttctagtttgctcggcggaagccctaccgggtttggatgcaaatcgcgcccaaaagcaagaagctctacagagggccgtgagtgcgtgaactgtggggctacctcaactcctctgtggagacgagacgggacgggccactatctgtgcaatgcatgtggcctttaccataagatgaacggccagaataggccacttattaagccgaagcgtaggctctcagcagccagacgggcagggactagttgcgcaaattgccagaccactactactacgctgtggcgtcgcaacgccaatggggaccctgtttgcaacgcctgtgggctttactacaagttgcacaacattaatagacccctgacaatgaaaaaggaaggtatacagacacgcaaccggaaaatgagttctaagagcaagaagtgcaaaaaggtccatgacagcttagaagacttccccaaaaattccagtttcaatccggctgctctaagtaggcatatgtcaagtctctctcacatcagccctttcagtcacagctctcatatgctgacaacgcccacacctatgcacccacccagcagtctgtccttcggaccccaccatccgagcagtatggtcacagccatgggctag

SEQ ID NO: 28779 - DNA, 393 bp, synthetic construct
  misc_feature 1..393: note = Description of Artificial Sequence: Synthetic coding sequence
  source 1..393: mol_type = other DNA
atggaggtgacggcagaccaacccaggtgggtctcccaccaccatccggcagtgcttaatggacagcatcctgatacccatcaccccggtctgtcccattcatatatggatgcggctcaatatcccttgcctgaagaggtggatgttctgttcaatatcgatggtcaaggcaaccacgttcccccatattatggcaactcagtccgagccactgtccagagatacccacctacccatcacggaagccaggtttgtagacctccactgctgcacggttcattgccctggctggacggcggtaaggctctcggctcgcatcataccgcgtccccctggaatctacgtccttgcttacaatgcctgtgggccctacttcaggcctcacaatgctag

SEQ ID NO: 28780 - DNA, 798 bp, synthetic construct
  misc_feature 1..798: note = Description of Artificial Sequence: Synthetic coding sequence
  source 1..798: mol_type = other DNA
atgcgcagggccgagcttgcaggactgaaaaccatggcttgggttcctgctgaatcagcagttgaagaacttatgccaagactgctgcccgtggaaccatgcgatcttactgagggctttgatccctccgttccacccaggacgccccaagaatatctccgaagggtgcagatcgaagccgctcaatgtccggacgtggtggttgcccagattgacccaaagaagctcaagaggaagcagtctgtgaatatttcgctgagcggatgccagccagctccagaaggatactctccaaccctccagtggcagcagcagcaggtggcgcagttttccaccgttcgccagaatgttaacaaacataggagccactggaagagtcagcaactggactcaaacgtgactatgcccaagagcgaagatgaggaaggatggaagaaattttgcctgggagagaagctctgcgcagacggtgccgtggggcctgccaccaacgagagccctggaatcgactatgttcaggcaaccgtgacctctgtgttggaatatctgtcaaactggtttggcgaacgcgactttactcctgagctcggacgatggctctacgcccttttggcctgcctggaaaagcccctactgccagaagcccactctttaattagacaactggctcgcaggtgttccgaggtcagattactggtcgactctaaagacgatgaacgagttcctgccctcaatctcctgatttgcctcgtaagccgctactttgatcagcgggacctcgctgacgagccttcgtag

SEQ ID NO: 28781 - DNA, 843 bp, synthetic construct
  misc_feature 1..843: note = Description of Artificial Sequence: Synthetic coding sequence
  source 1..843: mol_type = other DNA
atgagacgcgcagagttggcaggcctgaaaaccatggcctgggtacccgcagagtcagccgtggaggagctgatgcctcgccttttgcccgtggaaccctgtgatttgacagagggctttgacccctcggtgcctccccgtacaccgcaggaatacctgcggagggtccaaatcgaggccgcacagtgtccagacgtagtagtggcgcaaattgatcccaaaaaactgaagcggaagcagagcgtgaatatatctctctctggttgtcaacccgcacccgagggctattctccgaccctgcaatggcagcagcagcaggtagctcagttctctactgtccgccagaatgtgaacaagcaccgctcccattggaagtcacagcagctcgactcaaatgtgacaatgcccaaatcagaggatgaggagggctggaaaaaattttgcctgggcgagaaactatgcgcagacggagctgtgggaccggctactaacgagtcacccggtatcgactatgttcaaatagggtttcctccgcttctgtcaattgtctcgcgtatgaaccaggccactgtcacatcagttctggaatatctgtcaaactggtttggagaacgtgactttacacctgaactggggcgatggctgtacgccctactcgcctgtttggaaaagcccctgctacccgaagcacacagcctgatcagacagctggcacggaggtgcagcgaagtaagactgctggtagatagtaaggatgacgagcgagtccccgctctgaatctgcttatttgcttggtcagccggtacttcgaccagcgggacttggcagacgagccatcttag

SEQ ID NO: 28782 - DNA, 753 bp, synthetic construct
  misc_feature 1..753: note = Description of Artificial Sequence: Synthetic coding sequence
  source 1..753: mol_type = other DNA
atgcgcagggccgaactggcgggactgaagaccatggcttgggtgcctgcagagtcagctgtggaggagctaatgccgaggctactgccagtggagccatgtgacttaacagaaggctttgaccctagcgtgccccctaggacacctcaggaatatctgcggcgtgtgcagattgaagcggctcaatgtccagatgttgtggtcgctcagatcgatccaaaaaagctgaagaggaagcagtcagtcaatatttcccttagcggctgccagccagctccggaggggtatagccctacattacagtggcaacagcaacaggttgcccagttttctaccgtgcgccaaaacgtgaacaagcacaggtcccattggaaaagccagcaactggatagtaacgttaccatgcccaaaagcgaggacgaggagggctggaagaaattttgcctgggggaaaagctgtgcgccgatggcgctgtggggcctgcaaccaatgagtcccccggtatagactacgtccagatcggattcccgcctctgttatccatagtctcccggatgaatcaggccactgtgacatcggtcctggaatacctgtcgaattggtttggtgaacgtgatttcacacctgaactgggaaggtggctgtacgcactccttgcctgcctggaaaaacctctcctcccagaggcccactctctaattcgacagctggccaggagatgtagtgaggtgcgtctgcttgtggtgttttag

SEQ ID NO: 28783 - DNA, 768 bp, synthetic construct
  misc_feature 1..768: note = Description of Artificial Sequence: Synthetic coding sequence
  source 1..768: mol_type = other DNA
atggacgtgatggacgggtgtcaattctccccttccgagtatttctatgatgggtcgtgcataccatcacccgagggggagttcggtgatgagtttgtgccacgggtcgccgcattcggagcacacaaggcagaactgcaggggagcgatgaggatgaacatgtaagagcgcctaccggtcatcatcaggctggccattgcctaatgtgggcatgtaaagcatgcaaacggaagtcaacaactatggatcgcagaaaggcggctactatgcgcgagagacgcagactgaagaaggtgaaccaggctttcgagacgcttaagcggtgcactacaactaaccccaatcagcggctacccaaagtagagattctgcgaaatgctattagatacatcgagtccttgcaggaactgctgagggagcaggttgaaaactattatagcctccccggacagtcctgcagcgagcctacgagtcctacctctaactgttctgacgggatgcctgaatgcaattcacccgtttggtcccgcaaatcatccacctttgacagcatctattgtcctgacgtgtcaaacgtatatgccaccgataagaactcgctgagctcgcttgattgcctctctaacatcgtcgatcgcatcacttcaagcgagcagccaggtctcccacttcaggaccttgcatccttgtctcctgtcgcatcaacagattcacagcccgctactcctggggcttctagctccaggctgatctaccacgtgctctag

SEQ ID NO: 28784 - DNA, 1725 bp, synthetic construct
  misc_feature 1..1725: note = Description of Artificial Sequence: Synthetic coding sequence
  source 1..1725: mol_type = other DNA
ctgagtccatccttgggatttccggctcagatgaaccaccagaaggggccaagcccttctttcggtgtgcagccttgcgggccacacgatagcgcaagaggtggtatgatcccacacccacagagtcggggtccttttcccacctgccagctcaagagcgagcttgacatgctagttgggaagtgtagggaggagcctctcgaaggggacatgtcgagtccaaattctaccggtatccaggacccgctgctggggatgttggacggccgagaagatttggaaagggaagaaaaaagggagcctgagtccgtgtacgaaacggactgcaggtgggatggatgtagccaggaattcgattcacaggagcaactcgtgcatcacataaactcagaacacatccatggtgaaagaaaagaatttgtttgccactggggaggatgcagccgagaattgcgtccatttaaagcacaatatatgctggtggtgcatatgcgacggcacacaggcgaaaaaccacacaagtgcacattcgaaggttgtagaaaatcctacagcaggcttgagaacttgaagacccatctgcgttcacacacgggcgagaagccatacatgtgtgaacacgagggttgttctaaagcatttagcaatgcatcggacagagcaaagcaccagaaccggacacattctaacgagaagccatatgtctgcaagctcccgggatgtaccaagaggtacacagatccctcttctctacgcaagcatgtcaagactgtccacggcccagatgcccatgtgaccaaacgtcaccgaggtgatggccctctccccagagcccctagtatttctacagtggagccgaagagagaacgcgagggcggaccaatccgagaagaaagcagactgactgtgccagaaggagccatgcctcctcaccctcaaccactgttttcacattacccccagcctagccccccacagtacttgcagagtgggccttacactcagccgccacccgattacttgccctcagagcccaggccttgcctggatttcgattcccctacacatagtactggccagctcaaagcacagctcgtgtgcaactacgttcagagccagcaggagttgctgtgggaaggagggggacgcgaggacgccccagcccaggagccttcttaccaaagccctaagttcctaggcggtagccaggtaagtccgtctcgcgctaaggccccagtcaacacatacggccctggctttggcccaaacctgcctaaccataagagtggtagctatccaacaccctctccttgtcacgaaaatttcgtagtcggtgccaaccgcgcatcgcaccgtgcagcagctccacctcgcttactgccccctttgccaacgtgctatggccctcttaaggttgggggaactaacccaagctgtggtcacccagaggtgggcaggctcggtggagggcctgccctgtacccccctcccgagggccaggtgtgtaaccctctggattcactcgaccttgataacacccagctggattttgtggctatattagacgagccacaggggctaagtccacctccatctcatgatcagcgcggttctagtgggcatactccaccgcctagtggccctcctaatatggctgtgggcaacatgtccgtgctcctacgcagtctgccaggcgagactgagttcttgaattccagtgcctag

SEQ ID NO: 28785 - DNA, 390 bp, synthetic construct
  misc_feature 1..390: note = Description of Artificial Sequence: Synthetic coding sequence
  source 1..390: mol_type = other DNA
atgtttaacagcatgaccccacccccaatctccagctatggcgagccttgctgtctccgcccattgccctctcagggagccccaagtgtaggaacagagggactaagcggtccaccattctgccatcaagccaatctgatgtcaggaccacactcgtacggtccagcccgagagaccaactcatgtaccgaagggcctctgttctctagccctcggtcagccgtgaagttgaccaaaaaaagggcattaagtatcagtcccctgtccgacgcctctcttgatctccagactgtgatccgtactagtcccagttccctggtggcgtttatcaacagtcgatgcacatcacctggtggcagctacggacatttgtctattggaactatgtag

SEQ ID NO: 28786 - DNA, 3198 bp, synthetic construct
  misc_feature 1..3198: note = Description of Artificial Sequence: Synthetic coding sequence
  source 1..3198: mol_type = other DNA
atgtttaacagtatgacacccccacccatatcaagttacggcgaaccttgttgtctccgtccccttccatcccagggggcacccagcgtgggcacggaggtgaaactgaccaaaaaacgagcccttagtatctctcccttaagcgatgcctccctggacctgcaaaccgtgatcaggacatctccctcgtccctcgtggcctttatcaatagtcggtgtaccagccctggcggatcatatggccatctgtccattggaacaatgagcccttctcttgggtttcccgcacagatgaaccaccaaaaggggccaagccccagcttcggcgtccagccatgtggcccacatgatagcgcaaggggcggaatgattccccacccgcagtctcgaggaccatttcccacctgtcagctcaaatccgagctggacatgctcgtgggtaagtgtcgagaagagccactggagggcgacatgtcatcgccgaatagcactgggatccaggatccgctgctcgggatgctggatggcagggaagacttagaaagagaagaaaagcgcgagccggaatccgtgtacgagactgattgcaggtgggatgggtgttctcaggaattcgattcacaggagcagctggttcatcacattaatagtgagcacattcacggggaaagaaaggagttcgtatgtcattggggagggtgtagtcgcgaactgagaccgtttaaggcccaatatatgcttgtcgttcacatgaggcgccacactggcgagaagcctcataaatgtacttttgaaggctgtagaaagagctatagtcgtttagagaatctcaaaacccacttgagatcacacacaggagagaagccctatatgtgtgagcatgaaggttgtagtaaggctttcagcaatgcttcggaccgcgcaaagcaccagaacaggactcacagcaacgaaaagccttacgtttgcaagctgccaggatgtacaaagcgatacacggatccatcgagccttcggaaacacgtcaaaactgtgcatggtcctgatgcccacgtgactaaacggcatcgaggggatggacccctcccaagggcaccatccatctctactgtggagcctaagcgtgagcgcgaaggcggacccatcagagaagaatctcgtctcacagtgccggaaggagccatgaaaccccagccatcccccggagcacagtctagctgtagtagcgaccactccccggctggctccgcagccaatacagacagtggcgtggaaatgacgggcaacgctgggggatctactgaggaccttagctctttggatgagggaccctgcattgcagggacaggcctgagcacgctgcgacgccttgagaacttacgtctcgaccagttacatcagctgcgccctatcggtacccgtggacttaagctgcctagcctttctcacacgggcactacagtctccaggcgggttgggcctcccgtctctctcgagagacgctcatcctcttctagttcaatcagcagcgcttacacagtctctcggcgaagttcacttgcaagcccgttcccgccagggagcccacctgaaaacggagcatctagcctgccagggctgatgcccgcacagcattacttactgagagccaggtacgctagtgccagaggaggaggcacgagtcctactgcagccagtagtcttgacagaattggaggcctcccgatgcccccatggagaagtagggccgagtaccccggatataaccccaacgccggtgtcacaaggagggcatctgatcctgcccaagccgcagatagacctgctccagctagagtgcagcgattcaagtccctgggctgcgttcatacaccccctactgtcgctggagggggtcagaactttgacccttatctacccacttcagtctatagccctcaaccacctagcattacggaaaacgccgctatggatgctagagggctacaggaggagccggaggtaggtacaagtatggtcgggtctggtctgaacccttatatggatttccccccaaccgacaccctggggtacgggggtccagagggggctgccgctgagccctatggggctaggggtccaggctcactgccccttggccctggccctcccacaaactacggtcctaatccctgtccccagcaggctagttaccccgatcctactcaagaaacctggggggagtttccatctcacagtggactttacccgggacctaaggcattaggcggaacctatagtcagtgccctcgcttggaacattacgggcaggtgcaggtgaaacctgagcagggatgccccgtgggaagcgacagcactggccttgctccatgcctaaatgcccacccctccgaaggcccacctcaccctcagcctctcttctcacactacccccagccatctcctccacagtacctacagtcgggcccttacacgcagcccccacctgactacctgccttccgaacccagaccttgtctggacttcgattctcccacacattcaactggccagctgaaggcacaactggtgtgtaattatgttcagtcacagcaggaactgctgtgggagggcggagggagggaagacgccccagcgcaggaacccagctatcagtctccaaaattccttggtggatcacaagtgagtccaagtcgggctaaagccccagtgaacacttacggcccaggctttggccctaatctccccaaccacaaatctggttcctacccaactccctccccttgtcatgaaaatttcgtggtgggcgctaacagagccagccatagggccgctgctccaccacgcctgctgccccctctgcccacctgttatggacctcttaaagtgggaggtacaaacccatcttgcggacatccggaagtgggcagattggggggtggccctgccctgtatcctcctcccgaggggcaggtttgtaatcccctggatagcctggacctggacaatactcagctggacttcgtggctatactggatgagccacaaggcctatcccctcctccatctcacgaccagaggggaagctcaggacacactccaccaccaagcgggccacctaacatggcagtaggcaatatgtccgtgctactcagatctctgccaggagaaaccgaatttttgaacagctcagcctag

SEQ ID NO: 28787 - DNA, 528 bp, synthetic construct
  misc_feature 1..528: note = Description of Artificial Sequence: Synthetic coding sequence
  source 1..528: mol_type = other DNA
atgagccctagtctgggctttccggctcaaatgaaccaccagaagggtccttcccctagtttcggggtgcagccatgtggacctcatgatagcgccagggggggaatgattccccacccccagtcccgtggtccatttcctacctgtcaactgaaatcagagctggacatgcttgtagggaagtgccgggaagaacccctcgaaggcgacatgtcttctccaaattctactggtattcaggacccccttttgggtatgctggatggcagagaggatttggaaagagaggagaaacgcgagcctgaaagcgtgtacgagacggactgtagatgggatggttgcagccaggaatttgattctcaggaacagctcgtacaccacatcaattccgagcatatccatggcgagaggaaggagtttgtttgccactggggtggctgcagcagggagctgcgcccattcaaggcacagtacatgctggtggttcatatgaggcggcacacaggggagaagccccacaaatgttag

SEQ ID NO: 28788 - DNA, 2937 bp, synthetic construct
  misc_feature 1..2937: note = Description of Artificial Sequence: Synthetic coding sequence
  source 1..2937: mol_type = other DNA
atgagtccttcactcggttttcctgcccagatgaatcatcaaaaggggccttccccaagttttggcgtccagccctgcggtccccatgactctgcccgaggtggcatgatcccccaccctcagagcaggggaccttttccgacttgtcagctgaagagtgagctggatatgttggttgggaagtgccgagaagagcccctagaaggggatatgtcctctccaaactccaccgggattcaagatcccctgctcggaatgctcgatggccgtgaggacttggagcgcgaagaaaagagggaaccagagagcgtctatgagaccgattgccgttgggatggttgtagtcaggagtttgactcgcaggagcagctggtccaccatataaacagcgaacacatacacggagaacgtaaagaatttgtttgccattggggaggttgttcccgggagcttcgaccattcaaggcccaatatatgctggtggtacacatgcgacgccatactggcgaaaagccccataagtgtacctttgaaggatgcaggaagtcatattccagactggagaatttgaagacacacctgaggagtcacacaggggagaaaccgtacatgtgtgaacatgaaggatgctccaaagcgttttcaaacgctagtgatcgagcaaaacaccagaatagaacccactccaatgaaaagccctacgtgtgtaagctgccaggttgcactaaacggtacactgacccttcgtctctgaggaaacatgtcaaaacagtgcacggccctgatgcccatgttacaaagcgacacagaggggatggaccactcccacgggctccttccatttcgacggttgaacccaaaagggagcgggaaggaggccctattcgagaggaaagcaggttgactgtgccagaaggagccatgaaaccccaaccatcccccggtgcacagtcatcctgttcatctgatcatagtccggctgggagcgccgctaacacagacagcggggtcgaaatgactgggaatgctggcggatcaacagaagacttgagcagcctggacgaaggaccctgtattgctgggaccggactaagcacccttagaaggctggagaatctacggcttgaccagctccaccaacttagacctattggaactcggggtctgaagttgcctagcttgtctcacactggcactacagtgagtagacgggtcgggccaccggtctccctggaaagaaggtccagctccagtagctccatatcatctgcatataccgtttctagacgcagctccctcgcttcaccatttcctccgggttcccctcctgaaaatggtgcctctagcctgcccggactgatgcctgctcagcattatttactgcgtgcgagatacgcttctgctcgaggcggaggtacatcacccactgccgcttcatcacttgacagaatcggaggactgcccatgccaccatggagaagcagagccgagtatccaggatataaccctaatgccggtgttacacggcgagccagcgatccggctcaggccgctgaccgacctgcacccgctcgcgtgcagagatttaaatcgctgggctgcgtccacactccacccaccgtcgccggtgggggacaaaacttcgacccctatctgcccacctccgtgtacagtccacagccaccctccatcacggaaaatgccgctatggatgcccgtggcttacaggaggaacctgaagtagggacctctatggtggggtccggcctgaatccctatatggattttcctccgacagacactctggggtacggaggacccgagggcgcagctgctgagccctatggagctcgcggtccaggaagcttacctttgggaccgggtccccctacaaactacggccctaatccttgcccccagcaggctagttaccccgatcctactcaagagacctggggtgagttcccttctcactccgggttataccccggtcccaaagctcttggaggaacctattcacagtgtcctaggctggagcattatggccaggtccaagtgaaaccagaacagggttgccctgtggggagcgattccaccggactggccccttgtctaaatgcccacccttccgaggggcctccacacccacagcccctcttctctcactatccgcagccatcaccgccacaatacctgcagtcgggtccatacacgcagccccctcccgattacctgccatccgaacctaggccttgcctggatttcgactccccaacccactctacgggccagctgaaagcccagttagtctgcaactatgtgcagagtcagcaggaactgctatgggaagggggagggagagaggacgcacctgcccaggaaccatcttatcagagccctaaattcctggggggatcccaggtgagtccttctcgggctaaggcacctgttaacacgtatgggccaggttttggtccaaacctgcctaatcataagtctggatcataccccacaccatcaccctgccatgaaaattttgtcgtgggagccaaccgtgcctcccatcgagccgcagcgccaccacgcctactgcctccactacctacctgctacggcccactcaaagtggggggtactaatcctagctgtggccacccagaagtggggagactcggcggtggcccagcactgtatccacctcctgagggccaggtgtgtaatcccctggattcactggaccttgacaatactcagctcgatttcgtggctattctggatgagccacagggcctctccccccctccctcccacgatcagcgcggatcgagcggacacacaccccctccttcaggacctcctaacatggctgtcggcaacatgtccgtgttactcaggtctctcccaggggagaccgaattcctcaactcttccgcctag

SEQ ID NO: 28789 - DNA, 135 bp, synthetic construct
  misc_feature 1..135: note = Description of Artificial Sequence: Synthetic coding sequence
  source 1..135: mol_type = other DNA
atgtcaggtcctcattcttatgggcctgccagagagaccaattcctgcacagagggccctcttttttcctcgcctcgaagtgctgtaaagctcactaaaaaacgtgcacttagcatctctccactcagtgattag

SEQ ID NO: 28790 - DNA, 3198 bp, synthetic construct
  misc_feature 1..3198: note = Description of Artificial Sequence: Synthetic coding sequence
  source 1..3198: mol_type = other DNA
atgtttaacagcatgacaccgccacctatcagttcctatggcgagccttgctgcctgcgacccctcccctcacagggcgctcccagtgtgggaaccgaggtgaagttgaccaagaaaagggcgctgagcattagtccgttgtcagacgcttctttggacctacagaccgtcataaggacatccccttcctctctcgtggctttcatcaattctcggtgcactagtccagggggtagttacgggcacttatccattggcacaatgagtcctagcctcggatttcctgctcagatgaaccatcaaaagggtccgtctcctagcttcggagtgcaaccatgtggaccccacgactcagcccgaggagggatgatcccacaccctcaatcccgtgggccattccccacatgccagctgaagtcggagctggatatgctggtcgggaaatgcagagaagagcctctcgaaggcgatatgagtagccccaacagcaccggaatccaagatcctctgctgggtatgctcgacggacgggaagatctcgaacgcgaggagaaacgtgagcccgagtcagtatacgagacggactgcagatgggacggatgttcacaagagttcgacagtcaggagcagctggtccatcacattaacagcgagcacattcatggcgagcgcaaggagttcgtatgtcattggggcggatgcagccgcgaactgcgaccatttaaggcacaatatatgttggtggtgcatatgcgtcgtcatactggtgagaaaccccataagtgcacgttcgaaggttgccgcaaatcttacagtaggttggagaatttaaagacgcatctccggagtcacaccggcgaaaagccatatatgtgtgagcacgaggggtgctctaaggccttctccaatgcgagcgaccgagccaagcaccagaatagaacacattcaaacgaaaagccatacgtgtgcaagctgcctgggtgtactaagaggtataccgatccgagctcccttcggaagcacgtcaagaccgtccacggaccggatgcccacgtcacaaagagacaccgcggtgatggaccacttccgagggctccttctatttccaccgtggaaccaaaacgggaaagagaaggagggcctatccgcgaagaaagtagacttacggtgccggaaggagctatgaaacctcagcccagcccaggcgctcagtcatcctgttcatcagatcatagtccggctggatcggccgcaaacacggattcaggcgtggaaatgacaggaaacgctggaggtagcaccgaagacttgagctctctggacgagggtccatgtattgcaggcactgggctgagcactctccggcgtctggaaaacctccgtcttgatcagctgcaccaactcaggcctattggaaccaggggccttaagctccccagtcttagccacacaggaacgaccgtgtctcggagagtaggaccccctgtgagcttagaacggcgaagctccagctcatcaagtatttcttccgcctatacagtctcaagacgctcgagtctcgcctcccctttccctcccggaagccctccagagaatggagccagctcattaccaggactaatgcctgcccaacattatttactgcgggctcgctatgctagcgcccgtggagggggaacttcccctacagcagcaagcagcttggacaggatcggcggactgccgatgcccccttggaggagccgagctgaatacccaggctacaaccctaatgctggggttacccgcagggcctccgatccggctcaagcggcagacaggcccgctcctgccagagttcagagatttaaaagcttgggatgcgtgcacacacctccaaccgttgctggtggtgggcagaattttgatccttatttgcccacgtcagtgtacagcccccagcccccttctataacagaaaacgccgctatggatgccagagggcttcaggaagaaccggaggtgggcacatcaatggtggggagcgggcttaatccatatatggactttcctcccacagatacactgggatatgggggacccgaaggagccgcagctgaaccttacggcgcacgaggaccgggttctctgcccctgggcccaggccctcctaccaactacgggccaaatccctgcccgcagcaggctagctaccctgacccaacacaggagacttggggtgagtttcccagtcactctggactctatcctggacctaaagctctcggaggtacctacagccagtgccccagactggagcattacgggcaggtccaagtcaagcccgagcaaggttgtcccgtgggctctgattctactggcctcgctccctgtttaaacgcccaccccagtgagggccctccgcacccccagcccctgttttcccattatccccagccatcacctccccagtacttgcagagcgggccttatactcagcccccaccagactacctgccgtctgaacccaggccgtgtctagatttcgactcacccacacattccaccgggcagttaaaagctcagctggtatgtaactatgtgcagtcccagcaagaactcctgtgggaaggcggtggacgcgaagacgccccagctcaggaaccctcatatcaaagtcctaagtttctgggcggaagtcaagtgagccctagcagagcaaaggcacctgtgaacacatatggacccggatttggaccaaacctgcctaaccacaaatctggatcctatccgactccttcaccatgtcacgagaatttcgtggtcggcgcaaatcgcgcatcccacagagccgctgcgcctcccaggctgttgccccctctccctacttgctacggccctctgaaggtgggtgggacgaaccctagttgtggccacccggaagtgggcaggttgggcggtggacccgctctatatcctcctccggaaggacaggtgtgtaatcccctcgactctctggatctggataatacgcagctagacttcgtggccatcctggatgaaccacaggggttatctcccccaccgagccacgatcagcggggatcttccgggcacaccccccctccttccgggcctccaaatatggctgtaggcaacatgtcagtgctgttaagatctttgccaggggagactgaatttcttaactcttctgcctag

SEQ ID NO: 28791 - DNA, 1548 bp, synthetic construct
  misc_feature 1..1548: note = Description of Artificial Sequence: Synthetic coding sequence
  source 1..1548: mol_type = other DNA
atggctgagcaggtcgccttgagcaggacgcaggtttgtggaatcctgagagaagagctgttccagggtgatgccttccaccagtccgatacccacatatttattataatgggcgcatctggcgacctggcaaagaagaagatctatccaaccatctggtggttgtttagggatggacttctgccagaaaatacattcattgtggggtatgccaggagtcggctaacggtggcagacattaggaaacagtctgaacctttcttcaaggcaacaccagaagaaaagcttaaactcgaagatttcttcgccaggaactcatacgttgctgggcagtacgatgacgcagcttcttatcaacgccttaattcccatatgaatgccctgcacctcggttcccaggctaatcgactcttctacttggccctaccccctactgtctacgaagctgtgacaaaaaacatccacgaaagctgcatgagccaaattggctggaacagaattatcgtcgaaaagcccttcggtcgggatctccagagctccgacagattgagcaaccacatttcgtctttatttcgggaagatcagatttacagaattgaccattatcttggtaaggaaatggttcaaaacttgatggtgttgaggttcgccaacagaatattcgggcctatctggaatagagacaacattgcctgcgttatactaactttcaaagagcccttcggaaccgaaggcagggggggttactttgatgaatttggtatcatcagagatgtcatgcagaatcatctgttgcaaatgctatgcttggtggctatggaaaagccagcttctacgaactctgacgacgttcgtgatgaaaaggtgaaagttctcaagtgtatcagcgaggtgcaagccaacaacgtcgttctaggccaatacgtgggaaaccctgatggtgaaggggaggccacgaaaggctacctggacgaccccaccgtcccacgtggaagcacaactgcaacttttgcggctgttgtgttatatgtggaaaatgaacgttgggacggcgtccccttcatactgcgatgcgggaaggcattgaatgaaagaaaggcggaggtacggctacagttccatgacgttgcaggggatatatttcatcagcagtgcaagcgaaatgagttggtgattagggttcagcctaatgaagcagtttacactaaaatgatgaccaaaaaacccggtatgtttttcaaccctgaggagtccgagctggacctgacgtatggaaatcggtacaagaacgtaaaactgcctgatgcatacgaacgtctgattctggatgtgttctgcggtagccagatgcacttcgtccggtcggatgaactgagagaggcctggcggatatttaccccgctcctgcatcaaatcgagctggagaaacctaagcccattccatatatctacggaagccgcggtcctactgaggctgacgaactcatgaagcgagtgggattccagtacgaggggacttacaaatgggtcaatcctcacaagctgtag

SEQ ID NO: 28792 - DNA, 1686 bp, synthetic construct
  misc_feature 1..1686: note = Description of Artificial Sequence: Synthetic coding sequence
  source 1..1686: mol_type = other DNA
atggccgaacaagtggcgctgtcccgtacacaagtgtgcggcatcctcagggaggaactcttccagggcgatgcctttcaccagagcgatactcacattttcatcatcatgggtgcatctggtgacctcgcaaagaagaaaatttatcctacgatctggtggctgttcagggacggccttctcccagaaaacacgtttatagtcggatatgcgagatcccgcttgaccgtcgccgacattagaaagcagtcggagccattttttaaggctacgcctgaagaaaagcttaagctcgaggatttctttgcgagaaactcttacgtggcaggccagtatgacgatgctgcttcttaccagaggttgaactcccatatgaatgccttgcatctcggcagccaggctaataggcttttctatttggccctgccgccaacagtgtatgaagcagtcaccaaaaacattcacgaatcctgcatgagccaaatcggatggaaccgaattatagttgaaaaaccctttggacgcgacctgcagtcgagcgataggctgtccaaccacatttccagtctgttcagggaggaccagatctatcgaatcgatcactacctgggaaaagagatggtccagaacctcatggttctgcggttcgctaacagaatattcgggccaatctggaacagagacaatatcgcatgtgtcatcctcacatttaaagaacccttcggcacagaggggaggggcggatacttcgatgaatttgggataatacgagggcctgggaggcaaggaggatccggatccgagtcatgcagcttgtcactaggaagtctcgtctgggggcctcatgccctggagcctggagaacagggcggagaattgcgtcgcgcactcgccagctctgtaccacgggatgtcatgcaaaaccatttgctacaaatgctttgtctggtggccatggaaaagcccgctagcacaaactcggacgatgttagggatgagaaggttaaggtacttaagtgtatttcagaggtgcaggctaataacgtagtactgggccagtacgtgggaaatcccgacggtgagggggaggcaactaaggggtatctggatgaccccaccgtgccaaggggcagcacaaccgccacatttgcagccgttgtgctgtatgtggaaaacgagcgttgggatggggtccctttcatattacggtgcggcaaggctctgaatgaaaggaaggccgaggttaggctgcaatttcacgatgtcgcaggggacattttccaccaacagtgcaagcgaaacgaacttgttatccgagtacagcctaacgaggctgtttacacaaagatgatgaccaagaagcccggtatgttctttaaccccgaggaatctgagttagacttaacgtatggcaataggtataagaacgtaaagctcccagacgcctatgaacgcctcattttggatgtgttttgcggctcccagatgcactttgtccgctctgatgagttgcgggaggcatggcggatctttacgcctctcttgcatcagatagagctcgaaaagcctaagcccataccctacatttatggaagccgcggaccaaccgaagccgacgaactcatgaaacgagtgggatttcagtatgaaggtacgtataagtgggtcaacccacataaattgtag

SEQ ID NO: 28793 - DNA, 1638 bp, synthetic construct
  misc_feature 1..1638: note = Description of Artificial Sequence: Synthetic coding sequence
  source 1..1638: mol_type = other DNA
atgggcagaagggggagtgctcctggcaacggcagaacgctgcgaggatgtgaacgcggaggccgacggcgacggagcgcagactctgttatggccgagcaggtggccctgagccgaacccaggtctgcgggattctgcgcgaagagctgttccaaggcgatgcgttccaccagtccgacactcatattttcataatcatgggagccagcggtgacctagccaagaagaagatttatccgactatctggtggctcttcagagacggtcttctgccggaaaacacatttatcgtcggatacgcaagatcacgcctgactgtggccgatatcaggaaacaatcagagccgttctttaaggccacccccgaggagaagcttaagctggaagatttctttgcacggaactcctacgtggctgggcaatacgatgatgcggcatcatatcagaggctgaattcgcacatgaatgctctacaccttggcagccaggctaacaggcttttctacctggcgctccccccaactgtgtacgaggccgtaaccaaaaatattcacgaaagttgtatgtcccaaataggctggaacaggattatagtcgagaaaccttttggtagagacctccagtcttccgatcgcctgtcaaaccacatttcctccctgttccgagaagaccaaatctataggatcgaccactatttgggtaaagagatggtgcaaaatctgatggtgctgagattcgcaaatcgtatctttggcccaatctggaaccgcgacaatatagcttgtgtaatcttgactttcaaagagccctttggaaccgagggccgaggaggctactttgacgagtttggaataatccgtgacgtgatgcaaaatcatctcctgcagatgctgtgtttagtagccatggaaaaaccagcctctactaatagcgatgacgtgagggacgaaaaggttaaagtcctaaagtgcattagtgaggtgcaggccaataatgtcgtgctgggtcaatatgtgggaaaccctgacggcgaaggggaagccacaaaaggttacctcgacgatcccaccgtgccaagaggctcaaccaccgccactttcgccgcagtcgttttgtacgtggaaaacgagcgctgggacggagtcccctttattctgaggtgcggcaaagctctaaatgaacgcaaagctgaagtgcgactgcagtttcacgacgtcgcgggagacattttccatcagcagtgcaagagaaacgaactggtaattcgcgtacagccaaacgaagctgtctacactaaaatgatgacaaaaaagcccggaatgttcttcaatccagaagaaagcgaattggatcttacttacgggaacaggtacaaaaatgttaaattacccgatgcctatgagcgcctgatcttggacgtgttttgtggttctcagatgcacttcgtaagatcagatgagttgagagaagcctggagaattttcactccattgctgcaccagatcgaactggagaagcctaaacccataccttatatctacggcagccggggtcccactgaggctgacgagttaatgaagagggtgggcttccagtacgaggggacatacaaatgggtgaacccgcacaagctgtag

SEQ ID NO: 28794 - DNA, 1548 bp, synthetic construct
  misc_feature 1..1548: note = Description of Artificial Sequence: Synthetic coding sequence
  source 1..1548: mol_type = other DNA
atggccgagcaggtggccctcagtcggactcaagtctgcggaattcttcgcgaggaactctttcaaggagacgccttccaccagtctgacacgcacatcttcataatcatgggggctagcggggacctggctaagaaaaagatatatcccaccatctggtggctttttagggatggactcttacctgaaaacacgtttatcgtgggttacgccaggtcccggctcactgtagcggatatcaggaagcagtcagagccgttttttaaggcaacacctgaagagaagctgaaactggaggacttttttgctagaaactcatacgttgccggacagtatgatgatgcagcctcatatcagcgcctgaattcccatatgaacgccctgcacctgggaagtcaggcgaatagactgttctacctggctcttccaccgaccgtctacgaggcggttaccaagaacatccatgaaagttgcatgtcccagataggatggaatcgaataatagtggagaagccttttggacgcgatttacagtcatctgaccggttgtcaaatcatatctcgagtctgtttagagaagaccagatctaccgcatcgaccattatctgggcaaggaaatggtgcagaacttgatggtccttaggtttgccaatagaatctttggaccaatctggaatcgggacaacatcgcctgcgtcatcctcacatttaaagagccctttggcaccgagggaagaggtggctatttcgatgaatttggcatcatcagggacgtcatgcagaaccacttactacaaatgttatgtcttgtcgctatggagaagcccgcttctacaaattcagatgacgtcagggatgagaaggttaaggtccttaagtgtatcagcgaagtgcaggccaataacgtggtactaggccagtacgtaggcaacccggatggggagggtgaagctaccaagggttacttggacgatccgaccgtgcctagaggatccaccacagcaacatttgcagccgtggtgttgtacgtggagaacgagaggtgggacggagtgccattcatcttacgatgcggcaaggctctcaacgaaaggaaagctgaggtgaggctccaattccatgacgtcgccggagatatttttcaccaacaatgtaaacggaatgagctggttataagagttcagcccaatgaggcagtgtatacaaaaatgatgaccaaaaaacccggtatgttttttaaccccgaggagtccgaactcgatttgacttacggaaaccgctacaagaatgtgaaactacccgacgcctatgaacgcctgattctggatgtgttttgtgggtctcagatgcattttgtcaggagcgacgagcttagagaagcctggagaatcttcacccctttactgcaccagatcgagctagaaaaacctaagccaataccatacatctatggcagccggggacccaccgaggctgatgaactcatgaaacgtgtgggcttccaatatgagggcacctacaagtgggtgaacccccataagttgtag

SEQ ID NO: 28795 - DNA, 771 bp, synthetic construct
  misc_feature 1..771: note = Description of Artificial Sequence: Synthetic coding sequence
  source 1..771: mol_type = other DNA
atggccgagcaagtcgcgctcagtcgaacacaggtctgcgggatcctaagagaggagttattccagggcgacgcattccaccagagcgatactcacatatttatcatcatgggagccagcggagatttggctaagaagaagatctaccccactatctggtggctgtttagggacggtctcctgcccgagaacacatttattgtgggttacgctcgctcccgacttacagtcgcggacatcaggaagcagtcagagcccttctttaaagcaacacccgaagagaagttgaaactggaggattttttcgcccgtaattcgtatgtggcaggccagtatgacgacgctgcctcctatcaacgattgaactcacacatgaatgccttgcaccttggatcccaagccaatagactattttaccttgcactgccacctactgtttatgaggcggtgaccaagaacatccatgagtcctgtatgagccagatcgggtggaaccgaattattgtggagaagccctttggacgcgatctgcagtcctctgataggctctccaatcacatctccagtctgttccgcgaggatcagatctatcggatcgaccattatctgggaaaggaaatggtgcagaacctaatggtgttacgcttcgctaacagaatctttggccctatttggaacagagacaacatcgcttgcgtgatccttactttcaaggagccatttggcacagagggcaggggaggctatttcgatgagttcggtattatctag

SEQ ID NO: 28796 - DNA, 681 bp, synthetic construct
  misc_feature 1..681: note = Description of Artificial Sequence: Synthetic coding sequence
  source 1..681: mol_type = other DNA
  modified_base 217: mod_base = OTHER; note = uracil
atggcaagactgcttcaggcttcctgcctgctgtccctgctcctggctggcttcgtgagtcagagtagaggccaagagaaaagcaaaatggattgccacgggggtatatctggcaccatatacgagtacggcgctctcactattgatggagaagagtacatccccttcaagcagtacgctggaaaatatgtgctgttcgtcaacgtagccagctactgaggcctgaccggccagtacattgagctgaatgccttgcaggaagagctggccccttttgggttggttattctggggttcccttgtaaccagttcggcaagcaggagccaggggagaattctgagattctgcctacactgaagtacgtgaggccaggaggcggatttgtgcccaactttcagttgtttgaaaagggggacgttaatggcgagaaggaacagaagttctatacattcttgaaaaactcatgccctccaacctcagagttactcgggacgtcagaccgtcttttttgggaaccgatgaaagtccatgatattaggtggaactttgagaagttcttggttgggcctgacggaatccctattatgcgatggcatcaccggaccaccgtctcaaacgtaaaaatggatatcctgtcatatatgaggaggcaagcagccttgggggtgaagaggaaatag

SEQ ID NO: 28797 - DNA, 219 bp, synthetic construct
  misc_feature 1..219: note = Description of Artificial Sequence: Synthetic coding sequence
  source 1..219: mol_type = other DNA
atggccagacttttacaggctagctgtcttttgagtctcctcctcgctggcttcgtgtcgcaatctcgaggccaggaaaaatcaaaaatggactgtcacggcggtatcagcggaaccatctacgagtatggggcactgacaattgatggagaggaatacatacccttcaaacagtacgctggcaaatatgtactcttcgtcaatgtcgcttcatattag

SEQ ID NO: 28798 - DNA, 633 bp, synthetic construct
  misc_feature 1..633: note = Description of Artificial Sequence: Synthetic coding sequence
  source 1..633: mol_type = other DNA
atgccaccctatacagtggtgtatttcccagtccgcggacggtgtgctgccctgcgaatgctgttagctgatcaaggacaaagctggaaggaagaggtggttaccgtggaaacgtggcaggagggttctctgaaggcatcatgtctgtatggtcagcttccaaagttccaggatggagatctcaccctgtaccaatcaaacaccatccttaggcatcttggccgtacattgggtctctatggtaaagatcagcaggaggctgccctcgttgacatggtgaatgacggggtcgaggatttgaggtgcaaatatatttctctcatctatacaaactatgaggccggaaaggatgactacgtgaaggcattgcctggccaactaaagcctttcgagacactgctctctcagaatcagggtgggaagacttttatcgtgggagaccaaatttcttttgcagactacaatctgctggatctgctgctgattcacgaagttttggccccaggctgtctggatgcgttccccctgctgtccgcttatgtgggtcgcctgtctgcccgtcccaaactgaaggccttcctggcttctcccgagtatgtcaacctcccgatcaacggtaatggcaaacagtag

SEQ ID NO: 28799 - DNA, 2184 bp, synthetic construct
  misc_feature 1..2184: note = Description of Artificial Sequence: Synthetic coding sequence
  source 1..2184: mol_type = other DNA
atggcctttcagaaggccgtgaaaggaaccatcctggtgggcggaggagctctggccacagtccttggtctgtcccagttcgctcattatagaagaaagcagatgaacttggcatacgtgaaagcggctgactgtatcagtgaacctgttaaccgagagcccccatccagagaggcgcaattactgacactgcagaacacatcagaattcgacatccttgtgattggaggaggcgctacaggatctggctgcgcactggatgccgtcacaaggggacttaaaacagctcttgtggagagggacgactttagtagcggcacgtcaagcaggtcaacaaaactgatccacggcggagtccgctatctccagaaggccattatgaagctcgacattgaacagtacagaatggttaaggaagctctgcatgagagggccaacttgctggagatcgccccacatctgtccgcccctctgccgattatgctcccagtgtacaaatggtggcagctgccctattactgggttggcatcaaactgtacgacctggtggccggatccaactgtcttaagtcatcctacgtgctgtctaagtcccgagccctggagcacttccctatgttacaaaaagacaagttggtgggggcaatcgtatattacgacgggcagcacaatgatgccagaatgaacctggccattgcacttactgctgcacggtacggagctgccaccgccaattacatggaagttgtttcactcctgaaaaagaccgaccctcagaccggcaaagtacgcgtatctggagctcggtgtaaagacgtccttaccggccaggagttcgatgtccgagctaagtgcgtcataaacgccaccggaccctttacagactcagtacgcaagatggacgacaaggatgccgctgccatatgccagccaagtgctggagtccacatcgtgatgcccggttactacagccccgaatctatgggcctgctagatcccgcaacatcagatgggagggtgatattttttctgccctggcaaaagatgactatcgccggaaccaccgatactccgactgacgtcacacaccacccaattccatcagaagaggacatcaacttcattttaaacgaagttaggaactatttatcatgcgatgtggaagtccggagaggggatgtcctcgcggcatggagtgggattagacctctggtaacggatcccaagtcagctgacacacagagcatcagtaggaaccatgtcgtggatatcagtgagtctggcctaatcaccattgccggaggtaaatggactacttaccggagcatggccgaggacacaatcaacgccgcagtcaaaactcataacttaaaagccggaccaagcagaacagtcggtttgtttctccaaggaggaaaggactggtccccaaccttgtacattcgtctagtacaggactacggcctggagagtgaggtggcccagcacctagcagctacttatggggataaagccttcgaggtcgctaagatggcctcagtgactgggaagaggtggccaattgtgggggttcgcctggttagcgaattcccttacatcgaagccgaggtcaagtacggtattaaggagtacgcgtgtaccgccgttgatatgatttctaggcgtacccgtctggctttcctgaatgttcaggccgctgaggaagccctcccaaggattgttgaattgatgggcagagagctgaactgggacgactacaagaagcaggagcagctagagactgctcgaaagtttctttactacgagatgggatacaagtcccgtagtgaacaactgactgacaggtccgagatttcgctgctgccatccgacatagaccgttacaaaaagcgattccataaattcgacgcagaccagaaggggttcataaccattgttgacgttcagcgggtacttgaatcaataaacgttcaaatggatgaaaacaccctccacgagatactgaacgaggtggatttaaacaagaatggccaagttgagctgaacgagttcctccaactgatgtctgccatacagaagggcagggttagcgggtctagactcgcaattttgatgaaaaccgctgaggaaaatctggataggcgtgtccccatccctgtggaccgatcatgcggcggtttgtag

SEQ ID NO: 28800 - DNA, 1503 bp, synthetic construct
  misc_feature 1..1503: note = Description of Artificial Sequence: Synthetic coding sequence
  source 1..1503: mol_type = other DNA
atgaatctggcaattgcacttacagccgctcgctacggagccgcaacagctaactacatggaagtggtgtccctgcttaagaaaactgaccctcagactggcaaggtgagggtctctggcgctcgctgtaaggatgtgctaacagggcaggagtttgacgtgagagccaaatgtgtgattaatgccacagggccatttacagactcagtcagaaagatggacgataaagacgctgcagccatctgccagccatctgccggagtccacatcgtcatgcctggctattacagtcctgagtcaatgggtcttctggatcctgctacctctgacggtagagtcatttttttcctcccatggcaaaaaatgacaatcgcgggaacaacagacacccccactgatgttactcatcacccgatccctagcgaggaagacattaattttatccttaatgaggttcggaactacctgagttgtgatgtggaagttcgccgaggagatgtgctcgcggcttggagcggaatcagaccactggttacagatcctaagagtgccgacactcagtcaataagcaggaatcatgttgtagacatctccgagtccggattgatcacaattgccggaggcaaatggacaacctaccgtagtatggccgaggacactataaatgctgccgtaaagacgcataatctgaaggcgggtccctcacggactgtcggattgtttctccaaggaggaaaggactggagccccaccctttacattagattggtccaggactacggcctcgaatccgaggtagcgcagcatcttgctgccacgtacggggacaaagccttcgaggtggctaagatggcaagcgtaacaggcaagcggtggccaatcgtgggagtccgtctggtatccgaatttccatacatcgaggcagaagtgaagtatggcatcaaagagtatgcatgcaccgccgtcgatatgatttctcgccgaaccagactagcctttcttaatgtccaggccgcagaagaggcattgcccaggatcgtggaactgatggggcgtgagttaaattgggatgattataagaagcaggaacagttagagactgccaggaagttcctgtattacgagatggggtacaaatctagatcagaacagctaaccgacaggtccgaaattagcctgttgcctagtgacatagatcggtacaagaaaaggttccacaagttcgatgccgatcagaagggtttcatcacaattgtagatgtgcagagggtgttagagtccataaacgtgcagatggatgagaacactctgcatgagatcctgaacgaggtggacctgaacaaaaatggacaggttgagctgaatgagttcctccagctgatgtcagccatccagaagggacgcgtttccggttccagacttgctatcctgatgaagacagccgaggagaatcttgatagacgggttccaatacctgtcgatcggagttgcggcggactctag

SEQ ID NO: 28801 - DNA, 2184 bp, synthetic construct
  misc_feature 1..2184: note = Description of Artificial Sequence: Synthetic coding sequence
  source 1..2184: mol_type = other DNA
atggcctttcagaaggctgttaaggggactatcctggtcggcggaggggctttggccaccgtgcttggtctgtctcaattcgcccactaccgtaggaaacagatgaatcttgcatatgttaaagccgcagattgcatttctgagccagttaacagggaaccacccagcagggaggcacagctgctgacattgcaaaataccagcgagttcgatattctcgtcatcggtgggggagccactgggtcgggctgtgctctggatgccgtcactcgcggacttaaaactgcgctggtagagcgggacgacttctctagtgggaccagctcccgcagcactaagctgatccatggcggagtcagatatctgcagaaagctataatgaaacttgacatcgaacagtatcgcatggtgaaggaagccttgcatgagcgggcaaatctcctggagatcgctccccatctctccgcacctctacctattatgctaccggtatacaagtggtggcaactcccctactattgggtgggaattaagctctacgatctagtcgctggctccaactgcctgaagtctagttacgtgctgagtaagtctcgcgctttggagcactttccgatgttgcagaaagataaactggtcggcgctattgtctattatgacgggcagcacaatgacgctcggatgaatctggccatcgcactgacagccgctcgctatggagcagcaacggcaaattatatggaagttgtcagcctcttaaagaagaccgatccacagacagggaaagtgcgcgtgagtggagctcgctgtaaggatgtgctgactgggcaggaattcgacgttagagccaaatgtgtcataaacgccaccgggccattcaccgatagcgtccggaaaatggacgataaagacgccgcagcaatctgccaaccctctgccggtgttcacatcgtgatgcccggatattattctcccgaatccatgggtctactggaccccgctacttctgatgggagggtcatttttttcctcccctggcagaagatgacgatcgccggaactacagacacacccaccgatgtgacacatcatcccatcccttcagaggaggacatcaacttcatcttgaatgaagtgaggaactatctctcgtgcgacgttgaagttagacggggagatgtcttagcagcttggtctggaatcagacctcttgtgaccgacccaaaaagcgcagatacacagagcatatcacgtaaccacgtggttgatatttctgagtccggcctgattactatcgccggtggaaagtggactacttaccggtcaatggctgaagataccataaacgcagccgtgaagactcacaacttgaaggctgggcctagcagaaccgtcggcctgttcctccagggcggaaaggactggtctcctaccctttatattagactagttcaggattatgggctggagagcgaagtggcccagcatctcgccgctacttacggagataaagccttcgaggtagctaaaatggcaagcgtgacagggaaaaggtggcccatagtaggggtgagactggtctccgaatttccctacatcgaggcagaggtcaaatatggaatcaaggaatatgcctgcacagcagttgatatgatttcacgcaggacacgactggcatttttaaacgtgcaggcagcggaagaggccctgccccgtatcgtggaactcatgggcagagaactaaactgggacgactacaagaagcaggagcagctcgaaactgctcgcaaatttctatactatgaaatgggctataaaagcagaagcgaacagctcactgatcgctctgagataagcttgttgcctagcgatattgacagatataagaagaggttccataagtttgatgcggaccagaaaggctttatcacgattgtggatgtacaaagggtcctggaatctattaatgtgcagatggatgagaatactctccacgaaatcctgaacgaggtggacctaaacaagaatgggcaggtcgagctaaacgagttcctgcagctaatgtccgccattcaaaaaggaagagtgagcggctctcggctggccattctgatgaaaacggccgaggaaaacctggatcggcgtgtgcccatcccagtcgaccgaagctgtggtggtctatag

SEQ ID NO: 28802 - DNA, 2184 bp, synthetic construct
  misc_feature 1..2184: note = Description of Artificial Sequence: Synthetic coding sequence
  source 1..2184: mol_type = other DNA
atggcgtttcagaaagccgtgaagggcacaatcctcgttggcggaggcgctctcgccaccgttcttgggctttctcagtttgctcactatcgtcgtaagcagatgaacttagcttatgtgaaagcagccgactgcatcagcgagcctgtcaaccgggagccaccttctcgcgaggcacagctactgaccctccaaaacacgagtgaatttgacatccttgtgatcggcggtggcgctaccggttccggctgcgccttggacgccgtgaccagaggcctgaagacggcattagtggagagagacgatttttcctccggtaccagttcccggtctactaaactgatccacggaggcgtccgttacctgcagaaagctatcatgaaactagacatcgaacagtatcggatggtgaaagaggcactgcacgaaagggctaaccttttagaaattgctccccacctgtctgcacccctgccaattatgttgcctgtttacaagtggtggcaactgccatattactgggtaggcattaaattgtacgacttggtggccggatccaattgcttaaagagttcctacgtgctgagcaagtcaagggctctggaacactttccgatgctacaaaaagacaaactcgtgggggcaatcgtgtactatgacggacagcataacgacgccagaatgaatctggcaatcgcgctgacagcagccaggtatggtgccgcaaccgcaaactacatggaggtggtctcactgctgaaaaagaccgacccccagaccggaaaggtgcgtgtcagtggcgcacgctgtaaagatgtcttgactggccaggagtttgacgtacgtgccaaatgtgttattaacgcaacaggaccgtttaccgattccgtcaggaaaatggacgacaaagatgctgccgcaatctgccagcccagtgcaggggtccatattgtcatgcctggctactacagcccagaaagtatgggtcttctggacccagccaccagcgatggcagggtgatcttcttcttgccttggcagaaaatgactatagcaggtaccactgatacccctaccgatgtgacccaccaccccattccctctgaggaggatatcaactttatcctcaatgaagtgcgcaactatctgagttgcgacgtggaggtccggcgaggggatgtgctcgccgcttggtcgggcatacgacccctcgtgacagatcctaaatccgccgacacccagagcatttcacgcaaccatgtcgtggatatctcagagagcgggctaataactatcgctggcggtaaatggacaacttaccgaagcatggctgaagacacgatcaacgctgccgtgaagacccataatctcaaagccggtccatccagaaccgttggtctgtttctccaggggggtaaggattggagtcccaccctctacatcagattggtccaagattacggactggagagcgaagttgctcagcatttagccgcaacctacggtgacaaagcctttgaggtggccaaaatggcatcagtgacggggaagcgctggccaatcgtcggggtgaggttggtttctgagtttccatatattgaagctgaagtcaagtatggcatcaaggagtacgcatgtacggccgtggacatgatttcccgcagaacccgtctcgcctttctgaatgtccaagcagccgaggaggcccttccccgtatcgttgaactgatggggagggaactcaactgggatgattataagaagcaggagcagctggaaaccgcacgaaaatttttatattatgagatgggatacaaaagcaggtctgagcagttgacagaccgatcagagatctccctgctccccagcgatattgaccggtacaaaaagcggtttcataaatttgatgccgaccagaaagggtttatcactatcgttgacgttcagcgagtactggagtcaatcaacgtacagatggatgaaaacaccctccacgaaatactgaacgaagtagacctgaataaaaatggccaagtggagttgaatgagttcctgcagctgatgtctgcaattcagaagggtcgggttagtggcagtagactggccattttaatgaagacagctgaagaaaacttagatcggcgtgttcccatcccagttgatcgaagctgcggtggcctttag

SEQ ID NO: 28803 - DNA, 330 bp, synthetic construct
  misc_feature 1..330: note = Description of Artificial Sequence: Synthetic coding sequence
  source 1..330: mol_type = other DNA
atggcattccagaaggccgtgaaaggaaccatccttgtgggtggcggtgctctcgccaccgttctgggcttaagccagtttgcccactaccgacgtaaacaaatgaatctcgcctacgttaaggctgcagattgcatttcagagcccgtaaatagggagccgcctagtcgcgaagcacagctcttgacactccaaaatacctcagaattcgacattctcgtaattggtgggggtgcaaccggtagcggttgcgccttggacgcagtgactagggggctgaaaaccgccttagtagagagagacgacttctcctctgggaccagtagttag

SEQ ID NO: 28804 - DNA, 2184 bp, synthetic construct
  misc_feature 1..2184: note = Description of Artificial Sequence: Synthetic coding sequence
  source 1..2184: mol_type = other DNA
atggcctttcagaaggcagtcaaagggaccatcttggtgggtggcggtgcccttgccaccgtgttgggtctgtcgcagttcgcacactaccgcagaaagcagatgaacctggcctacgtaaaggctgcagactgtattagcgaacctgtcaaccgtgagcccccttcccgggaagcccagctcctcacattgcagaatacttcagagtttgacattctggtgatcggtggcggagcaacaggaagcggatgtgccctggatgccgtgacgcgaggacttaaaacagcattagtcgagcgggatgattttagcagcggaactagttcaaggagcaccaaactgatccacgggggagttcggtatctacagaaagccataatgaaattggacatcgaacagtaccggatggtaaaagaagctctccacgagagagctaacctgcttgagatagcccctcacctttctgcccctttgccaatcatgctacccgtatataagtggtggcagctgccctattactgggttgggatcaagctgtatgaccttgtagctgggagtaattgtctcaaatcctcttatgtgttatcgaagagccgcgctctcgagcactttcccatgctgcagaaggataagttagtcggggcaatcgtttactacgatggacagcataacgatgctaggatgaatttggctatcgcattgacagctgcacggtacggcgctgccactgcaaattatatggaggtggtgagcttgctgaaaaagacagacccccagacgggaaaggtgagggtttctggagctagatgcaaagacgtcctgactggccaagagttcgacgtgcgcgctaaatgtgtaattaacgccacaggcccattcacagatagcgtccgcaaaatggacgataaggacgctgcagctatctgccagccttccgcaggcgtgcacatcgtaatgccagggtattattctcccgagagcatgggactgttggatcctgccacaagcgatggcagggtaattttttttctgccttggcagaaaatgaccatcgctggaaccactgatacccctacagacgtcacacaccatccgatccccagcgaagaggacatcaacttcatccttaatgaagttcggaattacttgtcctgcgacgtcgaagtgcggcgaggggacgtgctcgctgcctggtcagggattcgacccctggtgacggacccaaaatctgccgacacccaatcaatatcgaggaaccacgtcgttgacatttctgagagtggcctgataactatcgccggtggtaagtggactacataccgatctatggcagaagatacgattaatgccgcagtcaagacccacaatcttaaagctgggccaagccgtactgtggggctgtttctgcagggtggcaaagattggtctccaaccctgtacatccggctggtgcaggactatggcctcgagtctgaagtggcccagcacctggcagctacctatggcgataaagcttttgaggtcgccaagatggccagtgtcaccggaaaacgatggcccattgtaggcgtgcggttggtatccgagtttccttatatcgaagccgaagtaaagtacggcattaaagagtacgcgtgcaccgccgtcgacatgatttcccgtcgcacacggcttgcattcctgaacgtgcaagcggctgaggaggctctgccgaggattgtagagttgatgggacgcgagctgaactgggacgactacaaaaaacaggagcagctcgaaacagcaagaaaattcttgtactatgaaatgggatataagtcccggagcgaacagttgacggacaggtctgagatctccctgctgccatccgatattgatcggtataaaaagcgcttccacaagtttgatgccgatcagaaaggattcatcaccatcgtcgatgttcagagagtactagagtcaattaacgtccagatggacgagaacactctgcatgaaattctgaacgaggtagacctaaataagaacggccaagtggaattgaatgagttcctgcagctaatgtctgctattcagaagggacgagttagtggatcccgtttagctattctaatgaaaacagcggaggaaaatctcgaccggagagtgccaataccagtggatcggtcttgcggcggactgtag

SEQ ID NO: 28805 - DNA, 1140 bp, synthetic construct
  misc_feature 1..1140: note = Description of Artificial Sequence: Synthetic coding sequence
  source 1..1140: mol_type = other DNA
atggcgtttcagaaagctgtcaaggggaccattctagtgggcggaggggctctagccactgtgctggggctctcgcaattcgcccactatcggaggaaacaaatgaacctcgcctacgtgaaagccgctgactgcatctccgagccagtaaatagggaacctcccagccgggaggcacagcttctgacactgcagaatacatctgagttcgacattctcgtcatcggcggtggggcaacgggtagcggctgtgctctggacgcggtcacacgtggcctgaagacagcgctggtggagagagatgatttttctagcgggacatctagtagaagtactaagcttatccacggcggtgtgaggtatctgcagaaagctatcatgaagcttgacattgaacaataccgaatggtcaaggaggctctgcacgagagagctaacctcctggaaattgctcctcatctgagtgcgccacttcctattatgcttcctgtttataaatggtggcagctgccctattactgggtcggtatcaagctttatgacctggtcgccggttctaattgtctgaagtcgtcatacgtgctgagcaagtcaagagcgttggaacatttccccatgttgcaaaaggataaactggtaggggcaatcgtgtattacgatggccagcacaatgacgccaggatgaatcttgcaatcgctctcaccgccgctcgatatggggcagcgactgcaaactatatggaagtcgtgagcctgttgaagaagacagatcctcagaccggcaaagtaagagtctctggcgctaggtgtaaggacgtgcttactgggcaggaattcgacgtacgagcgaagtgtgttatcaatgccactggcccatttaccgattccgttaggaagatggacgacaaagatgctgctgctatatgtcaacccagcgccggagtgcacattgtgatgcccggttactattcacccgaaagcatgggtctgctggatcctgcaacatcagacggacgggtaatttttttcctgccttggcagaagatgacgattgctggcacgaccgatacacctacagatgtcactcaccaccctattccaagtgaggaggatatcaactttatactgaatgaggtgtag

SEQ ID NO: 28806 - DNA, 1263 bp, synthetic construct
  misc_feature 1..1263: note = Description of Artificial Sequence: Synthetic coding sequence
  source 1..1263: mol_type = other DNA
atgagcggcagacctcggacaacctcattcgcagaaagttgcaaaccagtgcagcagccttccgcctttggatctatgaaggtctctcgggacaaagatgggtctaaggtgactaccgtggtggccacgcccggtcagggtcccgatcggccacaggaagttagttatacagatactaaggtgattgggaacgggagcttcggagttgtgtatcaggctaaactgtgcgactccggtgagctcgtcgctattaaaaaggtgctccaggataagcgatttaagaaccgcgaactgcaaattatgaggaagctcgaccattgcaacatcgtgaggctgcggtactttttttattccagcggcgagaaaaaggatgaggtgtatctgaatctggtgctggattacgttcctgaaaccgtctatcgggtggcgagacattactccagggcaaagcagacactgcccgtcatctacgttaagttgtacatgtaccagctgttcagatcactcgcctacatccactcattcgggatatgtcatagagacattaaaccacagaatttactcctagatccagacacggcggtgttaaaactttgcgacttcggcagtgccaagcagctggtgcggggtgagcctaacgtgagctacatctgctcacgctactacagggcccctgagctgatattcggagctacggattacacctcctccatagacgtctggagcgcaggctgcgttttggctgaactcctgctagggcaacccattttccccggtgactccggcgtagaccaacttgtggagattattaaagttttgggtactcccactagagaacagatcagggagatgaacccaaactatacagagttcaaatttccccagataaaggctcatccttggacaaaggtctttaggccacggactcccccagaggctattgcgctctgcagtagacttctggagtacacccctactgccagactgacaccgcttgaagcctgcgctcactcctttttcgatgagctccgggaccccaacgtcaagctacctaatggtagagacacgccagctttatttaacttcaccacacaggagctgtcttccaatcctcctctagccacaatcctgatcccaccacatgctcgtatccaggctgcagctagtacgccaactaacgccaccgccgcatccgacgcgaataccggcgatagaggtcagactaataacgccgcaagcgcgagcgcctcgaactccacttag

SEQ ID NO: 28807 - DNA, 1302 bp, synthetic construct
  misc_feature 1..1302: note = Description of Artificial Sequence: Synthetic coding sequence
  source 1..1302: mol_type = other DNA
atgagcgggcgtccgagaaccacgtcctttgccgagtcctgtaaaccagtgcagcagccatcagcctttggttccatgaaagttagtcgcgacaaagacggctccaaagtgaccactgtcgttgctacacctgggcagggacccgacaggccacaggaggtgtcatataccgataccaaggtgatcgggaacggatcttttggagttgtataccaggctaaactgtgtgatagcggcgaactggttgcaatcaaaaaggtcctccaggataagaggttcaagaaccgggagttacaaatcatgcgaaaactggatcactgtaatatcgtgcgattgcgctatttcttctatagcagtggggaaaagaaggatgaagtgtatttgaacctggtcttggattatgtgccggaaaccgtataccgggttgccaggcactattccagagccaaacaaaccctgcctgtgatatacgtcaagctctatatgtaccagctgtttcgcagcttagcctatatacactccttcggaatttgtcacagagatatcaaaccccaaaatctgttgttggaccccgataccgccgttctgaagctgtgcgatttcggaagcgctaaacagctggtaagaggggaacccaatgtgtcttacatttgtagtcgatactatagagcgccagaattgattttcggcgctaccgactacacttcatcaatcgacgtgtggagtgccggttgtgtgctggctgaattgctcctgggtcagccaatcttcccaggcgatagtggggtggaccaactagtggagatcattaaagtgctgggcacccctaccagggagcaaattagagagatgaaccccaattatacagagtttaagtttccacaaatcaaggcacacccgtggactaaggacagctctggaacaggacattttacctctggcgttagagtgttccggccaaggaccccacctgaagcaatcgcactgtgctcacgacttctagagtacacacctacagccagattgacccccctggaggcctgcgcgcacagttttttcgatgagttgcgggatcctaatgttaagctgccaaatggacgggacacaccagctcttttcaattttaccacacaggagctcagctccaaccctcccctcgccacaatattgatccctccacatgccaggatccaagctgcagcttctacaccaacgaatgcgaccgctgcaagcgacgcaaacactggcgacagaggccaaaccaacaacgctgcttctgcatccgccagcaactcaacgtag

SEQ ID NO: 28808 - DNA, 315 bp, synthetic construct
  misc_feature 1..315: note = Description of Artificial Sequence: Synthetic coding sequence
  source 1..315: mol_type = other DNA
atgaaccccaactacactgagtttaagtttccccagatcaaggcccacccatggaccaaagttttccggccacggactccgccagaggccatagcattgtgcagccggttattggaatatactcccacagcaagactgacccctctcgaagcctgtgctcattcttttttcgacgagcttagggacccaaacgttaagctccccaacggccgtgatacacctgctctttttaacttcactacccaagatgcaaacacaggcgaccgaggccagaccaataatgccgcttcagcctctgccagcaattccacctag

SEQ ID NO: 28809 - DNA, 837 bp, synthetic construct
  misc_feature 1..837: note = Description of Artificial Sequence: Synthetic coding sequence
  source 1..837: mol_type = other DNA
atggaggaaaacatggaagagggccagacccagaaaggatgctttgaatgctgtatcaagtgtctgggagggatcccctacgccagcttgattgcaacaattctcctgtatgcaggggtggctctgttttgcggatgtggccatgaggcgctgtcaggcaccgtcaatatcctccagacatacttcgagatggcgaggactgctggtgataccttagatgtgttcacgatgatcgacatcttcaagtacgtcatttacggaatcgcagcggctttcttcgtgtatggaatcctcttaatggtagaggggttcttcacaacaggggctattaaggacctatacggcgatttcaagattacaacttgtggacgctgtgtatccgcctggttcataatgctcacttatctgttcatgttggcgtggctgggagtgacagcttttacaagcttgcccgtgtatatgtattttaacctctggaccatatgccgaaatacgactctcgtggagggagctaacctatgtcttgatctgcggcagtttggcatagtaacaatcggggaagagaaaaagatttgtacagtatccgaaaacttcctcagaatgtgcgaatccactgaactgaatatgaccttccacctattcatcgtggccttagccggagcaggcgcagccgtgatcgcaatggtccattatctcatggtactgtcggccaattgggcttacgtgaaggatgcctgcaggatgcagaagtacgaagatatcaaaagcaaggaggagcaagaactgcacgatatacactccacacgatccaaggagaggttgaacgcttacacctag

SEQ ID NO: 28810 - DNA, 837 bp, synthetic construct
  misc_feature 1..837: note = Description of Artificial Sequence: Synthetic coding sequence
  source 1..837: mol_type = other DNA
atggaggagaatatggaggagggccagactcagaaaggatgcttcgagtgctgtatcaagtgtctcggtggcatcccatacgcctccctgattgcaaccattctcttgtacgcaggagtggccctgttttgcggctgcggacacgaagctctcagtgggacagtaaatattctgcagacctattttgagatggcacggaccgccggtgatactctggatgtgttcactatgatcgatattttcaagtacgtcatctacggtatcgctgccgcatttttcgtgtacgggatcctgttaatggtggagggcttctttaccactggagctatcaaggatctgtacggggattttaaaatcaccacatgcggcagatgcgtgtccgcttggtttatcatgctgacataccttttcatgctagcctggttgggggtcacagccttcacaagtctccccgtatacatgtacttcaatctctggaccatttgcagaaacaccactcttgtggagggggctaatctctgtttggatctacgccagtttggtatcgtgactattggggaggagaaaaaaatatgcaccgtatctgaaaattttcttcggatgtgtgagtctaccgagcttaatatgacctttcatctgtttatagttgccctcgccggtgctggagccgctgtcatcgcaatggtgcactatttgatggtgttaagtgctaactgggcttatgtgaaagacgcatgtcggatgcagaagtacgaggatatcaagtcaaaagaagaacaggagctacacgacattcactccacccgatctaaggagcggctcaatgcatatacatag

SEQ ID NO: 28811 - DNA, 33 bp, synthetic construct
  misc_feature 1..33: note = Description of Artificial Sequence: Synthetic coding sequence
  source 1..33: mol_type = other DNA
atggaagaaaatatggaagaagggcagacgtag

SEQ ID NO: 28812 - DNA, 804 bp, synthetic construct
  misc_feature 1..804: note = Description of Artificial Sequence: Synthetic coding sequence
  source 1..804: mol_type = other DNA
atgggatgttttgagtgctgtataaaatgtctcgggggaatcccatatgcctccttgatagctactatcttgctctatgcaggggttgctctgttttgcgggtgcggtcacgaagccctgagcggcacagtgaacatcctccaaacctactttgagatggccagaaccgcaggagacaccctggatgtgttcacaatgatcgatatctttaaatacgtgatctatggcatcgccgcagccttttttgtgtacggaatcctgttgatggtagaaggcttttttacaacgggtgctatcaaagacctatatggggacttcaaaatcaccacctgcggcagatgcgtctccgcgtggttcattatgttgacatatctgtttatgttggcctggctgggggttactgcgttcactagcctccccgtgtacatgtacttcaatctgtggaccatttgccgcaataccactctcgtagagggagcgaacttgtgtctggacctccgccagtttggaattgtgacaatcggggaagaaaagaagatctgtactgtgtcggaaaacttcctgcgtatgtgcgagagcaccgaactgaacatgacctttcacttattcatcgtagctctggccggagctggggcagccgtgatcgcaatggtccattacctgatggtactgtctgccaattgggcctacgtcaaggatgcatgtaggatgcagaagtatgaggacattaagtcaaaagaggagcaagagttacatgacatccactcaacccgcagtaaggaacgcctcaatgcctatacttag

SEQ ID NO: 28813 - DNA, 390 bp, synthetic construct
  misc_feature 1..390: note = Description of Artificial Sequence: Synthetic coding sequence
  source 1..390: mol_type = other DNA
atggaggaaaatatggaggaagggcagacacaaaagggttgtttcgagtgctgtattaaatgtctgggaggtatcccctacgctagtctgattgccaccattctgctgtacgctggcgtggctctgttttgtggatgtggtcacgaagccctctcaggaacagtaaatattctccagacttactttgagatggctcgcacggccggagacacgttggatgtcttcaccatgatcgacattttcaaatacgtcatctacggcatagccgctgccttcttcgtatacggaatcctcctaatggtggagggatttttcaccacaggagcaatcaaggatctgtatggggactttaagattaccacctgtgggaggtgcgtgtctgcctggtag

SEQ ID NO: 28814 - DNA, 816 bp, synthetic construct
  misc_feature 1..816: note = Description of Artificial Sequence: Synthetic coding sequence
  source 1..816: mol_type = other DNA
atgacagacttagaggggtgtttcgagtgttgtatcaagtgcttaggaggaattccatatgccagcctgatcgccactatactactgtatgcaggtgtggctcttttctgcggatgtggccacgaggccttatctgggacagtgaacattttgcagacatattttgaaatggcaagaacggccggagacacactggatgttttcaccatgattgacatcttcaaatacgttatttacgggatagcagcggctttctttgtgtacggcatcctcctgatggtggaaggtttttttaccaccggagcaatcaaggatttatacggggacttcaaaattacgacctgtggtcggtgcgtgagcgcctggttcatcatgctgacctatctttttatgttggcatggctgggtgtgacagccttcacatcactgcccgtgtatatgtacttcaatctctggacaatctgtaggaatactaccctagtggaaggagcaaacctttgcctggacttaaggcagtttgggatcgtgaccattggagaagagaagaagatatgcactgtgtccgagaattttttgcgcatgtgcgagagcaccgagttgaatatgaccttccacttgtttatcgttgctctggcgggagccggagcggctgtcatcgccatggtgcattatctgatggtgctctcggccaactgggcctacgttaaggatgcatgtcggatgcaaaaatacgaagacataaaatctaaggaggaacaggagctgcacgacatccattccactcgcagtaaggaaaggttgaacgcctacacctag

SEQ ID NO: 28815 - DNA, 1206 bp, synthetic construct
  misc_feature 1..1206: note = Description of Artificial Sequence: Synthetic coding sequence
  source 1..1206: mol_type = other DNA
atgatgggcttaggcaacggaaggaggagcatgaaatcccctcccctagtgcttgctgctctggtggcctgcattattgtgctcggcttcaattattggatcgcatcctctcggagtgttgacttgcaaacacggattatggaactcgaaggcagggtgagacgagctgcagcagaaagaggggcagtggagctgaaaaaaaacgaattccaaggggaactggagaagcagagggagcagctggacaagatccagagcagtcacaactttcaactggaaagcgtgaacaagctatatcaggacgaaaaggcagtactggttaacaacattaccactggcgagaggctcatcagagtgttacaggatcagctgaagacgctgcaacgaaattatggccgtctacagcaggatgtcctgcagtttcagaaaaaccaaacgaacctggaacggaaattttcctatgatctgtcccaatgtataaaccagatgaaggaggtgaaagagcagtgtgaagaacggatcgaggaagtcactaagaagggaaatgaagcagtggcttcaagggacctatccgaaaacaacgatcaaagacaacagttacaagccctgtcagagccacagccaaggctgcaggccgctggcctcccccacaccgaagttccccagggaaagggaaacgtcttaggaaactcgaaatctcagacaccggctccaagcagcgaggtggtgcttgactctaaaaggcaggtggaaaaagaggagaccaatgagattcaggtggtgaatgaggaacctcagcgcgataggctaccccaggagcccggtcgggagcaggtcgtggaggatcgtcctgtgggtggacgaggctttggtggagcaggggaacttggccagacgccccaggtccaagctgcgttgtctgtgtcacaggaaaacccagaaatggaaggaccggagcgggatcagctggtcatcccagacggccaagaggaggaacaggaggccgctggagagggcaggaaccagcagaaactcaggggcgaggatgactacaatatggacgaaaatgaagcggagtctgagacggacaaacaggctgcgctggcaggcaatgacaggaatatcgatgtcttcaacgttgaagatcagaaacgcgacaccattaacctgctggaccagcgcgagaaacgcaatcacactttgtag

SEQ ID NO: 28816 - DNA, 1206 bp, synthetic construct
  misc_feature 1..1206: note = Description of Artificial Sequence: Synthetic coding sequence
  source 1..1206: mol_type = other DNA
atgatgggtctgggtaacggtaggaggagcatgaaaagtcctccacttgtccttgcagcgctggtggcttgtatcattgtgcttggattcaactactggatcgcttcgtcacggagtgtggatctgcagacaagaatcatggagctggagggcagggtcaggcgcgctgccgcagaaagaggcgctgtcgagctgaagaaaaatgagttccaaggggagctcgaaaaacaaagagaacaactggataaaattcagagctcgcataactttcagctggagagcgtgaacaaactctaccaagacgagaaggcagtgctggtcaataatataacgaccggggaacggctcatccgtgtgcttcaggatcagcttaaaacgctccagaggaactacggacggctgcagcaggacgtgctgcagttccagaagaaccagacaaacctggaacgtaagttttcatacgatctatcccagtgcatcaaccagatgaaggaagtgaaggagcagtgcgaggagcgcatcgaagaggtgactaagaagggcaacgaagccgtcgcctcgagagacctctctgagaacaatgatcagagacagcagctgcaggcccttagcgagccccaaccgaggttgcaggcggcaggtcttccccatactgaagtaccacagggaaaaggtaacgtgcttggaaacagtaaatctcaaacacctgccccttctagtgaggtcgttctcgactcaaagcggcaagtggagaaggaagagaccaatgagatccaggtggttaatgaagagccacagcgtgatagactcccccaagagcctggacgagagcaagtcgtcgaagatcgaccggttgggggacgaggctttggaggtgccggagagctggggcagacacctcaggtgcaagccgcattatccgtgtcacaggaaaatccagaaatggaaggtccagaaagggatcagctggttatccctgatggacaggaagaagaacaggaagctgcgggagagggcaggaatcagcagaaactgaggggagaggacgattacaatatggacgagaacgaagccgagtccgagaccgacaaacaagccgcactggccggaaacgaccgcaatatagacgtgtttaatgtcgaggatcaaaaaagagacactatcaatctcctggaccaacgcgagaagcgcaaccacacgttgtag

SEQ ID NO: 28817 - DNA, 243 bp, synthetic construct
  misc_feature 1..243: note = Description of Artificial Sequence: Synthetic coding sequence
  source 1..243: mol_type = other DNA
atgatgggcctgggaaacggcaggcgaagcatgaagtcccctcctctcgtgctcgcagcactggtggcctgtatcatcgtactcggattcaattattggattgcaagcagcagaagtgtggatctgcagacgaggatcatggaacttgagggacgagttcgccgagccgctgccgaaaggggagcggtggagctgaagaaaaatgaattccaaggggaactggagaagcagcgcgagcaatag

SEQ ID NO: 28818 - DNA, 366 bp, synthetic construct
  misc_feature 1..366: note = Description of Artificial Sequence: Synthetic coding sequence
  source 1..366: mol_type = other DNA
atgatgggcctggggaatggaagaaggagcatgaaatctccccctctcgtcctggcagcactggtggcctgtattattgtcctgggtttcaactactggatcgctagttcaagatccgtggaccttcagacccggatcatggaacttgaaggaagagttagaagggcagctgcggagaggggagctgtggagctcaaaaaaaatgagttccagggcgagcttgagaaacagcgagagcagctggataaaatccaatcaagccacaactttcagctcgaatctgtgaataaattatatcaggatgagaaggccgtacttgtcaacaatatcacaacaggcgagcgcctgatccgagtgctgcaatag

SEQ ID NO: 28819 - DNA, 279 bp, synthetic construct
  misc_feature 1..279: note = Description of Artificial Sequence: Synthetic coding sequence
  source 1..279: mol_type = other DNA
atgaagccaattcaaaagctgctggctggcctgattcttttaacttggtgcgtggagggatgcagttctcaacattggtcatatgggctgaggcctggtgggaaaagagacgccgagaatctcatcgatagcttccaggagattgtgaaagaagtcggtcagctagccgagacgcagcgctttgaatgtacgacccatcagcctagatcaccattgagggatctgaagggagccctcgagtctctcatagaagaggaaacaggacagaagaaaatctag

SEQ ID NO: 28820 - DNA, 279 bp, synthetic construct
  misc_feature 1..279: note = Description of Artificial Sequence: Synthetic coding sequence
  source 1..279: mol_type = other DNA
atgaaaccgatacaaaaactactggccggactcatacttttgacttggtgtgtggagggctgttcctcgcagcattggagttatggattgcgtcctggcggaaaaagggatgctgaaaacttgatagactctttccaggagattgtgaaagaggttgggcagttagctgagacccagcggtttgagtgtaccacccatcagccaaggtctcccctgcgagacctgaaaggggctctggaaagcctgatcgaggaggagactggccagaaaaaaatatag

SEQ ID NO: 28821 - DNA, 774 bp, synthetic construct
  misc_feature 1..774: note = Description of Artificial Sequence: Synthetic coding sequence
  source 1..774: mol_type = other DNA
atgcccgcatccatgttctccatcgacaatatcctcgcggcaagacccaggtgcaaggactcagtcttgccggttgcacatagtgccgctgcccctgttgtgtttcctgctttgcacggggatagcctatatggggcttcgggcggtgcaagtagcgattacggggcattctaccctaggcccgtcgccccaggaggagccggtctgcctgccgctgtcagcggcagccgtcttggctacaataattacttctacgggcagttacacgtgcaagctgcacctgtggggcctgcttgctgtggcgcagtgcctcccctcggcgcacagcagtgcagttgtgtccccactcccccaggctatgagggacctggttccgtactcgtgtcacctgtgcctcaccaaatgctgccatacatgaacgtgggcaccctgagccggaccgaactgcagttgctgaaccagcttcattgcaggaggaagcggaggcacagaacaattttcacggatgaacagcttgaagccctcgagaacctgtttcaggaaaccaagtaccctgacgtcggcacacgcgagcagctggcacggaaggtgcacctccgggaagaaaaggtcgaagtctggtttaagaatcgcagggccaaatggcgtagacaaaagcggagctctagcgaggaatctgaaaacgccgagaagtggaataagacttcctcatccaaagctagccccgagaaaagggaggaggaaggcaagtcagacttggattctgactcctag

SEQ ID NO: 28822 - DNA, 654 bp, synthetic construct
  misc_feature 1..654: note = Description of Artificial Sequence: Synthetic coding sequence
  source 1..654: mol_type = other DNA
atggcttacccgggttatggtggaggtttcgggaatttttcgattcaggtgccagggatgcaaatgggtcagccagtgccagaaactgggccagccatcttattggacggatattctggtccagcctatagtgacacctactcatcggctggcgacagtgtgtatacatacttctccgctgtcgcaggccaagacggagaagtggatgccgaagaactccagcgttgcctgacccaaagcgggataaacggcacatacagcccctttagcttagaaacctgtcgcataatgatcgcaatgctggatagggatcacaccggcaagatgggctttaatgcgtttaaggagttatgggctgctctgaacgcgtggaaagaaaactttatgacagtggatcaagacggcagcggtacagttgagcaccacgagttaagacaggccatcggcctcatgggttatcggctgagtccccagacgctgacgactatcgttaaacgatattccaaaaatggcaggattttcttcgacgactacgtggcttgttgtgtgaagctgagagcgttaacggatttcttccggaagagagatcacttacagcaaggctccgccaacttcatctacgatgactttctgcagggaaccatggccatctag

SEQ ID NO: 28823 - DNA, 438 bp, synthetic construct
  misc_feature 1..438: note = Description of Artificial Sequence: Synthetic coding sequence
  source 1..438: mol_type = other DNA
atggccacgtgggctttgctgctgctcgccgcaatgttgctggggaatccgggactcgtcttctcaagactaagccccgagtactatgaccttgcaagagcccatttaagagacgaggagaagagttgtccatgtctcgcccaggagggaccacaaggggacctgctgacgaaaacacaggagttagggcgagactaccggacttgcctgacaattgtgcagaagctcaagaagatggtcgacaaacccacacagagaagtgtttctaatgcggctactagggtctgtcgcaccggccgaagccggtggagggatgtttgtaggaactttatgaggaggtatcagtcacgagtgacacaggggctggttgctggcgagacagcccagcagatttgcgaggatctgcggttgtgcataccgtcgacagggcctctctag

SEQ ID NO: 28824 - DNA, 393 bp, synthetic construct
  misc_feature 1..393: note = Description of Artificial Sequence: Synthetic coding sequence
  source 1..393: mol_type = other DNA
atggagggattggtgttcagccgactgtctccggaatactacgacttggctagggcacaccttcgtgacgaggagaaaagttgtccctgcctcgcacaggagggacctcagggtgaccttcttacaaaaacccaggaattgggaagagattaccggacatgtctgactatcgttcaaaagctcaaaaagatggtcgacaaaccaacacaaaggtccgttagtaacgcagctacacgcgtatgcagaaccgggcgttcaagatggagagatgtttgtcggaacttcatgcgcaggtatcaaagcagggtcacccagggattggttgcaggagagacagctcagcaaatttgcgaagatcttcgactgtgcatcccctcaacagggccactatag

SEQ ID NO: 28825 - DNA, 555 bp, synthetic construct
  misc_feature 1..555: note = Description of Artificial Sequence: Synthetic coding sequence
  source 1..555: mol_type = other DNA
atgagtagaaccgcttataccgttggcgctctcttacttctattgggtacactcctacctgccgctgagggcaagaaaaagggctcccaaggggcaatcccccctccagacaaagcacagcacaacgattccgaacagacccagtccccccaacagcctggctcacggaatagagggcgtggccaaggaaggggtacagcaatgcctggcgaggaagtcctcgaaagctcacaggaggctctgcacgttacagagcgtaaatatctcaagcgtgattggtgcaaaacacagcccctcaagcagacgatccacgaggaaggctgcaattctcggaccattatcaatagattctgctacggacagtgtaattctttttacatccccaggcacatcaggaaggaagaggggagtttccagtcctgcagcttctgtaagcctaaaaaatttacaaccatgatggtcacgctgaattgtcccgagcttcagccacccacaaaaaagaagagggtcactcgagtcaagcagtgtcggtgtattagcattgatctggactag

SEQ ID NO: 28826 - DNA, 432 bp, synthetic construct
  misc_feature 1..432: note = Description of Artificial Sequence: Synthetic coding sequence
  source 1..432: mol_type = other DNA
atgtctcgtacagcctacacggtcggggcactgctattgctcctgggaacgttgctgccagctgctgaaggaaaaaagaagggttctcagggtgccattcccccaccagacaaggccctccatgttactgagcgcaagtatctcaagcgggattggtgcaaaacacagcccctcaagcagaccatccacgaagaggggtgcaacagtcgcactatcattaacagattttgctatggacagtgtaacagtttctatatacccaggcatataaggaaagaagagggaagcttccagagttgttccttctgcaagcccaaaaagttcacaaccatgatggtgacactgaattgtcccgaactgcagccaccaaccaagaagaaaagggtaacccgggtgaagcaatgtcggtgtatcagtattgacctggactag

SEQ ID NO: 28827 - DNA, 432 bp, synthetic construct
  misc_feature 1..432: note = Description of Artificial Sequence: Synthetic coding sequence
  source 1..432: mol_type = other DNA
atgtctcgcactgcatacactgtgggagcgcttctgctgttgctaggtacattactgcccgcagctgaaggcaaaaagaagggcagccagggcgctatcccaccgcctgacaaggccctccacgtaaccgaaagaaagtatttgaaacgggactggtgcaaaacacagccactgaagcaaaccatacacgaggaaggctgtaattcacgtacaatcattaaccggttctgctatggacagtgtaattctttctacatcccacgacatattcggaaagaagaagggtcatttcagtcttgtagcttctgtaaacctaagaaatttactacaatgatggtcaccctgaactgccctgagctgcagcccccaacgaaaaagaaacgggtcactcgcgttaagcagtgtagatgcatctcaattgacttggattag

SEQ ID NO: 28828 - DNA, 396 bp, synthetic construct
  misc_feature 1..396: note = Description of Artificial Sequence: Synthetic coding sequence
  source 1..396: mol_type = other DNA
atgacattggaagagttttctgccggtgagcagaaaacggaatcagatcccgataacgttgtgctgtgtctcttggccgctgacgaagacgacgatagagatgtcgcccttcagatccacttcaccttaattcaggccttctgctgtgagaacgacattaatattctgagggtctcaaatcctggaagattggccgaactgctgttgctcgagaccgacgccggtcccgcagcatcggagggagcggaacagccccctgaccttcactgcgtgctggtaacaaatccccatagcagtcagtggaaggaccccgctctcagccagctgatttgtttctgtcgcgaatcccggtatatggaccagtgggtccctgtcatcaacctgcccgagaggtag

SEQ ID NO: 28829 - DNA, 498 bp, synthetic construct
  misc_feature 1..498: note = Description of Artificial Sequence: Synthetic coding sequence
  source 1..498: mol_type = other DNA
atgacacttgaagaatttagcgccggtgagcagaaaacagagaggatggataaggtgggcgacgccctcgaggaggttttatccaaggctctctctcagcgcacgataacagttggggtgtatgaggcggcaaaactcttgaacgttgatccagataacgtggtgctgtgcctgttggctgccgatgaagatgatgacagggacgtagccctccagattcatttcacactcatacaggccttttgttgcgagaacgatatcaacattcttcgcgtctctaacccgggaaggctggccgaacttctgctcctcgagaccgacgccggacctgccgctagtgaaggtgcagagcagccccctgacttgcactgtgtgcttgttaccaatccccacagctcccagtggaaggatcccgcactttcccagcttatctgtttttgtagggagtctcggtacatggatcagtgggtcccggtgatcaatctaccagaaagatag

SEQ ID NO: 28830 - DNA, 3693 bp, synthetic construct
  misc_feature 1..3693: note = Description of Artificial Sequence: Synthetic coding sequence
  source 1..3693: mol_type = other DNA
atgtctgctctctgttgggggaggggagctgctggtctcaagagggcactccgaccttgtgggagacctgggctccctggaaaagaagggacggcaggcggtgtgtgcggcccaagacgctccagtagcgccagtccgcaagagcaggatcaggatcgccgaaaggattggggacacgtcgagctactcgaagtgcttcaagcacgagtgagacagctgcaggcagagtcggtgtccgaagtggtcgtgaacagagtcgacgtcgctcgccttcccgaatgtggttccggagacgggtcactgcagcctccaaggaaggtgcaaatgggagctaaagatgctacccccgttccgtgtggcagatgggccaagatcctggaaaaagataagcgaacccagcagatgaggatgcagagactgaaagccaaactgcagatgccgtttcagtccggagagtttaaggcactcacacgcagactccaggttgaacctagactgctgagcaaacagatggcagggtgcctcgaagattgcacgcgccaggcacctgagtcaccatgggaggaacagctcgctcgcctgctgcaagaggccccaggcaagctcagcctggacgtggaacaggcaccaagtggccaacatagccaggctcaactcagtgggcagcagcaacggctgctggcgtttttcaagtgttgtctactgacagaccaactgcccctggcccatcatttgctggtcgtacaccatggacagcggcagaagaggaaactactaactctcgatatgtacaacgcagtaatgctgggttgggctcgtcaaggtgccttcaaagagcttgtctatgtcctcttcatggtgaaagacgcgggactcacccccgacctactgagttacgccgctgctttacaatgtatgggccgacaggaccaagacgccggtaccatcgaacgatgcctggagcagatgagtcaggaaggacttaagctccaggccctgttcaccgctgttctgttatcagaggaggatcgagccaccgttctgaaggctgtgcataaggtcaagccaacattttcactcccccctcagctcccacctcctgttaacacttcaaaactgctgcgcgacgtgtacgccaaagatggtagagtctcttatcccaagctccacctccccctaaagaccctgcagtgtctgttcgaaaaacagctccatatggagctggcaagccgggtatgcgtggtgagcgtagagaaaccaaccttgcctagtaaggaggtaaaacacgctaggaaaaccctcaagaccctacgggaccaatgggagaaagctctgtgccgagctttgcgtgaaaccaagaaccgactcgagagagaggtttacgaagggaggttttccctgtacccctttctgtgtctgctcgacgagagggaagtcgtgagaatgctgctacaggtgctacaggctttaccagcacagggggaaagttttacgaccctggccagagaactgagtgctaggactttttctcggcacgtcgtgcagagacagagagtgtctggacaggtacaagccctgcagaaccattacaggaagtacctgtgtcttttagccagtgacgcagaagtgccagaaccctgccttccacgtcagtactgggaagagctgggagctcccgaggcgcttagagaacaaccatggcctttgcccgttcagatggagctgggtaagctccttgccgagatgctcgtgcaggccactcagatgccttgctctttggacaaacctcatcggtcttcccgtctggtacctgtcctttatcatgtgtatagcttccggaacgtgcagcagatcgggatcctgaaaccccacccagcctatgtgcagctgcttgagaaggcagccgagccaactctcactttcgaggccgttgatgttcctatgctatgcccaccgcttccttggactagcccacacagcggcgcatttttgctgtctcccacaaagctcatgcgcaccgtcgaaggggcaacccaacaccaggagctcctggagacatgtccacccacagcgttacacggggctctcgatgcactgacgcagttgggcaactgcgcctggcgtgtgaacgggagagtgctggatttagttcttcagctgtttcaggctaaaggctgtccccagctcggggtaccagcgccaccatctgaagcccctcagccgccagaagcgcacttaccccattccgccgcacccgcacggaaggcagaactgaggcgtgagctggctcattgccagaaggtggccagggagatgcattccctgcgcgctgaagcactgtatagactctccctagctcaacacctgagagatcgggtcttttggctcccgcacaacatggattttagaggacgaacttacccatgccccccacacttcaaccaccttggcagtgacgtcgccagggccttactagaattcgcccagggcaggccactcggccctcatggtctggattggctgaaaatccatctcgtgaacttgaccggcctgaaaaaacgtgaaccattaaggaaacgcctggccttcgcagaggaggtgatggatgacattttggactccgcagatcagcccttgacagggagaaagtggtggatgggagcggaggaaccttggcagacactcgcatgttgcatggaagtcgccaatgcggtacgggcttccgatcctgctgcctacgtttcacacttgcctgtccatcaggacggcagctgtaatggactccaacactatgccgctctgggcagggactctgtgggcgctgctagtgtcaatctggagccttccgatgtgccacaggacgtgtatagcggagtggcagctcaggtagaggttttccgaaggcaggacgcccagcgcggtatgagagttgcacaagtcttagaaggcttcatcacacgtaaagtggtgaagcaaacggttatgaccgtcgtttacggggtgaccaggtatggagggcgtctgcagattgagaaacgcctcagggagctgtcagacttccctcaagaattcgtatgggaagccagccattacctggtgcggcaggtgtttaaatccttgcaggaaatgtttagcggcactcgggcaatccaacactggctgaccgaatccgccagactgatttcacacatgggtagtgtggtggagtgggttacaccattaggagtgcccgtgatccagccgtacagactcgacagtaaggtgaagcagatcggtggtggcattcagagcattacctatacccacaacggggatatctctcgcaagcctaatacccgaaaacaaaaaaacggcttcccacctaacttcatccattccctggactcttctcatatgatgttgacagcattgcattgctaccggaaaggtcttacctttgtttccgtgcatgactgttactggacgcacgcagctgacgtctctgtgatgaatcaggtctgtcgggagcaattcgtaaggctccattctgaaccaatactccaggacctttcccgattcctggtgaagcgcttttgttccgagcctcagaagatattggaggcctcccaattgaaagagactttgcaggcggtgcccaagcctggagccttcgacttagagcaagttaagcggtccacctacttttttagttag

SEQ ID NO: 28831 - DNA, 480 bp, synthetic construct
  misc_feature 1..480: note = Description of Artificial Sequence: Synthetic coding sequence
  source 1..480: mol_type = other DNA
atgactctcgaagaagtacgaggccaggatactgttcctgagagtacagctaggatgcagggcgctggcaaggctctgcacgaactgctgctgtcagcccagaggcaaggctgcctgaccgccggagtctacgagtcggccaaggtcctcaatgtggacccggataacgtgacattctgtgtactggccgctggggaggaggacgagggggacatcgctttacaaatacactttacactgatccaagccttctgctgcgaaaacgatatcgatattgtgagagttggcgacgttcagcggctggcggcaattgtcggagcaggcgaagaggccggagcccctggggacctccattgcattctcatctcaaatcccaacgaggatgcctggaaggatcctgccctggagaaattgagcctattttgtgaggagtctcgcagtgtaaatgattgggtcccgtcaatcacgttaccagaatag

SEQ ID NO: 28832 - DNA, 426 bp, synthetic construct
  misc_feature 1..426: note = Description of Artificial Sequence: Synthetic coding sequence
  source 1..426: mol_type = other DNA
atgcagggcgcagggaaggcactgcatgagctcctgctatcggcccagagacaaggatgtctgacagccggagtttacgagagtgccaaagtgttgaatgttgacccagacaacgtgaccttttgtgtgttggctgctggagaggaagatgagggtgacatcgccttacagattcactttaccctgatccaggctttttgttgtgaaaacgacattgatatcgtaagagttggggacgtacaacgacttgccgcaatagtgggagcaggtgaggaggctggtgccccaggcgatcttcattgcatcctgatcagcaacccaaatgaggatgcctggaaagatccagcgcttgaaaagctctctctgttctgtgaggagagcaggtcggtcaatgattgggtgccaagtatcacattgcccgaatag

SEQ ID NO: 28833 - DNA, 2085 bp, synthetic construct
  misc_feature 1..2085: note = Description of Artificial Sequence: Synthetic coding sequence
  source 1..2085: mol_type = other DNA
atgcagcctgccatccaggtttggtttggagaggatctaccactgtcgccgcgttcccccctgacgcctaggcacggacccggtcttgctaacgtctgtcagtacgacgaatggatagcagtgcgccacgaagctacgttattgcctatgcaggaagacctatccatctggctgtcaggactcctggggattaaagtaaaagctgaaaagttgctggaggagctggacaacggcgttctgctgtgccagctgattgatgttctccagaacatggtgaagacatgcaattctgaagagtctggaaatttccctatgaggaaagtcccttgcaagaaggatgccgcaagtgggtccttctttgcacgagacaacacggcgaactttttgcactggtgccgcgacataggcgtcgacgagacctacctatttgaatctgagggccttgtccttcataaagatccaaggcaggtttacctctgcctgctagaaatcggcagaatcgtttctaggtacggtgtcgaacccccagtcctcgtcaagcttgagaaagaaattgagctagaggagactttgctgaacaccagtggacccgaagactcaatttcaatccctaaatcctgttgccgccacgaggaacttcatgaggccgtgaagcatattgccgaggaccccccttgcagctgcagccatcggttttccattgaatatctgtcagaggggcgttaccgactgggggacaaaattctgtttatccgcatgctgcacggtaagcacgtgatggtgagagtagggggtggatgggacactctgcaggggttcctgctgaaatacgatccatgccgcattctgcagttcgccaccctggagcaaaagatactggccttccagaagggtgtgagtaatgaatctgttcctgattcccccgctcgcaccccccagccaccggagatgaatcctctttccgcggtgaatatgtttcagaaacagaattctaaacccagcgtaccggtgtcgatacctaaaagcaaagagaaacagggtcgtcctcccggagcgctcgtgcctgcatcaagcttgaaaggcggaaatctgggctcaatgagcgttagatccaaactgcctaactccccagccgcttcatcccaccctaagctgaagtcttccaagggaatcacaaagaaaccccaggccccatccaataatgcaagcagctccctcgcttctctcaacccagtcggaaagaatacgtccagccctgctttgcctcgaactgcaccatgtatttcagagagtcctagaaaatgcatctccagtcccaacactccaaaggctaaggtgattccagctcaaaacagtgcggatctccccgagagtacgctattacctaataaatgctccgggaagactcagcccaagtacctgaagcataaccatattagctctcgggataatgcggtgtcccatctggccgctcatagtaatagcagctctaaatgccctaagctaccgaaagccaatattcctgtccgaccaaagcctagttttcagagtagcgctaaaatgacgaaaacaagctcgaagactatcgcaaccggcctgggaacacagtcacagccaagcgacggcgcaccacaagcgaaacccgtccccgcacaaaagctgaaatctgcccttaacctgaaccagccagtcagcgtgtctagcgtttctccggttaaggcaactcagaagagcaaggacaagaacatcgtttccgcgacaaagaaacagcctcagaataaaagcgccttccagaagactggtccctcttctctcaaatctccaggcagaacaccactttctattgtgagcctcccacaatcatcaaccaaaacccagacggcccctaagagcgcccagaccgtagcaaaaagccagcatagcactaagggccctccaagaagcgggaaaacccccgctagtataaggaaacctcccagctctgtgaaagacgccgacagtggggataagaagcctaccgccaaaaagaaggaggatgacgatcactacttcgtcatgacggggtctaaaaaaccacggaagtag

SEQ ID NO: 28834 - DNA, 2085 bp, synthetic construct
  misc_feature 1..2085: note = Description of Artificial Sequence: Synthetic coding sequence
  source 1..2085: mol_type = other DNA
atgcaaccagctatacaggtttggtttggcgaagacctgcccctttctccacgctccccccttactcccagacacggtcctggactggcgaatgtgtgccaatatgatgagtggattgcagtgcgccatgaggccactctgctcccaatgcaagaggacctcagtatctggctaagcggactactggggattaaggtcaaagctgaaaagttgcttgaagagctcgataacggagttctgctgtgccagttgattgacgtgctgcagaacatggtgaaaacctgtaatagcgaggaaagcggaaattttcctatgagaaaggtcccttgtaaaaaggatgccgcttcagggagtttcttcgccagagataataccgcaaatttcctgcactggtgtagggatatcggcgtcgacgaaacctatttgtttgaatctgagggcctcgtgctgcataaggacccaagacaagtgtatctgtgcttgctcgagataggtcgaattgtgagccgctatggagtggaacctcccgtgttggtgaaactcgagaaagagattgaactcgaagagacattactcaacactagcggcccagaagacagcatttctatccccaaatcttgctgcagacacgaggagctccatgaggccgtcaagcacattgccgaggaccctccttgttcatgtagccatcgattcagcattgagtacctctcagagggcaggtatcgactgggagacaaaattctgttcattcgaatgctgcacgggaaacatgtcatggttcgggtcggaggcggatgggatactctgcaggggttccttttgaagtacgatccctgccgaattctgcagttcgccaccttggagcaaaaaatcctagcgttccaaaaaggtgtgtccaacgagtccgtccctgactcccctgctagaacgcctcaaccgccagaaatgaacccgttgagcgcagtcaatatgtttcagaagcaaaacagcaagcccagtgtgcccgtttctatacctaagagcaaggagaagcaaggccgaccacccggagccctggtgcctgcttcgagtctgaaggggggaaacctgggcagcatgtctgtccggtccaaacttcccaattccccagcagcatcaagtcacccgaagctgaagtcaagtaaaggcattacgaaaaaaccgcaggcgccaagcaataatgcctcgtcatccctcgcgtcactgaatccagtgggaaagaacactagcagcccagccttacccaggacagccccatgtatctccgagtcgccgaggaaatgtatttctagccctaataccccgaaggcaaaggttattccagcccaaaactcagcagatctgcccgaatctactctactaccaaacaaatgtagcggcaagacgcagccaaagtacctcaagcataaccatattagcagcagggataatgcggtatcacacctggctgcccacagcaattcctccagcaagtgccccaaactcccgaaggccaatattcccgttagaccaaagccgagcttccaaagttccgcaaagatgactaagacatcatctaaaaccatcgctacaggccttggaactcagtcccagcctagcgatggcgctccccaggccaaacccgtccccgctcaaaagctaaagagcgcacttaacctgaaccagcctgtgtctgtatcctcagtctcgcccgttaaagcaacccagaaaagcaaggacaaaaatatcgtgagcgcgactaaaaaacagcctcaaaacaagtccgcgttccagaaaacaggcccatctagcttgaagtcccctggacgaaccccgctgtctatagtgtccctaccacagagtagcacaaagacacagaccgcccctaagagcgcgcagacggttgctaaaagccaacattccactaagggccctccaaggagcgggaaaacacccgcttcgataaggaagcctccaagctctgtgaaagacgccgactccggcgacaaaaagcctaccgctaaaaagaaagaagatgacgaccactatttcgtgatgaccgggtccaaaaagcctcggaagtag

SEQ ID NO: 28835 - DNA, 2085 bp, synthetic construct
  misc_feature 1..2085: note = Description of Artificial Sequence: Synthetic coding sequence
  source 1..2085: mol_type = other DNA
atgcagcccgctatccaagtgtggtttggcgaagatctccctctgtccccacggagcccacttacaccacgccacggtcccggacttgccaatgtgtgccagtacgatgagtggatcgcagtgcgccatgaggccaccttgctgccaatgcaggaggacctgagcatctggttgtccggtctgctggggataaaggtaaaggccgaaaagctgctagaggagctggataacggcgtgctgctctgtcagctcattgatgtgctgcagaacatggttaagacctgcaatagtgaggagtcaggaaactttcctatgagaaaagtgccttgcaaaaaggatgcagcgagcggctcgttttttgcgagggataatacagccaacttcctgcactggtgtcgcgatatcggcgtggacgaaacatatctgttcgagtcggaggggttggtgcttcacaaggacccgaggcaggtatatctgtgcctgctggagatcgggaggattgtttcgcgctatggtgtcgaaccgcctgtgctcgtgaagctagaaaaagagatcgagcttgaggagaccttattgaacaccagcggacccgaagattcaatttcaattcctaagtcttgttgtcgacacgaagagctgcatgaagctgtgaagcacatagcagaagacccgccatgttcttgcagtcaccgtttctctatagaatacctgtccgaaggcagatatcgattgggcgacaagatcttgttcattcgaatgctccatgggaaacatgttatggtaagggtggggggtggatgggatacgctgcaagggtttctgttgaaatatgacccatgtcggattctgcagtttgccaccctggagcagaagatcctcgctttccagaagggagtgtcaaacgaatcggttccggactctcctgcccgaacacctcagccaccagagatgaacccactctccgcggttaatatgttccagaaacagaattctaagcctagtgtccccgtgtccattccaaagtcaaaagagaaacagggcagacccccaggtgcactggtcccagcctctagcctcaaggggggtaatctgggtagcatgagcgtcaggagtaagttgcccaactcgccagcggcttcctcacaccctaagctgaaaagctctaagggcattacgaaaaagccacaggccccatctaataatgccagttccagcctagcctctctcaatcctgtgggcaaaaatacatcttcccctgcacttccgcgaaccgcgccttgcatatctgagtctcctcggaagtgtatatcttctcccaacacaccaaaggccaaggtgataccggctcaaaacagcgccgatctacctgaatctactctgctgcccaacaagtgctcagggaaaacacagcccaagtacctgaaacacaaccatattagtagccgggacaacgcagtcagccatttggcagcccacagcaactcaagctctaagtgtccgaagctgccaaaagccaatatcccagtgaggcccaagccttccttccagagtagtgccaagatgaccaaaaccagtagtaagacgatagctacagggcttggcactcagagccagccaagcgatggagcaccccaggctaagccagtgcccgcacagaagcttaaaagcgctttaaacctgaaccagccagtgtctgtgagctctgtgagcccagtcaaagccacccagaagagcaaggataagaacatcgttagcgccaccaaaaagcagcctcagaacaaatcggcttttcaaaaaacgggcccttcttcgctcaagtccccaggcagaacccccctatccatcgtaagcttacctcagtcttccaccaaaacacagacagcccctaagtccgcccagaccgtggctaaaagtcaacacagtaccaaaggaccaccgaggagtgggaagactccagcaagcatcagaaaacccccttcatccgtgaaggacgctgattccggagacaagaagccaactgccaagaagaaagaagatgacgatcactactttgtgatgactggctcaaagaaacctagaaagtag

SEQ ID NO: 28836 - DNA, 150 bp, synthetic construct
  misc_feature 1..150: note = Description of Artificial Sequence: Synthetic coding sequence
  source 1..150: mol_type = other DNA
atgcagccggctattcaggtctggtttggagaagacctcccccttagtccccgttcccctctgacccctcgccacggaccgggtctcgctaatgtttgtcagtacgatgaatggatcgcagttagacatgaggctacattattgccatag

SEQ ID NO: 28837 - DNA, 1611 bp, synthetic construct
  misc_feature 1..1611: note = Description of Artificial Sequence: Synthetic coding sequence
  source 1..1611: mol_type = other DNA
atgaacgcgtctctggagtccctatacagtgcctgtagcatgcaaagcgatacagtacctctgctgcagaatggccaacatgctcgttctcaaccgagggcgagtggcccaccacgtagtattcagccacaggtaagtccacggcagcgagtacagaggtctcagcccgtgcatattctcgccgtccgcagactgcaggaagaagatcagcagttccgtacatccagtttgccagctattcccaatccgtttcctgagctgtgtggacccggaagcccacccgtgcttaccccaggttcccttccaccttctcaagccgcagccaaacaggacgtcaaggtgttttccgaggatggaacctcaaaggtagtggagattctcgctgacatgacagcaagagatctgtgtcagctgttagtttataagtcacactgcgttgatgacaatagttggacgctggtggaacaccaccctcacctgggccttgagcgctgtttggaagatcatgaacttgtggtgcaagtagagtcaactatggctagcgagtctaaatttctgttcaggaagaactacgccaagtatgagttcttcaagaaccccatgaacttcttccccgaacagatggtgacttggtgtcagcagtctaacgggtcacagacccagctgctccaaaacttcctgaattcttcatcttgtccagagatccagggcttcctgcacgttaaggagctggggaaaaaatcttggaagaaattatacgtctgcctacgtcgctctggattatattgttctactaaggggaccagcaaagaaccacggcatctgcaactgctcgctgacctggaggattcgaatatcttcagtttgatcgccggacgcaagcagtataacgcccctacagatcatggcctatgtataaaacctaacaaagtaagaaacgagacgaaggaactcagactgttgtgcgctgaggatgaacagactcgcacctgctggatgacagccttccgcctgctgaagtatgggatgcttctctatcaaaactaccgaattccacagcaaagaaaagctctgctgagcccattctccacccccgttcggtctgtctccgaaaattcgcttgttgccatggacttttccggacaaaccggtagagtgatagaaaaccccgctgaagcacaatccgctgccttagaggaaggccatgcatggcgtaagaggtccacccgcatgaatattcttggttctcagagcccactccacccctcaacgttaagcacagtgatacacagaacccaacactggttccatggaagaatatcgcgagaggagtctcacaggatcatcaagcagcagggcctagtggacgggctgtttctactgcgtgattctcaatcaaaccctaaggcttttgtactaaccctgtgccatcaccaaaagatcaaaaactttcagattctaccttgcgaggatgatggccagacctttttctctctggatgatggcaatacaaaattttctgacctgatccaactggtggatttttaccagctcaacaagggtgtcttaccttgcaagctgaaacaccactgcatccgagtcgctctctag

SEQ ID NO: 28838 - DNA, 1647 bp, synthetic construct
  misc_feature 1..1647: note = Description of Artificial Sequence: Synthetic coding sequence
  source 1..1647: mol_type = other DNA
atggctctggccggatgtcccgactcctttctccaccacccatactatcaggacaaggtggaacagacaccaaggtcccaacaagatccagcaggccctggtttacctgctcaaagtgacagactggctaaccaccaggaggacgacgtcgacctggaagctctggtcaacgatatgaacgccagcctggagagcctttacagcgcatgctcgatgcagagcgatacagttccactgctccagaatgggcagcacgccaggtctcagccaagggcttccggcccacccagatccatccagccacaggtgtccccccgacagagagtgcagaggtcccaacccgtccatatcctggccgtgagacggctgcaggaggaagatcagcagtttagaaccagtagtctccctgcaatacctaatcccttccccgagctatgcggccctgggtctcctcctgtgcttactcctggtagcctgcctcctagccaagccgctgccaaacaggacgtcaaagtgttttcggaggacggaacttctaaggtggtggagattcttgcagatatgacagctagagatctatgtcaactgctagtatacaaaagtcactgcgtcgacgataattcatggacattggtcgaacatcatccacacttaggcctcgaacgatgtctggaagaccatgaactggtggtacaggttgaaagcaccatggcgtccgagagtaagtttctgtttagaaaaaactacgctaagtatgaattttttaagaaccctatgaacttcttccctgagcagatggtgacgtggtgccagcaatctaacggcagccagacacagcttcttcaggaaccaaggcacctgcaacttctcgccgatctcgaggacagtaatattttctcattaatcgcaggcaggaaacaatataacgccccaaccgatcatgggttatgtatcaagccaaacaaagtccgaaatgagacaaaagagttacggctactctgtgccgaagacgaacagacccgaacatgctggatgactgcgttccgcctgctgaagtatggaatgttgctgtaccagaactatcgaatcccccagcaaagaaaagcattgttgtcacccttctcaacccctgttcgctccgtcagcgagaactccctggtagccatggatttctctgggcaaactggtagagtgatcgaaaacccggcagaggcccagtctgcagccctcgaggagggtcatgcgtggcggaagcgcagtaccagaatgaacatactgggtagccagagtcccctccatccttctaccctatctaccgtgatccaccgcacccagcactggtttcacggcagaatctcccgggaagagtctcatcgcataatcaagcagcaggggctggtcgacgggctctttctgctccgggatagtcaatccaacccaaaggctttcgtgctaaccctgtgtcaccatcagaagatcaagaactttcagatcctgccatgcgaagacgatggccaaacattcttcagtctagacgatggtaacaccaagtttagcgacctcatccagttagtggacttctatcagctgaacaaaggggtgttgccatgcaagctgaaacatcattgcattagggtggcactgtag

SEQ ID NO: 28839 - DNA, 381 bp, synthetic construct
  misc_feature 1..381: note = Description of Artificial Sequence: Synthetic coding sequence
  source 1..381: mol_type = other DNA
atgaacattctgggctctcagtcccccctgcacccttccaccctctcaactgttatccacagaacccagcactggtttcacggaagaattagccgcgaggaaagtcaccggatcattaagcagcaaggacttgtagacggtctctttttgttgcgagactcccagtccaacccgaaggcctttgtgctgacattatgtcatcaccagaagattaagaatttccagattttaccctgtgaggacgacggccagactttcttctccttagacgacgggaatactaagttttcggatctcattcagctggtcgatttttatcagttaaacaagggggtgctaccttgcaaactcaagcaccactgcattagggtggctctttag

SEQ ID NO: 28840 - DNA, 1611 bp, synthetic construct
  misc_feature 1..1611: note = Description of Artificial Sequence: Synthetic coding sequence
  source 1..1611: mol_type = other DNA
atgaacgcaagcctagaatcactgtattccgcatgttcaatgcagtcggacactgtgcccctcctgcagaacggccagcacgcaaggagccagcctcgcgctagcgggcctcctaggagcatccagccgcaggtgtcccctaggcagagggttcaacgctcccaaccggtacacattctggccgtccggcgactgcaggaggaggatcagcaatttagaacttcaagccttccggcaattccaaatccatttccagagctatgtggtcccggaagtccacctgtcttaactccgggaagcctgccgccttcacaggccgctgccaagcaggatgtgaaagtgttttctgaagatggcaccagcaaggtcgtggagatcttagcagatatgactgcccgtgacctgtgtcagttattggtttacaagtcccattgcgtggacgacaacagttggactcttgttgaacatcaccctcacctcggcctcgagcgttgcttagaggaccacgagcttgtcgtgcaggtagagtctacaatggcaagcgagtctaagtttctgtttcggaagaactatgcaaagtacgagttctttaaaaacccaatgaatttctttcccgagcagatggtcacctggtgtcagcagagcaacggaagccaaacccagctgctgcaaaactttctcaactcaagcagttgcccagaaatccaggggttcctgcacgtcaaggaactgggaaagaaatcatggaagaaactgtacgtttgtcttcggcgatctggactctactgttccacgaaaggcacctccaaggagcctcgacatttacagctcctcgcagatctggaggacagcaatatattttcactcattgccggtcgcaaacaatacaacgctcccaccgaccatgggctctgcatcaagcccaataaggtccgtaatgagacgaaggagttacgtttgctgtgcgccgaagacgagcagacacgcacctgctggatgaccgccttcaggcttctgaagtatggcatgttgctgtaccaaaactaccgcatcccccaacaacgtaaggccttgctctctcctttctcaacccctgtgcggagtgtgtcagagaactcgctagtcgcgatggacttcagtggccaaacaggcagagtcattgaaaatcccgctgaagctcagtctgccgctctagaagagggtcatgcctggaggaagaggagcaccaggatgaacatcctgggctcacagtctcctttacatccttcaactttgagcacagtaattcaccggacccaacactggttccatggacggattagccgtgaagaatcccatcggatcatcaagcagcaggggcttgtggacggactctttctattacgtgatagtcaatcaaacccgaaggcattcgtattaactctgtgtcaccatcagaaaatcaagaactttcagattctcccttgcgaagacgacggtcagacgttctttagtctggacgacgggaacacaaagttttcagatctcattcagctggtagacttttaccagctgaacaagggtgttctcccttgtaaactcaagcaccattgcatccgggtggctctttag

SEQ ID NO: 28841 - DNA, 1785 bp, synthetic construct
  misc_feature 1..1785: note = Description of Artificial Sequence: Synthetic coding sequence
  source 1..1785: mol_type = other DNA
atggcattggccggatgccccgacagttttctacatcatccttattatcaggacaaagtggagcagacacccagaagccagcaggaccctgctggcccaggcctccctgcccagtctgatcgcctggcgaaccaccaggaggatgacgtggatttagaggcgttggttaacgacatgaacgcctcactggagtcactgtactcggcctgcagcatgcagagtgacactgtccctctgcttcagaacggtcaacacgccagaagtcagcctcgcgcttcaggtccacccaggagcatccaaccacaggtgtctcctcgccagcgggttcaacgctcccagcccgtgcacattctggcagtgaggagactccaggaagaggaccaacagttcagaacctcctctctaccagcaatccccaatcctttccctgagttgtgtgggcctggaagcccaccagttctgacccccggatcccttcccccttcccaagccgcagctaagcaggatgttaaggtgttctctgaagacggcacctcaaaagtcgtcgagattttggcggacatgacggcaagggacctgtgccagttgctcgtgtacaagtctcattgtgtggacgacaattcgtggaccctagttgagcaccacccacatttgggcctcgaaagatgtttggaggaccacgagctagtggtccaagtggagtccaccatggcatccgaaagcaagttcctgttccggaagaattacgccaaatatgagttcttcaagaatcctatgaactttttccccgaacagatggtgacctggtgccaacagtctaacggttctcagactcagcttctacaaaattttcttaatagctcgagttgcccggagatacaaggattcctccacgtcaaagagctgggcaaaaagtcctggaaaaagctgtatgtgtgtctgcgcaggtctgggctgtactgctctactaagggcacctcgaaagagcccaggcacctccaacttctggccgacctcgaagattcaaacatattctcgctgatagccggacggaaacagtataacgcacctaccgatcatgggctttgtattaaaccgaataaagttaggaacgagacaaaagagttacgactgctatgtgccgaggatgaacaaacccgcacttgttggatgaccgcgtttcgtctgctgaagtacggaatgctgctgtatcagaattaccgaatcccccagcaaaggaaggcattactgagtcctttctccactcccgtcagatcagtcagtgagaattcgctggttgccatggacttttcagggcaaaccggccgagtcatagagaaccccgctgaagcgcagtccgcggcactagaagaggggcacgcatggaggaaacgttcaactcggatgaatatactgggatcacagtcccccctacaccccagtactctgagcaccgtgatccatcgcacacagcactggtttcacggcagaatctccagggaggagtctcatcgaattataaagcagcaaggcctggttgacggcctgtttctgctccgggatagtcagagtaatccaaaggcctttgtccttactctttgtcaccatcaaaagattaagaattttcagatcctgccttgcgaagatgatgggcagacatttttttcacttgacgacggtaatactaagtttagcgacttgatccaactcgtggatttctatcaactgaacaaaggcgttctaccgtgtaagctcaaacatcactgcatccgagtcgccttgtag

SEQ ID NO: 28842 - DNA, 1785 bp, synthetic construct
  misc_feature 1..1785: note = Description of Artificial Sequence: Synthetic coding sequence
  source 1..1785: mol_type = other DNA
atggccctagcaggatgcccagactcgtttttacaccacccttactaccaagacaaagtggaacagacaccacgttctcaacaggatcctgccggacccggactgcctgcccagagtgaccgtctggcgaatcaccaggaagatgatgtggacctcgaagcactggtgaacgatatgaacgctagtcttgagtctctatattctgcttgctcaatgcagtccgataccgtgcccctgctccagaacgggcagcacgccaggagccagccgcgagccagcggcccacctcgcagtattcagccgcaggtctccccaaggcaaagggtccagcgctcccagcctgtgcacatcttggcggtccggagactccaggaggaggatcagcagtttcgcacctcctcactcccagcgattcccaatcctttccccgaactttgcggcccaggaagtcctccagtgttaacacccggttccctacctccgtcccaggcggcagctaaacaggacgtgaaagtctttagcgaggatggcacttcaaaagtggtggagatcctagccgatatgaccgcccgtgatctgtgccagcttctggtgtacaaaagtcactgtgtggatgacaacagctggaccttagtcgaacaccaccctcaccttgggctcgagcggtgtctcgaggatcatgagcttgtagtgcaggtggaatcgacaatggcctcggagtccaagtttctgttcaggaaaaattacgctaagtacgaattttttaagaaccccatgaacttctttccagaacaaatggttacatggtgtcagcagtccaacggatcacagacacagctgctccagaacttcctcaacagtagcagttgccctgagatccagggcttcctccatgtgaaagaactaggcaagaaatcttggaagaagctgtacgtgtgtctgcgaaggagcgggctttattgctctacgaaaggtacctccaaggagcccaggcacctgcagttactcgccgacctcgaggactccaatatttttagtctgatcgctggacgcaagcaatacaatgctcccactgatcacggcctgtgcatcaagccaaataaagtgcgtaatgagaccaaggaactgaggctgctttgcgctgaggatgagcagacacgcacctgctggatgaccgctttccggttgttgaagtatggcatgctactctatcaaaattaccggatccctcagcagcgaaaggcactgctctccccattctccacccctgtgcggtctgtctcggaaaattccctagtagcaatggacttctctggccagaccggacgtgtcatcgagaatcccgctgaggcgcagtccgcagcactcgaagagggacatgcgtggagaaaacggagcaccaggatgaacatactcggttcccagagccctctccacccctccaccttgtcaacagttatacatagaactcagcactggttccacggccgtatttcccgcgaggagagtcaccgcattatcaagcagcaggggcttgtggacggcctgtttctgctgagagattcccaaagcaatcccaaggcctttgttttgacactgtgccaccaccagaaaattaaaaattttcaaatcttaccctgtgaagatgacggacagacattctttagcctcgacgatggcaatacaaaatttagcgatctgatccaattggtggacttttatcagctcaataagggggtgttgccttgcaagctcaaacaccactgtatccgagttgcactttag

SEQ ID NO: 28843 - DNA, 1611 bp, synthetic construct
  misc_feature 1..1611: note = Description of Artificial Sequence: Synthetic coding sequence
  source 1..1611: mol_type = other DNA
atgaacgcatctctcgagagtctgtattccgcctgcagcatgcagagcgataccgttcccttattacagaatggccagcatgcccgatctcagcctcgggcatctgggcctccgaggtctattcaaccgcaggtttcccctagacagcgggtgcagagaagtcaaccagtgcacatcctagcagtgcggaggcttcaggaagaggaccagcaattccggaccagctccttgccagcaattcccaacccattccctgaactctgcggacccggatcccctcctgtactgaccccgggtagcctccctcctagccaggcggctgcgaagcaggacgtgaaggttttcagcgaggacgggacctccaaagttgtcgagatactggccgatatgacggccagagacctctgccagctgctcgtgtacaagtctcactgcgtggatgacaattcctggaccctggtagaacaccaccctcatttagggcttgaacgttgcctcgaagatcacgaactggtggttcaggtggagagcacaatggctagtgaaagcaagtttctttttcgcaaaaactatgcaaagtatgaattttttaagaaccccatgaatttttttcccgagcagatggtgacttggtgtcagcaatccaacggttcacagacccaattgctacagaattttctgaacagctcatcatgtcctgaaattcaggggttcttacatgtaaaggaactgggaaagaagtcttggaaaaaactgtatgtgtgcctcagacggtccggactctactgcagtaccaagggtactagtaaagaaccacggcacctgcagctgcttgcagatctggaggatagcaacatattttccttgatagccggtcgcaagcagtataacgctcctaccgaccacggcctatgtataaaacctaacaaggtacggaatgaaacaaaggagctccgtctcctctgtgctgaggatgagcagactcgcacatgctggatgacggcttttcgcctgctgaagtatggaatgctgctgtaccaaaactatcggatccctcagcaacgtaaggctctactttccccgttttcaacacccgtccgcagcgtttcagagaattctcttgtcgccatggactttagcgggcagacaggtcgggtcattgaaaacccagcggaagcgcagtccgccgcattggaagaagggcacgcatggagaaagcgctccacccgaatgaatattctcgggagccagtcccctctccacccttccaccttatccactgttatacacagaacccagcactggttccacggcaggatttctcgtgaggagtcacataggatcatcaagcagcaagggctcgtggacgggctgtttctcctgcgcgacagtcaaagcaacccaaaggcatttgtgctgactctctgccaccatcagaagattaagaatttccagattctgccttgtgaggacgacggccagaccttcttcagtctcgatgacgggaacaccaagtttagtgatttgatccagctcgtggacttttaccagctgaataaaggtgtgctgccttgcaaactgaagcaccattgcatccgggttgccttgtag

SEQ ID NO: 28844 - DNA, 1611 bp, synthetic construct
  misc_feature 1..1611: note = Description of Artificial Sequence: Synthetic coding sequence
  source 1..1611: mol_type = other DNA
atgaacgcatccctggagtcgctctacagtgcttgctctatgcagtctgacactgtgccccttcttcaaaatggacagcatgccagatcacagcccagggcttctggcccaccacgatccattcagccgcaggtcagccccagacagcgcgtgcagcgtagccagcctgtgcatatactggcagtacgcaggcttcaggaggaagatcagcagtttcgtacgtctagcctgcccgctatccccaatccttttccggagctttgcggacctggttctccccctgttctgaccccaggctccttaccaccaagccaagccgctgccaagcaggatgtaaaggtgttctcagaagatggcacttctaaagtggtcgaaatcctcgctgatatgactgcccgagatctgtgccagcttctggtgtataagtctcactgtgtggacgataactcatggactcttgtcgaacaccatccgcatctgggactggaacgctgtttggaagaccacgagctcgtggtccaggttgagtccactatggccagtgaatcaaagtttctattccgaaaaaactacgccaaatatgagtttttcaaaaaccctatgaacttctttcccgaacagatggttacctggtgtcagcagagcaatggcagccaaacccagctgctgcagaactttctcaacagtagctcatgtcccgaaatacagggatttctgcacgtgaaggaactcgggaagaagtcttggaagaagctgtacgtctgcctgcgccgaagcggattatattgttcaaccaaaggcacttcaaaggagccacggcatttacagctgttggcggacctcgaagacagcaacatcttctccctcattgctggacggaagcagtataacgctcccacagaccacggtctctgcattaagccaaacaaagtccgcaatgagactaaggagctgaggctgttatgtgccgaagacgaacagacgagaacgtgctggatgacagcatttcggctcctaaaatatggaatgttgctctaccagaattaccgtattcctcagcagcggaaggcactacttagcccgttctcaacacccgtgcgcagcgtatccgaaaactcccttgtggcgatggacttctcagggcagacgggcagggtcatcgaaaacccagctgaagcccagtccgcagccctcgaggagggtcatgcttggagaaagagaagcacaagaatgaatattctgggctcccaatccccgcttcacccaagtactctgtcaacagtcattcacaggacccaacattggtttcacgggaggatctcaagggaagagtcgcaccgcatcatcaaacagcagggtctggtggatggactctttttgctccgcgacagtcagtctaatccaaaagcatttgtgctaaccctctgccaccaccagaaaatcaagaattttcagatcctgccatgtgaagatgacggacaaaccttttttagcctggatgacggtaatacaaagttctcagacttaattcagctggtggacttttaccagttaaacaagggagtgctgccatgcaaattgaagcaccattgtatccgtgtggccctgtag

SEQ ID NO: 28845 - DNA, 1767 bp, synthetic construct
  misc_feature 1..1767: note = Description of Artificial Sequence: Synthetic coding sequence
  source 1..1767: mol_type = other DNA
atgcaggctgccggtccactcttccgctccaaagataaggtggagcagacgcccaggagccagcaggatccagcagggcctggactccccgcacaatccgatcgcctggccaatcaccaggaagatgatgtggaccttgaagcgctggtgaatgatatgaacgccagcctcgaaagtctatattcagcctgcagcatgcagtccgataccgtcccactgctgcagaacggacagcatgctagatcgcagccccgagcaagcggcccacctcgaagcatccagccacaagtgtccccaagacagagggttcagagaagccagccggtccatatcttggctgttagaaggctgcaggaggaggaccagcagtttaggacgagcagtctccctgcaattcccaatccttttccagagttatgtggacctggctcaccgccagtgttgaccccgggttccctgccgccaagccaggccgcagccaagcaggatgtgaaagtcttcagcgaagacgggaccagcaaggtcgtagaaatccttgcagacatgacagccagggacctgtgccagctgctggtgtataaatcccattgcgtggatgataacagctggaccctggtcgagcaccacccccacttaggtctggagagatgcttggaagaccacgagctcgtcgtccaggtagagagcactatggcatctgaatctaagtttctcttcagaaagaactacgccaagtacgagttctttaagaacccaatgaatttttttcctgagcaaatggtaacttggtgccagcaatctaacggttctcaaacccagctcctgcagaatttcttaaattcttcttcctgtccagagatccagggattcctgcatgtgaaggaactcggcaagaagtcttggaagaagttgtatgtatgcctgagaaggagcggactgtactgctccaccaagggtacctccaaggaacctaggcacctgcagttgctggccgacctcgaggactccaacatatttagcttgatcgctggcaggaagcaatacaacgcaccaacggaccatggactgtgcatcaaacctaacaaagtgaggaacgaaacaaaagaattgaggctgttgtgcgcagaggacgaacagactcgtacgtgttggatgactgcattcaggttgttgaagtatggtatgctcctctatcagaattataggatacctcaacagcggaaagccttgctgagccctttctcaacacctgtgcgcagtgtttcggaaaactcactggtagccatggattttagcgggcaaaccgggcgtgtcattgagaatcctgcagaggctcaatccgcagcgctagaagaaggccacgcatggaggaagaggtctacgaggatgaacattctgggctcacagtctcctctgcatccgtctacgttgtctactgttatccaccggacacagcattggttccacggtaggatctcaagagaggaatcccaccggattattaaacagcagggccttgtcgatggactgtttttgctcagggactcccagagcaacccgaaggcattcgtgctgacattgtgccaccatcaaaaaatcaagaacttccagatcctcccttgtgaggatgacggacaaaccttctttagcctggacgacggaaatactaaattctctgacctcatacaactggtcgacttctatcagctgaacaagggcgtattaccctgcaagttaaagcaccattgcataagggtggcattgtag

SEQ ID NO: 28846 - DNA, 1611 bp, synthetic construct
  misc_feature 1..1611: note = Description of Artificial Sequence: Synthetic coding sequence
  source 1..1611: mol_type = other DNA
atgaacgcaagcttggaatccctctacagcgcgtgcagcatgcagagcgatacagtgccgctcctccaaaacgggcaacatgctagaagtcaaccacgcgctagtggcccaccacggagcatccaaccacaagtctcacctaggcaacgtgtgcagcgcagccaacctgtccatatcctggccgtgaggaggttacaggaagaggatcaacagtttcgcactagcagcctccctgccattccaaacccgtttcccgagctgtgcggacccggatctccacccgttcttacccctggatcattgccgccttcccaagccgcagcaaagcaggacgtgaaagtttttagcgaggacggcacatcaaaggtggtggaaattctcgcagacatgactgctagagacttgtgccagctactcgtttataaatctcactgtgtggatgacaactcctggacactcgtcgagcatcacccacacctgggactcgagcggtgtttggaggatcacgagttggtagttcaggtggagtcaacaatggcttctgagagtaaatttctgttccgcaaaaactatgcaaagtacgagttcttcaagaatccaatgaacttctttccagaacaaatggttacctggtgtcagcaaagcaacggcagtcaaacccagttgctccagaacttcctgaacagcagttcttgtcccgaaatccagggatttttgcatgtgaaggaactgggtaagaagtcgtggaaaaaattgtacgtatgtctgcgtagaagtggcctttattgcagtacaaagggaacatcaaaagagcctagacatctgcagctgctggccgaccttgaggactcaaatattttctccttgatcgcaggtaggaagcagtacaacgcaccaactgaccacggcctgtgcatcaaaccaaacaaggtgcggaacgagactaaggagctccgcctgctgtgtgcagaagacgaacagactcgcacctgttggatgacagcatttagactgttgaaatacggaatgcttctgtatcagaactataggatcccccagcagcgcaaggcactcttatctccgtttagtactccggtgaggtcggtcagtgagaattctctcgtggctatggatttttcaggtcagactgggagggttatcgaaaacccagccgaggcccagtctgcagcattggaggaaggccatgcatggcggaagcgttcgacaagaatgaatattctgggatcccagtccccactacatccttcaacgctgagtaccgtgatccatcgcacccagcactggtttcatgggagaataagcagggaggaatcccataggatcatcaagcagcaaggccttgtcgatgggctcttcctgcttcgggacagccagagtaaccctaaagctttcgtcctgacattatgtcaccaccaaaagatcaaaaatttccagatcctcccatgcgaggacgatggccagacatttttctccctggacgatggtaacacgaagttttccgacctcatccagctggtggacttctaccaactgaacaagggcgtgctaccctgtaaattgaagcaccactgcatacgagtagccctttag

SEQ ID NO: 28847 - DNA, 1611 bp, synthetic construct
  misc_feature 1..1611: note = Description of Artificial Sequence: Synthetic coding sequence
  source 1..1611: mol_type = other DNA
atgaacgcttctctcgaaagtttgtattccgcgtgttccatgcagagtgacaccgtgccattgctccagaacgggcaacatgcccgatcgcagcctcgtgcttccggaccccctagatctattcaaccacaggtatccccacgccagcgcgttcagaggtctcagcccgttcatatcctggcagtgcgccgacttcaggaagaggatcagcagttccgaacgagttcccttccagctatacctaatcccttcccggaactttgcggaccagggtcacccccagtgttgacccctggatccctccctccttcccaggcggctgctaagcaagatgtcaaagtgttttcggaggatggcaccagcaaagtggtggagatattggccgatatgacagcccgagacctttgtcagttactcgtgtacaagtcccattgtgtggacgataattcttggaccctcgtggagcatcaccctcatcttggactcgagagatgccttgaggaccacgagctggtcgtccaggtcgagtcgacaatggcttccgagagcaagtttttgttccggaaaaattatgctaagtatgagttctttaagaacccaatgaacttttttcctgagcagatggtaacatggtgccaacagagcaacggatcacagacgcagttgctgcagaattttctcaacagctcaagttgcccggagatccaaggatttcttcatgttaaagagcttgggaagaaatcctggaagaaattgtatgtgtgcctcaggcgttcgggactttactgcagcactaaaggaacatcaaaggagcccaggcatctacaactactggctgacctagaggattccaatatcttcagcttgatcgcaggtcggaaacagtataacgcacccacagatcatggattatgcattaaacccaacaaggtgaggaacgaaacaaaagaactgaggctgttgtgtgcggaggatgaacagacccgcacctgctggatgaccgcttttagactcctaaagtacggcatgctcctttaccaaaactacagaattccgcaacagaggaaggccttgttgtcacctttttctactccagtgcgttcagtgagcgaaaatagtctggtggccatggacttctctggacagacaggtagagtgatcgagaaccccgctgaggcgcaatctgccgctctcgaggagggtcacgcttggaggaagcgatcaacccggatgaatatcctggggtcgcagagtcccctgcacccatccaccctgtcaaccgtgatccatagaactcagcactggtttcatggtaggattagcagagaagagtcacacagaattatcaaacaacagggcctggtggacggactgtttttactcagagattcgcagtcaaatccgaaggcattcgtcctaaccttatgtcaccaccaaaagattaagaactttcaaatactgccatgtgaggatgacggtcaaacatttttctccctcgacgacggtaatacgaaattcagcgacctgatccagctggtcgacttctaccagctaaacaaaggcgtgctcccatgtaaactcaaacatcattgcatccgagtggccctctag

SEQ ID NO: 28848 - DNA, 345 bp, synthetic construct
  misc_feature 1..345: note = Description of Artificial Sequence: Synthetic coding sequence
  source 1..345: mol_type = other DNA
atgcaagcagctggccctcttttccgctctaaggataaggttgaacagacgccacgttcacagcaggatccagccggacctggtctccccgcacagagcgatagactagccaatcaccaggaagatgacgttgaccttgaggcactcgtaaacgatatgaacgctagcttggaatctctgtactcagcttgctcgatgcagagtgacacagttccccttctgcagaatggacaacatgccagatcacagcctcgagcaagtgggccaccaagatccatccaaccgcaagtgtcaccacggcagcgagttcagaggtcccagcccgtgcatatattggccgtctag

SEQ ID NO: 28849 - DNA, 1767 bp, synthetic construct
  misc_feature 1..1767: note = Description of Artificial Sequence: Synthetic coding sequence
  source 1..1767: mol_type = other DNA
atgcaggcagcaggccctctgttcagatcaaaggataaggttgaacagacccccagaagccaacaagatccagctggccctggacttccagcgcaatctgataggttagccaaccatcaggaggatgatgtggacctggaagccctggtgaacgatatgaacgcttcactggagtcactgtattcggcctgcagtatgcaatccgatacggtcccactgctgcaaaacggacagcatgctcgtagtcagccacgcgcaagcggccctccacggtcaatccagcctcaggtgagtcccaggcagcgcgtacagaggtctcaacccgtacacatcttggccgtccgccgactacaggaagaagatcagcagttccggacctctagcctccccgctatccccaatccttttccagaactttgtggacccggttctccacctgtgctgacgccaggttcactgcctccgtcccaggctgctgcaaagcaagatgtgaaggtcttttctgaggacgggacctcaaaagtggtcgaaatactcgcggatatgacagcacgggacctgtgccagctgctggtctacaagtcccactgtgtcgacgataatagctggaccctggtggaacatcatccccatcttgggcttgagagatgtctcgaagaccatgagctggtagtccaggttgagagcacaatggcttcagagtcaaaattcctcttccggaagaactacgccaaatatgaattcttcaagaaccccatgaacttctttcccgagcagatggtgacttggtgccagcagagtaatgggtctcagacccagcttctgcagaacttcctgaattctagttcctgtccagagatacaaggatttttgcacgttaaggagcttgggaaaaaaagctggaaaaagctgtacgtgtgtctacgccgttcagggctatattgttccaccaagggtacttctaaggagccccgacacctgcaattgctcgccgaccttgaagacagcaacatcttttctcttatagcagggaggaagcaatacaacgcacccactgaccacggactctgcatcaagcctaataaggtgaggaatgagaccaaggaactgcggcttctctgcgccgaggatgaacagaccaggacatgctggatgactgcattccgattactaaagtacggaatgctcctctaccagaattacagaatcccgcaacaaagaaaagctctgctgtcacccttctctactcccgtacggagtgtaagcgagaactctctggtcgcaatggatttctccggacagacaggtagggtgattgagaacccagccgaagctcagagtgccgcactcgaagaagggcacgcttggcgaaaacggagcaccagaatgaacatcctcggtagtcagtccccactgcatcctagcaccctgagcaccgtgatacacagaactcagcactggtttcacggcagaatttcaagggaagagtcacacagaataatcaagcagcagggcttggtggacggtttgtttttgctgagggactcccaaagcaatccaaaagcttttgttctgaccttatgccaccatcagaagatcaagaactttcaaattctaccctgcgaggacgacggccagactttcttctccctcgacgatgggaacactaagttttctgatcttatccagctggtggatttctaccagctaaataagggcgtcctcccatgtaaattgaaacaccactgcattagagtcgcgctgtag

SEQ ID NO: 28850 - DNA, 531 bp, synthetic construct
  misc_feature 1..531: note = Description of Artificial Sequence: Synthetic coding sequence
  source 1..531: mol_type = other DNA
atggaagccattgctaagtatgatttcaaagcgactgccgacgacgagctgagttttaaacggggagatatcttgaaggtgctaaacgaggagtgcgatcagaactggtataaagccgagctgaatggtaaggatggattcatccccaagaactatatcgaaatgaagccacacccattcggtaacgacgtgcaacatttcaaagtactgcgtgacggggcagggaagtactttctgtgggtcgtgaagttcaactctctgaatgagctggtggattatcacaggtcaaccagtgtctcacgaaaccagcagattttcctgcgcgatatagagcaggtccctcaacaaccgacctatgtgcaggccttatttgactttgatcctcaagaggatggggagctgggcttcaggcggggtgatttcatccatgtgatggacaacagtgatccaaactggtggaaaggggcttgtcacggccagactgggatgtttcctcggaattacgtgactccggttaatcgcaacgtgtag

SEQ ID NO: 28851 - DNA, 654 bp, synthetic construct
  misc_feature 1..654: note = Description of Artificial Sequence: Synthetic coding sequence
  source 1..654: mol_type = other DNA
atggaagccattgccaagtacgattttaaggctactgcagacgatgaattgtcctttaagcggggtgacattctcaaagtgttgaacgaggagtgcgaccagaattggtataaagccgagctgaatggtaaagacggatttattcccaaaaattatattgagatgaaacctcacccttggtttttcggaaaaattcctagggcaaaagccgaagaaatgctctctaaacagcgccatgacggggcattcctaatacgggagtccgaatccgcccctggtgatttcagcctctccgtgaaatttggtaacgacgtgcagcacttcaaggtcctacgagatggagcaggcaagtactttttgtgggtcgtgaagtttaactccctaaacgagctggtggattaccacaggtcgaccagtgtatcccggaatcagcagatcttcctgcgcgatattgaacaggtcccacagcagccaacctatgtgcaggctttgttcgatttcgacccacaggaagacggagagctcggattccggagaggcgatttcattcacgtcatggataattccgaccctaactggtggaaaggtgcatgccatggtcagacaggtatgttccctcgaaactacgtgactccagtgaacaggaatgtgtag

SEQ ID NO: 28852 - DNA, 654 bp, synthetic construct
  misc_feature 1..654: note = Description of Artificial Sequence: Synthetic coding sequence
  source 1..654: mol_type = other DNA
atggaagcaatcgcgaaatacgactttaaggctaccgccgacgatgaattgtcattcaagaggggagatatccttaaagtcctgaatgaggaatgcgatcaaaactggtataaagccgagctgaacggcaaagatggcttcatcccaaagaattacattgaaatgaaaccacacccctggttctttggtaaaatccctagagctaaagctgaagagatgctcagtaagcagcgccacgacggcgctttcctgatccgggagagtgagtcagcgcctggcgatttttcactcagcgtgaaattcggtaatgacgtgcaacatttcaaagtgttgcgtgatggagccggaaagtacttcctgtgggtggtgaagtttaattctctaaacgaactggtggactaccaccggtccacatccgtcagtagaaaccagcagatcttcctaagagacattgagcaggtcccgcagcaaccaacgtatgtccaggccctcttcgacttcgatccccaggaggacggagagctaggctttaggagaggagatttcattcacgttatggacaactcagacccaaattggtggaagggagcctgccacggccaaaccggtatgttccccaggaactatgttacacccgtaaacagaaatgtatag

SEQ ID NO: 28853 - DNA, 654 bp, synthetic construct
  misc_feature 1..654: note = Description of Artificial Sequence: Synthetic coding sequence
  source 1..654: mol_type = other DNA
atggaggccatcgcaaagtatgattttaaggccacagctgatgatgagctctcttttaagcggggtgacatcctcaaggtgctcaacgaagagtgcgatcagaattggtataaagcggaattgaatggaaaggatggcttcattcctaaaaattatatcgagatgaaaccacacccatggttctttgggaaaatcccccgagccaaggccgaagagatgctctctaaacagcgtcatgatggcgcatttctgatccgggaaagcgagtccgcgccaggcgacttctctctgtccgtaaaattcggaaatgacgtacagcatttcaaggttcttcgtgatggcgctggcaagtatttcctttgggttgtaaagttcaattctctgaatgagctggtcgactaccaccgaagcaccagtgtttcccggaaccaacagattttcctccgagacatcgaacaggtccctcagcagccaacctacgtccaggcattatttgatttcgaccctcaggaggatggagagttgggcttccgcaggggagacttcattcacgtcatggacaacagtgatccgaattggtggaaaggtgcatgccatggccagacaggcatgtttccacggaactacgtgactcccgtgaatcggaacgtgtag

SEQ ID NO: 28854 - DNA, 222 bp, synthetic construct
  misc_feature 1..222: note = Description of Artificial Sequence: Synthetic coding sequence
  source 1..222: mol_type = other DNA
atgccagccctacacatcgaagatctcccagaaaaagagaagctgaagatggaagtggaacagcttcgcaaggaagtaaaacttcaacgccagcaagtgagcaaatgttctgaggagatcaaaaattatattgaagaaaggtctggcgaggatcctctcgtgaagggtatccccgaggacaaaaaccccttcaaggagaaagggagttgtgtgataagctag

SEQ ID NO: 28855 - DNA, 432 bp, synthetic construct
  misc_feature 1..432: note = Description of Artificial Sequence: Synthetic coding sequence
  source 1..432: mol_type = other DNA
atgagcggccgaggaaagactggtgggaaagccagagccaaagccaaatcgcgttctagtagagccggtctccagtttccagtgggaagggtacacagactgttacggaagggccactatgctgagagggttggtgctggagctcctgtatacttagctgctgtgttagagtaccttactgcagagatcctggagctggcgggtaacgccgcacgagataataaaaaaacccggattattcccagacacctgcagttagcaatccggaacgatgaagaattaaataagcttcttggcggagtgaccattgcgcaggggggtgttctgcccaatatccaagctgtgctactgccaaaaaaaaccagtgcgacagtgggtccaaaggccccaagtgggggtaaaaaggccactcaggccagtcaagagtattag

SEQ ID NO: 28856 - DNA, 432 bp, synthetic construct
  misc_feature 1..432: note = Description of Artificial Sequence: Synthetic coding sequence
  source 1..432: mol_type = other DNA
atgagtggtagaggaaaaaccggcggaaaggccagggctaaagcgaagtcacgcagcagtagagcaggactccagttccctgtgggtagggttcacagattactgaggaagggccattacgccgagcgggtgggggctggcgcaccagtttacctggctgccgttctcgagtaccttaccgctgagatcctcgaactggcaggaaatgcagctagggacaacaaaaagacacgcatcatccctaggcacctacagctagccattcgcaatgacgaagagctgaacaagctgctgggtggtgtaactatcgctcaaggcggtgttctgcccaacattcaggccgtcctactacctaaaaagacgtctgcaaccgttggtcccaaagcacccagcgggggaaagaaagcaacacaggctagccaggagtattag

SEQ ID NO: 28857 - DNA, 276 bp, synthetic construct
  misc_feature 1..276: note = Description of Artificial Sequence: Synthetic coding sequence
  source 1..276: mol_type = other DNA
atgtgcccatgtccgctgcaccgtggccgagggcctcctgccgtgtgcgcctgctccgctggcaggttaggactcagatcctccgctgctcagcttactgcggctcgccttaaagcgcttggtgatgagctgcatcaacgcaccatgtggcgaaggcgcgctcgatccaggcgcgctccggctcccggtgctctaccaacgtactggccatggctgtgcgctgctgcccaggtggcagccctcgcagcatggctactcggacggcgaaatctgtag

SEQ ID NO: 28858 - DNA, 618 bp, synthetic construct
  misc_feature 1..618: note = Description of Artificial Sequence: Synthetic coding sequence
  source 1..618: mol_type = other DNA
atgacggagagaagggtgccctttagcttacttcgaggcccatcctgggacccctttcgagactggtatccgcatagccggctgtttgatcaagcgtttggcctcccccgactccccgaagagtggtcacagtggctgggcggtagctcttggcccggatacgtccggcctctgcctccagcagcaattgaatcgcccgctgtggctgcacctgcttacagccgcgctttgagtcgacagttgagttccggggtctccgaaatcaggcatactgcggacaggtggcgcgtgagcctcgatgttaaccatttcgcccctgatgagctaactgtgaaaacgaaggacggtgtcgtcgaaataacaggaaaacatgaagagaggcaggatgaacacggctatatcagccgctgctttacgaggaaatacacactgcccccaggtgtggacccgactcaggtgtctagtagcctgtctccggaaggcacactcacagtcgaggctcctatgcctaagcttgccacgcagagcaatgaaataaccatccccgtcacgttcgaatcccgcgctcaactgggaggacctgaggctgccaaaagcgatgagacagccgctaaatag

SEQ ID NO: 28859 - DNA, 513 bp, synthetic construct
  misc_feature 1..513: note = Description of Artificial Sequence: Synthetic coding sequence
  source 1..513: mol_type = other DNA
atgaccgaaaggcgcgttccattctcactcctgcgtgggccttcttggcccggttacgtccgacctctgcccccagccgcaatcgagtctccagccgtggccgctcctgcttattctcgggcactctcacggcaactgtcatccggcgtgagcgagatccgccacaccgcggataggtggagggtctccctggatgtcaatcatttcgcccctgacgagctaaccgtaaagacaaaagacggcgtcgtcgagattaccgggaagcatgaagagcggcaggacgagcatggatacatctcccgctgcttcacgcggaagtacactctgcctccaggcgtggacccgacgcaggttagcagttcccttagtcctgagggcaccttgacggttgaggccccaatgccaaaactggctacacagtctaacgaaattaccattcctgtcacttttgagagcagggcacagttaggcggtcccgaggctgctaagagcgacgagactgcagctaaatag

SEQ ID NO: 28860 - DNA, 1926 bp, synthetic construct
  misc_feature 1..1926: note = Description of Artificial Sequence: Synthetic coding sequence
  source 1..1926: mol_type = other DNA
atggcaactgctaaggggattgccattggaatcgacctgggtaccacgtattcatgcgtgggcgtgttccaacacggtaaagttgaaatcatcgccaatgatcaaggcaacaggactacgcctagctatgttgccttcacggacactgaacggctgattggggacgcagcgaagaatcaggttgctatgaacccacagaacactgtgttcgatgccaagagactcattggcaggaaatttaacgatcctgttgtgcaggctgacatgaagttgtggccttttcaagtcatcaacgaaggcggtaagcctaaagtcctggtatcatataaaggtgagaataaggctttttaccccgaagagatcagctctatggtcctcaccaaattgaaagaaacagcagaggcttttctggggcaccccgtcactaacgcggtgattactgtgcccgcttatttcaatgacagccagaggcaggctacaaaggacgccggtgtgattgctggcctgaatgttctgcgaatcatcaatgagccgacagctgccgcaatcgcttacggcctggacaaagggggtcaaggggagagacatgtgctcatcttcgacctggggggtggcacatttgatgtgagtatcctcacgattgatgacgggattttcgaggtgaaagcaaccgctggggacacacacctcgggggagaagacttcgataacaggctggtatcgcactttgtcgaagaattcaaacgcaagcataagaaagacatcagtcaaaataagcgcgctgtgcgacgcctccggacagcatgtgaacgtgctaagagaactctaagctccagtacacaggcaaatctggagattgactctttgtatgagggtatcgatttttatacctctattacccgggcacgcttcgaagagctgtgcgcagatctttttcgtggaaccctcgagcccgtcgaaaaagccctgcgggatgccaaaatggacaaggccaagatacacgacatcgtgctcgtaggaggatcaacaaggatccctaaagtccagcgattactgcaggattactttaacggccgagacttgaacaagagtatcaatcctgacgaagcagtcgcttacggcgcagctgtgcaagcggctatcctcatgggagataagtccgaaaaggttcaggatctgctcctgctggacgtagcaccgctgtcacttggcctggagaccgcaggcggagtcatgacagcactcatcaagcgcaactccactatcccaacgaagcagacacaaatatttacgacgtacagcgataatcagcctggagtcctgatccaggtgtacgagggagagagagccatgactaaagacaacaatctgttaggcaggtttgacctaacagggatcccaccagccccaagaggtgtgccccagatcgaagttacttttgacattgatgctaacggcatactgaacgtgacggcaatggataagtctaccggaaaggttaataaaatcactatcactaacgataaaggcaggctaagcaaggaagaaattgaacgtatggttctcgacgctgagaagtacaaagccgaggatgaggtgcagcgcgaaaaaatcgctgccaaaaatgctttggaatcctacgcatttaacatgaagagcgttgtaagtgatgagggccttaagggaaaaatcagtgaatcggacaagaataagatcctcgataagtgtaatgagttgctgagctggctcgaggtgaatcagttagctgaaaaggacgagttcgatcataagcgcaaagagctgaaacaaatgtgtaatcccatcatcacaaagctgtatcaaggcggttgcactggccctgcgtgtggcacaggctacgtccctgggcgtcccgctaccggacccacaattgaagaggtcgactag

SEQ ID NO: 28861 - DNA, 1599 bp, synthetic construct
  misc_feature 1..1599: note = Description of Artificial Sequence: Synthetic coding sequence
  source 1..1599: mol_type = other DNA
atggcaacggcaaaggggatcgccattggaattgacctaggtaccacatacagttgcgtcggagtgtttcagcatggcaaggtcgagataatcgctaacgaccagggtaatcggaccaccccatcttacgtcgctttcaccgacactgagagacttatcggcgatgcagctaagaaccaggtggccatgaaccctcagaataccgttttcgatgccaaacgtcttatcggacggaaattcaatgaccccgtcgtgcaggctgacatgaagctctggccattccaagtgattaacgagggtggcaagcccaaggtgctggtaagctataagggggaaaataaggctttctaccctgaggagatctcgtccatggttctgacgaaactcaaggaaacagccgaggccttcctcgggcatcctgtgacgaatgctgttattaccgtacctgcgtatttcaacgacagccagcgacaggcaacaaaggacgccggagtgatagcagggcttaatgtgctcagaattataaacgagccaacagccgctgccatcgcttacggcctcgataagggagggcaaggtgaacgacacgtactgatcttcgacctgggaggaggaacttttgatgtgtccatccttacaatcgacgacggaattttcgaagtgaaggcaactgctggtgatacgcacctgggaggcgaggactttgacaaccggctggtgtcccattttgtggaggagttcaaaagaaaacacaagaaagatatctcacaaaataaacgggctgtccgaagattgaggaccgcttgcgaaagagcaaagcgaacattgagttctagtacacaggccaatctggagatcgattccctgtatgagggtatagatttctacaccagcataacccgggcacgctttgaggagctgtgtgctgatttgttccgaggaaccttggagcccgtggagaaagctctgcgggatgccaaaatggataaggccaaaattcatgacatcgtgttggtcggaggctccactaggattcccaaagtgcagagactgttacaagattactttaacggtcgggatctaaacaaatcaataaatcctgacgaagctgtggcctatggcgctgccgtgcaggcagcaatacttatgggagataaatcagagaaagtgcaggatctgctgttactggacgtggccccactgagcctcgggctggagacagccggaggggtcatgacggccttaatcaagcggaatagtacaatcccaacaaaacaaactcagattttcactacttacagtgataatcagccgggagtcctcatccaggtgtacgaaggagagcgggctatgaccaaggataacaaccttctggggagattcgatcttaccggcatacccccagctcccaggggcgtgcctcagatcgaggtgactttcgacattgacgctaacggtatccttaatgtcacggcaatggacaaaagcactggtaaggttaacaagattaccattacgaatgataaagggagattgtccaaggaggagattgagaggatggtcctggatgcagagaagtacaaggcagaggacgtctag

SEQ ID NO: 28862 - DNA, 1926 bp, synthetic construct
  misc_feature 1..1926: note = Description of Artificial Sequence: Synthetic coding sequence
  source 1..1926: mol_type = other DNA
atggcgaccgccaagggcatcgccatcggcattgacttgggcacaacatactcttgtgtgggtgtgttccagcatggcaaggtggagatcatcgccaacgaccagggaaatagaaccacaccttcttacgtggcatttacagatactgagcggctcatcggtgacgcagccaagaaccaggtggccatgaatccacagaacaccgtgttcgatgctaaacgactcatagggagaaagtttaatgatcccgtggtacaggccgacatgaagctctggccctttcaggtgatcaatgaggggggaaaaccgaaagtcctcgttagctacaagggcgagaataaggctttctaccctgaagagatcagctctatggtgctgaccaaactgaaagaaactgccgaagcattcctgggacatcccgtcactaacgctgttattaccgttccggcttacttcaacgatagccagaggcaggcaaccaaggatgcgggtgtcatagcaggtcttaacgttctccggatcattaacgaacctactgcagcagcaattgcgtacggtttagacaaagggggacaaggagagaggcatgtgcttatctttgatctgggcggaggtacctttgacgtaagcatcttgacaattgacgatggtatttttgaagtaaaggcaaccgccggtgacactcatctgggcggagaggactttgacaatcgtctggtaagtcattttgtggaagaattcaagcgcaagcataagaaggacatttcccagaataagcgagccgtgaggagacttcgcacggcttgcgagcgcgctaaacgaactctgagcagcagcacccaagcaaacctcgagatcgatagcctttacgaaggcattgatttttacactagtattacccgcgctcgcttcgaggaattgtgtgcggacctttttagaggcacgctagagcccgttgaaaaagcactgagggatgcaaagatggacaaagctaagattcatgatatcgtgctggtgggaggaagtacacgcatacccaaggttcagaggttgttgcaagactatttcaacggtcgcgacctgaacaaaagcattaacccggacgaggccgtggcttacggagcagctgtgcaggccgcaattttaatgggcgacaagtctgaaaaggttcaggacctcctgttgctggatgtcgcgcctcttagtcttggtctggaaacagctggaggagtaatgacggctctcattaaacggaactctaccatccccacaaaacaaacccagattttcaccacttacagtgacaaccaacccggtgtgctcatccaggtatatgagggagaaagagccatgaccaaagataacaatctccttggcaggttcgacctgactggcataccccctgctcctcggggagtaccacaaatcgaggtgacctttgacatcgacgcaaacgggatcttgaacgttacagcgatggacaaatctaccggaaaggtaaacaagattactattacgaacgataaggggagacttagcaaggaggagattgaaagaatggtgctggatgcggaaaagtacaaagctgaggacgaagtacagagggaaaagatagctgctaaaaacgctctcgaatcctacgcattcaatatgaagagcgtggtgtcagacgaggggcttaaagggaaaattagtgagagcgataagaacaaaatattagacaaatgcaacgagctgctgagctggcttgaggtgaaccagctcgcggaaaaagacgaatttgatcataagcggaaggagttgaagcagatgtgtaatcccattatcactaagttgtatcaggggggttgtacaggaccagcttgcgggactggctatgtaccaggcagacccgctaccggacccacgattgaggaagtagactag

SEQ ID NO: 28863 - DNA, 699 bp, synthetic construct
  misc_feature 1..699: note = Description of Artificial Sequence: Synthetic coding sequence
  source 1..699: mol_type = other DNA
gccaaaggcattgctattggcatcgacttgggaacgacttactcctgcgtaggcgtcttccagcatggaaaggtagaaatcattgctaacgaccagggtaatagaacaacccccagttatgtagccttcacagacaccgagagactcattggtgatgccggagtcatcgccggtctgaacgtgctccgcattattaatgagcctaccgccgcagccatcgcctacggattggacaaagggggtcagggcgagcggcacgttctgatattcgatcttgggggaggaacttttgacgtgtcgattctcactattgacgacgggatcttcgaggtgaaggcaaccgctggcgacacccatctcggtggtgaggacttcgacaatcgcttggtttctcacttcgtcgaagaatttaagagaaagcacaaaaaagatatatcccaaaataagcgcgctgtccgcaggctgcggaccgcctgtgaacgggctaaacggaccttgagtagtagcactcaggcgaatctagagattgattccctctacgagggcatcgacttttacacctccattacgagagctaggttcgaggagctgtgcgccgacctgttccgtggaaccctggaacccgttgaaaagggagctcccccagcatcccctcgctgctcaggatgcttcaggacaaccagcatggatgtcatctag

SEQ ID NO: 28864 - DNA, 1074 bp, synthetic construct
  misc_feature 1..1074: note = Description of Artificial Sequence: Synthetic coding sequence
  source 1..1074: mol_type = other DNA
atgaaggagaataaggaaaactcctccccatccgtgacaagtgcaaacctggatcacaccaagccatgctggtattgggacaaaaaggacctggcacacactccctcgcagctggagggattagaccccgcaacagaggccagatacaggcgggagggcgctcgtttcatttttgacgtgggcactagactggggctacattacgatactctggctaccggcatcatctacttccaccgtttctacatgtttcacagtttcaagcagttccccaggtatgtaaccggcgcatgctgtctgtttctcgcgggaaaagtcgaggagacccccaagaagtgcaaggatatcataaagacggcacgcagcctgctgaacgacgtacagtttggacaatttggcgacgaccccaaagaggaggtgatggtgctggagcgaatcctgttgcaaaccataaagttcgaccttcaagtcgagcacccttatcaatttttacttaagtatgcgaaacagctcaaaggggacaagaacaaaatccagaagctggtacaaatggcttggacctttgtgaacgatagaacaagtctctgtaccacactctcactgcaatgggagcctgagataattgctgttgccgtcatgtatttggcgggtagactctgtaaattcgagattcaagagtggacctccaagccaatgtatagaagatggtgggagcagtttgtccaagacgtcccagtggatgttctggaggatatatgtcaccaaattctggacctctatagtcaaggaaaacagcaaatgccccaccataccccacaccaacttcagcagcctccttccttgcaacccacaccccaggtgccccaggtccagcagtcgcagccctcgcagtcctctgaaccgtcacagccgcaacagaaggaccctcctttgatcctcctgcaagggtgggcctgtcgtcagcctgcaacccatcttttacctagtccgctggaagattccctgctgtgtcctcgcccatttccccaccccgcttgcctgcagctggggggatgggggggtcagcccggatag

SEQ ID NO: 28865 - DNA, 2565 bp, synthetic construct
  misc_feature 1..2565: note = Description of Artificial Sequence: Synthetic coding sequence
  source 1..2565: mol_type = other DNA
atgcccccttgcagcggaggtgacggatcgactccccctggaccctcactgagagatagggattgtccggctcagagcgccgagtatcctcgagaccgcctggatccacggccaggatcgcccagtgaagcctcgtccccaccattcttgcggtcaagagcgcctgtgaattggtatcaggagaaagcccaggtcttcctgtggcacctcatggtgtcagggagtacaacactgctgtgtctgtggaagcagccgttccatgtgagcgcctttccggtgactgcttctcttgccttccggcaatctcagggagcaggccagcacctgtataaggaccttcagccatttatcctgctgcggctgcttatgcctgaagaaactcagacacaggaccagcccatggaagaggaggaggtcgaaacttttgctttccaggctgagattgctcagttaatgtctctaattataaatacattttattctaataaagaaatttttcttcgggagctgatctctaattctagcgatgcactggacaagattaggtacgagtctctgacggatccaagcaagctggactccggcaaggaattgcacataaaccttatacctaataagcaggaccggaccctcactattgtcgataccgggatcggtatgaccaaggcagacctgatcaacaacctcggcactatcgcaaagtccgggacaaaggcctttatggaggctctccaggccggagcagacatatcaatgatcggccagtttggagtggggttttattctgcctatcttgtggctgaaaaggtgacagtgattactaaacacaacgatgacgagcagtatgcttgggagagctccgctgggggaagctttaccgttaggaccgacactggcgagccaatgggcagagggacaaaggtcatcctgcacctcaaggaggaccaaaccgagtatcttgaggaacggaggataaaggagatcgtcaagaaacattctcaattcatcggttacccaatcacactctttgtggaaaaggagcgagataaagaagtctccgatgatgaagcggaggaaaaggaggacaaggaagaggagaaagagaaggaagagaaggaatccgaggataagcccgagatcgaagatgtgggatcagatgaggaggaagaaaaaaaagacggagacaagaaaaagaagaagaagattaaagaaaagtacatcgatcaggaggaacttaataaaactaaacccatttggactcgcaaccctgacgacataactaacgaagagtatggcgagttctataaaagcttgactaatgactgggaagaccacctggccgtaaagcacttctcagtggaaggccagcttgaatttagagccctcttgtttgtgcccaggcgagccccatttgatctgtttgagaaccggaaaaagaagaataacatcaagctgtatgttaggcgcgtctttatcatggataattgcgaggaactgatcccagaatatctcaatttcattcggggtgtggtggattccgaagatctgccactgaacattagccgcgagatgctgcagcagtctaaaattctaaaggtcatcaggaagaacctggtaaagaaatgcttggagctgttcactgagctcgctgaagataaagagaactacaagaagttttacgagcagtttagcaagaacatcaagcttgggatccatgaggatagccagaatcgtaagaagctgtctgagttgctccgttattacacatccgccagtggcgacgagatggtgtccctcaaggattactgcacgaggatgaaagagaaccagaaacatatctactatattaccggggagactaaagaccaggtcgccaactctgcgttcgtagaacgccttaggaagcatggcttggaagtaatatacatgattgagcccattgacgagtactgcgtgcaacagttaaaggagtttgaaggtaaaacgcttgtgagtgtcactaaagagggactggagctccccgaggacgaggaagaaaaaaagaaacaggaggaaaagaagacaaaattcgaaaacctatgtaagatcatgaaggatatcctggagaaaaaagtagaaaaagttgttgtgtctaatcggctggtcacttcaccctgttgtattgtgacttctacgtatggatggactgctaacatggagaggatcatgaaggcgcaggcactgcgggataattctaccatggggtatatggctgcgaaaaagcacctggaaatcaaccccgaccatagcatcatcgaaacgcttagacaaaaggccgaggctgataagaacgataagtcggtgaaggatctggtgattctcctgtatgaaaccgctttgctgtcaagtggtttctccttggaggatcctcagacacatgcaaatcggatttatcgcatgatcaaactggggttgggtattgacgaagacgacccgaccgctgacgatacgtccgcagcagtgacggaggaaatgcccccactggaaggggatgacgacacctcaagaatggaggaggtggattag

SEQ ID NO: 28866 - DNA, 1242 bp, synthetic construct
  misc_feature 1..1242: note = Description of Artificial Sequence: Synthetic coding sequence
  source 1..1242: mol_type = other DNA
atgggacggggaaccaaagtaattctacacctgaaagaagaccaaaccgaatacctggaggaacgacggatcaaagagatcgtgaagaaacactctcagttcatcggctatcccataacgcttttcgtggagaaagaacgggataaggaagtgagcgatgacgaagcagaggaaaaggaggacaaggaggaagaaaaagagaaagaagaaaaggagagcgaagataaaccagaaatcgaggatgtcggtagtgatgaggaggaagaaaagaaggatggcgataagaagaaaaagaagaagatcaaagagaaatacattgatcaggaggagctgaataagaccaaaccaatatggacccggaaccctgacgacattaccaacgaggagtacggcgagttttataaatcactcacgaacgactgggaggatcatctcgccgtgaagcacttctccgtcgaaggtcagctagagtttcgggcactgctattcgtgcctaggcgagctcccttcgacctttttgaaaaccggaagaagaaaaataatataaaattatacgttcgcagggttttcattatggataattgtgaggagttgattcctgagtatctgaacttcattagaggagtcgtcgactctgaggatctccccctaaatatttcgcgagagatgctccagcagtccaagatccttaaggtgattagaaaaaaccttgtgaagaaatgcttagagctgttcacagaactggccgaggacaaggagaattataagaagttttatgaacaattctcaaagaatataaagctcggcatccacgaggactctcaaaaccgcaagaaactgtccgagttactgagatactatacgagtgcttcaggtgatgaaatggtcagcttaaaggattattgcacccgaatgaaggagaatcagaagcatatatattatataactggcgagaccaaggaccaagtcgctaacagcgcattcgttgaacggctgcgaaagcatggccttgaagtaatttacatgatcgagcctatcgacgaatactgcgtgcagcagctcaaggagtttgaggggaagaccctggtgtccgtgacaaaagaaggtctggagcttccagaggatgaagaggaaaagaagaagcaggaagagaaaaagacaaagtttgagaacctgtgcaagatcatgaaggacatcctggaaaagaaagtggagaaggtatgcgagtactccattagctag

SEQ ID NO: 28867 - DNA, 2412 bp, synthetic construct
  misc_feature 1..2412: note = Description of Artificial Sequence: Synthetic coding sequence
  source 1..2412: mol_type = other DNA
atgcgtgccctctgggtcctgggcctgtgctgcgtcctgctcacctttggctccgtccgagccgatgatgaggttgacgtggacgggaccgtcgaagaggacctgggcaaatctcgcgaggggtcacgaactgatgatgaggttgtgcaacgtgaggaagaagccattcagctggatgggctcaacgcctctcagatccgtgagctccgggagaagagtgagaagtttgcgttccaagccgaagtgaatcgcatgatgaagctgatcataaatagcctgtataagaataaggagatcttcctaagggaactgatctctaacgcgtcggatgctctagataaaataagattaatcagccttaccgatgaaaacgctctttcaggcaacgaggaactgaccgtcaagatcaagtgcgataaggagaaaaacctgcttcatgtgactgacactggagtgggaatgacacgtgaagagctggtcaaaaacctaggaaccatcgccaagtccggcacttccgagttcctaaacaaaatgactgaggcgcaagaagatggacaaagcacctctgagctaatcggacagttcggtgtgggtttctactcagcatttctcgtggctgacaaggtcatcgtcacttctaagcataataatgacactcaacatatctgggaatccgactccaatgagtttagcgtgatcgccgaccccaggggtaacaccttaggacgcggaactactataacgctggtgctgaaggaagaagcatccgattacttggagctggatacaattaagaacctggtgaagaaatatagtcagtttatcaacttccccatttacgtctggagctccaagaccgagacagtagaggaaccaatggaagaagaggaggcagctaaagaagagaaggaggagtccgacgacgaagcagctgtcgaagaagaagaagaagagaaaaaacccaaaaccaaaaaagtggaaaaaactgtgtgggactgggagctaatgaatgacatcaagcctatttggcaacgcccttccaaggaagttgaggaagatgagtacaaggcgttctacaaatcattcagcaaagaaagcgatgatcccatggcctacattcactttaccgcggaaggcgaagtaacatttaagtccattctgttcgtgccgacatccgctccaagaggattatttgatgagtatggctcaaagaagtccgactatatcaaactttacgttcgacgggtgttcataacagacgactttcacgacatgatgcctaaataccttaattttgtcaagggcgtagtggattccgatgacttacccctgaatgtttctcgtgagactctccagcagcacaaactgctgaaggttatcagaaaaaaactcgtgaggaaaacgctggatatgatcaagaagatcgctgatgataaatacaatgacaccttttggaaagagttcggcaccaacattaaactgggagtgatcgaagatcattccaatagaacccggctcgccaaactgctgcggttccagagctcccatcatccaaccgatattacatcactggaccagtacgtggagcgcatgaaggagaaacaagacaagatctattttatggctggaagttcacggaaggaagcggagagtagtccttttgtggagcggctccttaagaaaggctatgaggttatctacctaaccgagcctgtcgacgagtactgtatacaggctttacctgagttcgacggaaaaagattccagaatgttgcaaaagaaggggtgaaatttgatgagtctgaaaagactaaggagagtcgtgaagccgtcgagaaagaattcgagcccctccttaactggatgaaagataaggcactcaaggataagattgagaaggctgtggtgtctcagcgcctcacggagtcgccttgtgctctggttgcctcgcagtacgggtggagtggtaacatggagcggatcatgaaggcccaggcctaccaaacaggaaaagatatatcaacaaactattacgcctcccagaagaagacctttgagatcaatcctcggcatccactgatcagggacatgctgaggcggatcaaggaggacgaggatgacaagacagttctcgatcttgccgtagttctcttcgaaaccgctactctgaggtcggggtacctgttgcctgacaccaaagcctacggggaccggatcgagcggatgctgcggctttccctcaacatagatccagacgccaaggttgaggaagagcccgaggaagagccagaagagactgctgaagacacaacagaagacacagagcaggacgaggatgaggagatggatgtaggcacagacgaggaggaggaaacagcaaaagaatcgactgccgaaaaggacgaactctag

SEQ ID NO: 28868 - DNA, 1662 bp, synthetic construct
  misc_feature 1..1662: note = Description of Artificial Sequence: Synthetic coding sequence
  source 1..1662: mol_type = other DNA
atgcgcgcactctgggtgcttggactgtgctgcgtgctgttaacttttggcagcgtacgcgctgacgacgaagtcgacgtggatggaaccgttgaggaggacctgggaaagagccgcgagggttcccggaccgatgacgaagctgccaaggaagagaaggaggagtccgatgatgaggcagctgttgaagaggaggaggaggaaaagaagcccaagacaaagaaagttgaaaaaaccgtgtgggattgggaactgatgaatgatattaaaccaatctggcaaaggccatcaaaagaggtagaagaggatgagtacaaagcgttctacaaaagcttctccaaagagtcagacgaccctatggcttatatccactttacggccgagggagaagttacatttaaatctattctctttgtcccgactagtgcgccacgaggccttttcgatgaatacggaagtaagaagtcagattacattaagctgtatgtgcgcagggtgtttatcacagatgacttccacgatatgatgccaaaatacctcaacttcgtgaagggagtcgtggactcagacgatctcccactcaacgtgtcgagggagacactgcagcaacacaagttattaaaagtgatccgaaagaagctcgtgaggaagacactggacatgatcaaaaagatagcagatgacaaatataatgataccttctggaaagaatttggaaccaatatcaaacttggagttatagaggatcactcaaatcgaactaggctggcaaaactgctgcgcttccaaagctcccaccacccaaccgacatcacttcgctggatcagtatgtggagaggatgaaggaaaaacaggataaaatctactttatggcagggtctagccgcaaggaagctgagtcctcccctttcgtcgagcggcttctgaagaaaggttatgaagttatctaccttactgagcccgtggacgaatactgcatccaagccctaccagagtttgatggaaaaagatttcagaatgtcgcgaaggaaggtgtgaaatttgacgagagcgaaaaaactaaagaatcccgggaagctgtggagaaagagttcgaacctctcttgaattggatgaaagataaagcactcaaagacaagatcgagaaggcagtggtgtcacaacgcttgaccgaaagcccatgcgcccttgtggcaagccaatacgggtggtccgggaacatggaaagaataatgaaggcacaggcctatcaaactggcaaggacattagtaccaattactacgccagtcagaagaagaccttcgaaatcaatcctcgccaccccttgatccgcgatatgctacggcgaatcaaagaagatgaagatgacaaaaccgtcctcgacctggcagtggtgctgtttgaaactgctaccttgagaagcgggtaccttctaccagatactaaagcctatggagatcggatcgagcgaatgctgcggctttcactgaacattgacccagacgccaaagtggaggaggagcccgaggaggaacccgaggaaacagccgaagacacaaccgaggacaccgagcaagatgaggacgaagaaatggacgtaggcaccgatgaagaggaagagacagccaaagaatctaccgccgagaaagacgagctgtag

SEQ ID NO: 28869 - DNA, 948 bp, synthetic construct
  misc_feature 1..948: note = Description of Artificial Sequence: Synthetic coding sequence
  source 1..948: mol_type = other DNA
atgcgggctctgtgggtcctagggctttgttgcgtcctgctcacttttggatctgttcgggcagatgatgaagtcgatgtcgacggaaccgtcgaagaagacctgggaaagtctcgggaggggagcaggacggacgacgaagtagtccaaagggaggaagaggcgatccaactcgatggactgaatgcaagccagatcagagagttacgcgaaaagtccgaaaaatttgcctttcaggccgaagtcaatcgaatgatgaagctgataatcaacagcctgtacaagaataaagaaatctttctgcgtgaactgatttcaaacgcctcagacgctttggataaaatccgactcatatctctcacagacgaaaatgcactgtccggcaacgaagagctcactgtgaagatcaaatgcgataaggagaaaaatctcctgcacgtgacagatactggagttggtatgaccagagaggaacttgtgaaaaatctgggcacgatcgccaagtcaggcacttcagagttcttgaacaagatgactgaggctcaggaggatgggcagtcaacatcggagttaattggacagttcggagtgggcttctactcagcctttttagttgcagacaaggtcatcgtgacttcaaagcataataacgacacccaacacatttgggaaagcgactctaatgagttctctgtgatagctgacccacgaggtaatacactgggacggggaactacaataacactcgtacttaaagaagaagcctcagattatttggagctggacaccatcaaaaatcttgtaaagaaatactctcagttcattaactttcccatctatgtgtggtcaagcaagacagagaccgtagaagagcctatggaagaggaggaggcggctaaagaagagaaggaggagtcagatgacgaagcagccgctcgtagacgttag

SEQ ID NO: 28870 - DNA, 483 bp, synthetic construct
  misc_feature 1..483: note = Description of Artificial Sequence: Synthetic coding sequence
  source 1..483: mol_type = other DNA
atgtcggaagtgcgccctctctcccgtgacatcttgatggagacactgctgtacgagcagctgcttgagccaccaacaatggaagtgcttggcatgactgatagtgaggaggacctcgaccctatggaggatttcgacagtcttgagtgtatggaagggagtgatgctctggccttacgcctggcatgtataggcgatgagatggacgtgagtttgcgagctcctcggctggcccaactatcagaggtggcaatgcattcccttggactggcgttcatatacgatcagacagaggacattagggatgtgctcagatcttttatggacggttttactaccctcaaggagaacatcatgcgtttttggagatcgcctaaccctggctcttgggtgtcttgcgagcaagtcctactggctctcctactcctcctcgctcttttactgccactcttgagtgggggtttacacctgttgctgaagtag

SEQ ID NO: 28871 - DNA, 564 bp, synthetic construct
  misc_feature 1..564: note = Description of Artificial Sequence: Synthetic coding sequence
  source 1..564: mol_type = other DNA
atggaacgccctcagccagactccatgccccaggacttgtccgaagcgctgaaagaggcaaccaaggaggtgcacacgcaggctgagaacgccgaattcatgagaaacttccagaagggccaggttaccagagacgggttcaaactggttatggcgtccctgtaccacatctatgtagccctggaggaggagatagaaaggaacaaggaatctccagtgtttgcccctgtctacttccctgaggaattgcatagaaaagccgcactggagcaagacctggctttttggtatgggccaagatggcaggaggtcattccatacaccccggctatgcagagatacgtgaaaagattgcatgaagtagggcgaactgagcccgagctgcttgtggcccatgcttacactaggtacctgggagacctgtccggcggtcaggtactgaagaaaattgctcagaaggccttggacctgcctagcagcggagaaggcctagctttttttacttttcctaatatcgctagtgcaaccaaattcaaacagctctacaggtcccgcatgaactag

SEQ ID NO: 28872 - DNA, 1581 bp, synthetic construct
  misc_feature 1..1581: note = Description of Artificial Sequence: Synthetic coding sequence
  source 1..1581: mol_type = other DNA
cttgggggaaggtcttcctgcgaagaccccggatgcccaagggacgaggaaagggcgcctcgtatgggatgtatgaagagtaaatttttgcaggtgggaggaaacactttttctaagacagaaacatctgcctcgccccattgtccagtatacgtgcctgaccccaccagcacaattaagccgggaccgaattcgcacaattctaacacgcctggtatcagggaggctggctccgaggacattatcgtcgtggcattgtacgactacgaagctatccatcatgaggacctctcatttcagaagggggatcagatggtggtcctcgaggaatccggcgagtggtggaaagcccgtagtctggcgactcggaaagagggctatattccctcaaactacgtagccagggtcgatagccttgagacagaggagtggtttttcaaagggattagtagaaaggatgcagagcgacagctgttagctcccggtaacatgctggggtcgttcatgatcagagattccgaaacgacaaaggggtcctactccttgtcagttagagactatgatcccaggcagggggatacagtgaaacattacaagattcgaactttggataacggaggattctatattagccccagatccactttcagtacattgcaagagttagtagaccattataagaagggaaacgatggcctgtgtcagaaacttagtgtgccttgcatgagcagcaaacctcaaaaaccttgggagaaggatgcgtgggagattccccgagagagtctgaagctggagaaaaaattgggcgctggccagtttggagaggtctggatggccacttacaataagcacaccaaggttgccgttaagacaatgaaaccaggaagcatgtctgtggaggcttttctcgctgaggctaatgttatgaaaacgttgcagcacgacaaactggtgaagctgcatgcagtagtcaccaaagaacctatttacattattaccgaatttatggcaaaagggagcctgctcgacttcctaaagagcgatgaaggtagcaaacagcctcttcccaaacttatagatttcagcgcccaaattgccgaaggcatggctttcattgaacagagaaactacattcaccgcgacctgcgggcagcaaacattctggtgtccgcttccctggtgtgcaagattgccgactttgggctggcacgggtaattgaggataacgagtacacagcacgggagggggcaaaattccctatcaaatggaccgcacccgaagccattaacttcggaagctttaccatcaagtccgacgtgtggtccttcggaatactgcttatggagatcgtgacctacggacgtatcccttaccccggaatgagtaatcccgaagtgatcagggcactggagcgcggttaccgaatgccgcgacccgagaactgccctgaagaactgtataatattatgatgaggtgctggaaaaataggcctgaagagcgaccaactttcgagtatatccagtccgtacttgacgacttttacacagcgaccgagtcccagtaccagcagcaaccgtag

SEQ ID NO: 28873 - DNA, 1578 bp, synthetic construct
  misc_feature 1..1578: note = Description of Artificial Sequence: Synthetic coding sequence
  source 1..1578: mol_type = other DNA
cttgggggacggtctagttgcgaagaccccggatgtcctcgggatgaagagcgggctcccagaatggggtgcatgaagtcgaagtttctacaggtgggcggaaacaccttctccaaaactgagacctcagccagtccgcactgccctgtgtacgtgccagatcccacctcaacaattaagcccggtcctaactcacacaactccaacacacctggcatccgcgaggggtcagaggatattatcgtcgtagccttgtacgactatgaggctattcatcacgaggacctgagcttccagaagggcgatcagatggtggtcctggaagagagcggagagtggtggaaagcaaggagtctggccactaggaaagaagggtacatcccatcgaactacgtcgccagggttgattccctggaaaccgaagagtggttctttaaaggaattagcaggaaggatgctgagaggcaactcctcgcccctggaaatatgttaggctcattcatgatacgggactccgaaacaacaaagggctcatactcactatcagttcgggattacgacccgcgtcagggcgacactgtcaagcattataaaattaggacgctggacaatggaggcttttatatctcccctcgaagcactttctctacactgcaggagttagtcgaccattataagaaaggcaacgatggtttgtgtcaaaaattgtccgttccatgtatgagtagcaagcctcagaaaccatgggaaaaggatgcctgggagattccacgggaatcactcaaactggagaagaaactcggtgcaggccagtttggagaggtttggatggccacttacaacaagcatactaaagtggccgttaaaaccatgaagcctgggtctatgtctgtcgaagccttccttgctgaagcgaacgtcatgaaaaccctccaacacgataaattggtcaaattgcacgctgtggttaccaaggaacccatttatatcatcactgaattcatggccaagggcagcctgttggactttttaaagagcgatgaggggtccaaacagcctctgcccaagttgatcgacttttcagcacagatcgcggagggcatggcctttatagagcagaggaactacatccatcgtgatctccgagctgcaaacatcttagtgtcggcaagcctcgtgtgcaaaattgccgatttcggcctggcacgagtgatcgaagacaacgagtacaccgccagagagggtgcgaagtttcctattaaatggacggcccctgaggccatcaacttcggctcttttaccataaaaagtgacgtgtggtccttcggtattctcctcatggaaatagtcacatatgggaggataccctaccctgggatgtctaaccctgaggtgatccgcgcactggagcgagggtatcggatgccgaggccagagaactgtccggaagagctttacaacatcatgatgaggtgttggaaaaatcggcctgaagaacgccctacttttgagtatattcaatccgtactggatgacttttacacggcaacggaatcgcaataccaacagcagccatag

SEQ ID NO: 28874 - DNA, 1515 bp, synthetic construct
  misc_feature 1..1515: note = Description of Artificial Sequence: Synthetic coding sequence
  source 1..1515: mol_type = other DNA
atgggctgcatgaaaagcaagtttctccaggtgggcggtaacaccttctctaaaaccgagaccagtgcctctcctcattgcccagtatatgtgcctgacccgacctctactatcaaaccgggtcctaatagccacaactccaacacccccggaattcgggaagggtccgaagatattattgtggtggctttatacgactacgaggccattcatcacgaggacctgtccttccagaagggggatcaaatggtcgttctcgaggagagtggggaatggtggaaggcaagaagcctggcaaccaggaaggagggttacataccatctaattacgtggctcgggtggattctctggaaaccgaggagtggttctttaaggggatatctcgaaaggatgcggagcgtcagctgctggcccctggtaacatgctgggatcgttcatgatccgcgacagcgaaacgaccaaggggagctactcattgtccgtgcgggactacgatccacggcagggagatacagtgaagcattataagatccgaacccttgacaacggcggattctacatctcacccagatcaacattttccacgcttcaggagctggtggatcattacaaaaaaggcaatgatggattgtgccagaagctgtccgtgccctgtatgtcctctaagcctcaaaagccgtgggagaaggatgcatgggagattccaagggagagcctaaagcttgagaagaaactgggcgcaggacagttcggagaggtgtggatggctacctacaataaacacaccaaagtggcggtcaaaaccatgaaaccaggctccatgagtgtggaagccttcctagctgaggctaacgtgatgaagaccctgcagcatgataagctcgtgaagctccacgctgtcgtgaccaaggaaccaatctatatcattaccgagttcatggccaaaggctctctccttgacttcctcaagtccgacgaaggctccaagcaaccgctgccaaaactgatcgattttagcgcccaaattgccgagggaatggctttcatcgaacagagaaattatatccatcgagatctgcgcgctgctaacatactggtttccgcaagtcttgtgtgcaagatcgctgactttgggctggccagagtcatcgaagacaacgagtacacggctagagagggggcaaagttccccattaaatggaccgcacccgaagctatcaacttcggatcattcactatcaagagcgatgtttggtccttcggaatcctgttgatggaaatagttacctatggccgtatcccctatccgggaatgtccaaccccgaggtcattcgggcactggaacgcggttaccggatgccaaggccagagaattgcccggaggaactctacaacatcatgatgcgatgctggaaaaacaggcccgaggaacgccctacctttgagtacatccagtcagtgctggacgatttctataccgcgacggaatcgcagtaccagcaacagccatag

SEQ ID NO: 28875 - DNA, 1518 bp, synthetic construct
  misc_feature 1..1518: note = Description of Artificial Sequence: Synthetic coding sequence
  source 1..1518: mol_type = other DNA
atgggttgtatgaagagtaagtttctgcaagtgggtgggaacacattttcaaagaccgagaccagcgcctcccctcattgcccagtgtatgtgcccgatcctaccagcactatcaaaccgggtcccaacagccataacagcaacacacccggtattagggaggctggtagcgaggatatcatagtcgtggctctgtacgattacgaggcaattcaccacgaggacttgagtttccaaaaaggagaccagatggtggttctggaggagagcggtgaatggtggaaagctagatccttggccactaggaaggaagggtacatccccagcaactatgtagctagagtggattcgttggagaccgaagagtggttttttaaaggaataagcagaaaggatgctgagaggcagcttctggcgcctggaaatatgttgggcagcttcatgattcgcgattccgaaaccaccaaggggtcctacagtttaagcgtaagggactatgacccgaggcagggcgacaccgtgaaacattacaaaatcaggactcttgacaacgggggattctatatcagccccagatctaccttctcaacgctccaggaactcgtggatcattacaagaagggcaatgatggactatgtcagaaactctcagtgccatgtatgtcctctaagcctcagaagccctgggagaaagacgcgtgggaaattccaagggagtctcttaaactggagaaaaagctcggcgctgggcagttcggtgaggtgtggatggccacttacaataagcacaccaaagtggccgtcaaaactatgaagccaggcagcatgtctgtcgaagcttttctggcagaagctaatgttatgaaaacgctgcagcacgacaaactcgtgaagctccacgctgtggtgaccaaagaacctatctacataattaccgaattcatggctaagggctcgctgttggactttctgaaaagcgacgaggggtctaagcagccccttcctaaactgatagatttctccgcacagatcgccgaaggcatggcgttcatcgagcaaagaaattacattcaccgagaccttcgggctgctaatatcctcgtttctgcaagtttggtttgtaagatcgccgactttggcctggcaagagtgatcgaggacaacgaatacacagctagggaaggggcaaagtttcctattaagtggaccgcccctgaagcaatcaatttcgggagttttactattaagagcgatgtgtggagtttcgggatcctactgatggaaatcgtgacctatggacggattccttaccccggaatgagcaatccagaggtgatccgggctctggagcgcggttacagaatgccacgcccagaaaactgccctgaagaattgtataacatcatgatgaggtgttggaaaaaccggccagaagaacgccctacgttcgagtatattcaatccgtgcttgatgacttctacactgccacggagagtcagtaccagcagcagccctag

SEQ ID NO: 28876 - DNA, 1521 bp, synthetic construct
  misc_feature 1..1521: note = Description of Artificial Sequence: Synthetic coding sequence
  source 1..1521: mol_type = other DNA
atgatgggatgtatgaagagcaagtttttacaggttggcggtaacactttctcaaaaacggagaccagtgcgtcacctcactgtcctgtctatgtgcccgatcctacctcaaccattaagccaggcccaaactctcataactctaacacccccggtatccgggaggctggcagcgaggacattatcgtcgtcgccctatacgattatgaggcgattcaccatgaagacctgtcctttcaaaagggcgatcagatggtcgttctggaagaatctggagaatggtggaaagcccgttccctcgcaacgcggaaggaaggttacatccctagtaactatgtggctagggtggacagcctggagacagaagaatggttttttaagggcatctcgagaaaggacgccgaacgtcagctgctggccccaggaaatatgctgggcagcttcatgattagggactcagaaacaactaaaggcagttatagcctgagcgtcagagactatgatcctcggcagggagacaccgtgaagcattacaagatcaggactctagacaacggtggcttttacatttcaccacgcagtactttttccactcttcaagagctagtggatcattataaaaaggggaacgatggcttatgccagaagttgagcgttccttgtatgtcgtccaagccacaaaagccatgggagaaggatgcctgggagattcccagggagagtttaaaactggaaaaaaaactgggagccggtcagtttggagaagtttggatggccacgtacaacaagcatacaaaggtggccgtgaaaaccatgaagccgggatccatgagtgtggaggcattcttggccgaggccaatgtgatgaagacactgcagcacgacaagcttgtgaaactgcacgcggtcgtgactaaagagccaatttacattattacagagtttatggctaagggatcgctgctcgattttctgaaatcagatgaaggaagtaagcagcccctccctaaacttattgacttctcggctcaaattgccgaggggatggctttcatcgaacagcgcaattacatccatcgagacctgcgcgctgccaacatactggtaagcgccagccttgtgtgtaaaattgccgatttcgggcttgcacgcgttatcgaggataacgaatatactgcaagagagggggcaaagttccctataaaatggaccgcgccagaagccattaacttcggtagctttacaatcaagtccgacgtatggagctttggcattcttctaatggaaattgtcacctatggtagaatcccgtaccccggaatgagtaatcccgaggtgatcagggccctggagcggggatacagaatgcccagacctgagaattgtccagaggaactgtacaatattatgatgagatgctggaaaaatcgccctgaggaaagacctaccttcgagtacatccagagcgtgctggatgatttctacaccgcaacagagagtcaatatcagcagcagccatag

SEQ ID NO: 28877 - DNA, 1518 bp, synthetic construct
  misc_feature 1..1518: note = Description of Artificial Sequence: Synthetic coding sequence
  source 1..1518: mol_type = other DNA
atgggatgcatgaaatcaaaatttctacaggtcggcggaaatacattctccaagaccgagacctctgcctccccccactgtcctgtctatgtacctgaccccaccagcactatcaaacctggacctaatagccacaattcaaacacacccggaatccgggaagctggttccgaggacattattgttgtggctctgtacgattacgaagccatccaccacgaggacctgtctttccagaagggcgaccaaatggtggtactggaagagtccggtgagtggtggaaggcacgctcccttgcgactaggaaagaaggttacatcccttccaattacgtggctcgtgtggattctctcgagacagaagagtggttctttaaaggaatcagtcggaaggatgcagaacgccaactcctcgcaccaggcaatatgcttgggtctttcatgattcgcgactcagaaacaaccaagggctcatatagtctcagtgtacgcgattacgatcctaggcagggcgatactgtgaagcattacaaaatacgcactctggacaatggtggtttctacatctcgcctcggtcgacattcagcacacttcaggagttggtggatcattataagaaaggcaacgatggcctctgtcagaagctgtccgtaccctgtatgagctctaagccacagaagccttgggagaaggatgcatgggaaatacccagggagtctctcaaactggagaagaaacttggcgctggccagtttggggaggtctggatggctacatataataaacataccaaggtagccgtgaagactatgaaaccgggttccatgtccgttgaggcgttcttagccgaggccaatgtaatgaagacactacaacacgacaagctcgtgaaattgcacgcggtggtgaccaaggaacctatctacattattacagaattcatggcaaaggggtcactgttagactttcttaagagtgacgagggaagcaagcagccgctccctaaactcattgatttcagtgctcagatagcagagggcatggcatttatcgagcagcgcaattatattcatagagacctccgagctgcaaacatacttgtctctgcatctctggtatgtaaaatcgctgatttcggcctggcgagagtcatcgaggataatgagtatactgcacgagagggggcaaagttcccaatcaagtggactgcgccagaggccattaacttcgggtctttcacaatcaagtcagatgtctggtcctttgggattttgctgatggaaatcgtaacatatgggagaattccttaccctggtatgtccaaccccgaagtgatcagagcattagagcgtggctaccgtatgccccgtcccgagaattgtccagaagaactgtataatattatgatgaggtgctggaaaaaccgtcccgaggagaggcccaccttcgaatatattcagtccgtcctcgacgatttctataccgctaccgagtcacaataccagcaacaaccctag

SEQ ID NO: 28878 - DNA, 1632 bp, synthetic construct
  misc_feature 1..1632: note = Description of Artificial Sequence: Synthetic coding sequence
  source 1..1632: mol_type = other DNA
atgctacttcggtcaaagcctgctttgcccccacccctcatgcttctgctcctcggacccctcggccctctttcacctggtgccctgcctagacccgcacaggcccaggatgttgtagatctggattttttcactcaagagcccttgcaccttgtgtccccatcatttctgtcagtgaccatagatgcaaacctggcaacggacccacgttttctaattctcctcggttctccaaagctacgcaccttggccagggggctatctcccgcatatttgaggttcggaggaacgaaaaccgacttcctgattttcgaccctaagaaagaaagcaccttcgaggagcggagctattggcagtctcaagttaaccaggatatttgtaagtacggaagtatcccgccagacgtcgaggagaaactgaggctggagtggccatatcaggagcagttattgctgagagaacactatcagaaaaaatttaaaaactcaacttatagcagatccagtgtggacgtactttacaccttcgctaactgctcaggccttgacttgatattcggtctcaacgcgctcctgagaaccgctgacctgcagtggaactcatcaaatgcacagcttctcttggattactgtagcagtaagggttacaacatcagttgggaactgggcaacgaaccgaactcattcctgaagaaagctgacattttcattaatggaagtcagctcggcgaagacttcattcagctccacaagctccttcggaaatccacattcaagaacgctaagctttatgggccagacgttgggcaacctcggagaaaaaccgccaaaatgctaaaatcgttcctgaaagcgggaggtgaggtgatcgacagcgtgacctggcaccactactatctgaacggcaggacagccaccaaagaggatttcctcaacccagatgtcctagatatattcatatcatctgtgcaaaaagtgtttcaggtggttgagtcaacacgtccaggtaagaaagtatggttgggcgaaactagctcagcctacggaggaggggcacccctcttatcagacaccttcgctgccggttttatgtggctggacaaattggggcttagcgctaggatgggaattgaagtcgttatgaggcaggtattctttggtgccggaaattaccatctggtggacgagaacttcgacccattaccagactattggttatccctcctattcaagaagttggtaggaactaaagttctgatggccagtgtgcagggctcaaagagaagaaagctgcgtgtctacttgcactgtaccaataccgataatccacgatataaagaaggtgatctaactctatacgcgatcaacctgcataatgtgactaagtatctacggctcccatacccattctccaacaagcaggtagataaatacctactgaggcctttaggacctcacggattgcttagcaagtctgtccaactcaacggacttacccttaagatggtggacgatcagactctcccacctttgatggagaaaccattgaggcctggaagcagcctgggactaccagccttctcgtattcatttttcgtgattcggaacgcaaaggtggcagcgtgcatctag

SEQ ID NO: 28879 - DNA, 1632 bp, synthetic construct
  misc_feature 1..1632: note = Description of Artificial Sequence: Synthetic coding sequence
  source 1..1632: mol_type = other DNA
atgctcctccggtccaagcccgctttgcctcctccacttatgctgctgctgctgggccctctgggccctttgtcccccggagctctgccaagaccagctcaggcacaggatgtcgtcgacttggattttttcacacaagagcctctccatctggtgtctccaagctttttatctgtcacgattgatgctaacctggctacagaccccaggttcctgatcctgctgggctctcccaagctgcgtaccctggcacgtgggctctccccagcatacctgaggttcggcggaaccaagaccgattttctgatttttgatcccaaaaaagaatccacctttgaggagcggtcttattggcaatctcaggtcaatcaggatatatgcaaatacggctcaatccctccggacgtcgaggagaaactgcggttagagtggccgtaccaggaacagctactcctacgggagcactaccagaaaaagttcaagaacagtacctactcaaggtcaagtgtggacgtactgtatacgttcgcgaattgctccggactggacctgatttttggattgaatgcgttgcttcgcaccgcagacctgcagtggaactcttcaaatgcccaactcctgctagattactgcagctccaaagggtacaatatctcctgggaattggggaatgagccaaactcctttctgaagaaagctgacatttttatcaacgggtcacagcttggggaggattttatccagctccacaaattactcagaaagtcaacctttaagaatgctaagttgtacggcccagacgtgggccaaccccgaagaaaaacagctaagatgttgaagtcctttttgaaggccggaggggaagtcatagattccgttacatggcaccattactatcttaatggcagaaccgctactaaggaagacttcttgaatccagatgttctcgacatctttattagcagtgtgcaaaaggtgtttcaggtggtggagtccacccgccctggcaagaaagtgtggttaggcgagactagctctgcatacggtggaggggctccgctcctcagcgataccttcgctgcgggattcatgtggctcgataagctgggtctgtccgcaagaatgggcattgaagttgtgatgcgccaggtcttttttggcgctggaaactaccaccttgtggatgagaacttcgatcctcttcctgactactggctgtccttgctgttcaaaaagttggtgggcaccaaagtgcttatggccagtgtccagggatcaaagcggagaaagctgagggtgtacctgcactgcacaaacacagacaatcccagatacaaggagggggatctgacgctgtatgccatcaatctgcacaatgtgacaaagtacctccgacttccctacccgttttctaacaagcaggttgacaagtatttgctgcggccactcggtccacacgggcttctgagtaaaagcgtgcaactgaatggactcactctgaagatggtggatgatcaaactctgccgcctttgatggagaagcctcttagacccggttcctcccttggcttacctgccttcagttatagcttctttgtaatccgcaacgccaaagtcgccgcttgcatctag

SEQ ID NO: 28880 - DNA, 294 bp, synthetic construct
  misc_feature 1..294: note = Description of Artificial Sequence: Synthetic coding sequence
  source 1..294: mol_type = other DNA
atgctgctgttgctcgggcctctgggccctctatctcccggagcattgcccaggcccgctcaggcccaggacgtggtggacctggatttttttacccaggagcctttgcaccttgtgtccccttcttttctctctgtgacccgccctggtaagaaagtttggctgggcgagacaagttctgcttacggcggaggagcacctctgctcagtgacacctttgctgccggattcatgtggctggacaagctgggtctgtcagctagaatgggcatcgaggtggtaatgagacagtag

SEQ ID NO: 28881 - DNA, 1410 bp, synthetic construct
  misc_feature 1..1410: note = Description of Artificial Sequence: Synthetic coding sequence
  source 1..1410: mol_type = other DNA
atgctcctacggagtaaaccggcactgccacccccacttatgctgttactgttgggaccactgggccctctgagcccaggtgccctgccacgcccagctcaggcgcaggatgtggttgatctagacttcttcacacaggagccattgcacttagtcagcccatccttcctgtccgtgaccatagacgccaatctcgcaactgacccacgattcctgattctgctcggctctcctaagctgcggactctggcccgaggcctgtcccctgcctatctgcggttcggaggcacgaagacggactttctcatctttgatccaaaaaaggaaagcacctttgaagaacggagctattggcagtctcaggtgaatcaggacatttgcaagtatggcagtattcccccagatgtggaagaaaagttgaggcttgagtggccttatcaggaacagctgctcctaagggagcattaccaaaagaaattcaaaaatagcacgtactcgagatcatcagttgatgtcctttataccttcgccaactgctccggactcgaccttatctttggcttgaatgcgctgctgagaactgcagatctgcagtggaattccagcaatgcccagctgctgttggattactgttcatcgaagggttataacattagttgggagttgggtaacgaaccgaacagcttcttaaagaaggccgatatctttattaatgggtcccagctcggcgaagattttatccaactgcataagcttctgcggaagtccacatttaagaatgctaagctttatgggcctgatgtaggacaaccccgaagaaagactgccaagatgctgaaaagtttcctaaaagcaggcggtgaggttatcgactccgttacctggcaccactactacctcaacggacgaaccgcaacaaaagaagactttctaaatcctgatgttctggatattttcatttcaagtgtgcagaaagtttttcaggattattggttgagtctacttttcaagaagctagtggggacaaaagtcctgatggcttccgtgcagggctcaaagcgacgcaaattacgtgtctatctgcattgcacaaataccgataaccctcgctataaggaaggtgacctcacactctacgctattaacttgcacaacgttacaaaatatttgcgcttaccatatccattttccaacaagcaggtcgataagtacctgttgaggccgcttgggcctcatgggctcctatcaaagtctgtacagctaaacggcttgacactgaaaatggtggatgaccagacacttccaccccttatggagaaaccactgagacccggatcatcactcggactgcctgcctttagctacagcttctttgtaattcgtaacgcaaaagtcgccgcatgcatttag

SEQ ID NO: 28882 - DNA, 1458 bp, synthetic construct
  misc_feature 1..1458: note = Description of Artificial Sequence: Synthetic coding sequence
  source 1..1458: mol_type = other DNA
atgcttctgcgttcaaaacctgcactcccacccccactcatgctactcctgttaggacctctgggaccattaagccctggcgcactgccacggcctgcccaggcccaagacgtggtcgatcttgacttcttcacacaggagcctctacatttagtttccccttccttccttagcgtcacaatcgatgcaaacctggccacggacccccgtttcctcatactcctagggagtcctaagctccgcacgttagctcgcggtttatcgccagcctacttgcgtttcgggggtaccaaaaccgatttcctgatcttcgaccccaagaaggagtctacctttgaagaacgctcctattggcagtcacaggttaaccaagacatttgcaaatatggctcgatcccaccagacgtcgaggagaagctgagattagagtggccctaccaggagcagctacttcttagagagcactatcagaaaaaatttaagaactctacttactccaagccgaattcattccttaaaaaggccgatatattcattaacggatcccaattaggagaggacttcatccagttacacaagctgctacgcaaatctaccttcaaaaacgcgaagctttatgggccagatgtggggcagccgcgtcggaagactgctaaaatgctgaagtcctttttaaaggccggtggagaggttatcgactctgttacctggcaccattattatctcaacggccgaaccgcaaccaaggaggacttccttaacccggacgtgcttgacatttttatctcatccgtgcagaaggtgttccaggtggtcgagagtaccagaccaggcaagaaggtgtggctgggcgagacatcttccgcgtatggcggaggggctcccctcctatccgacacattcgccgcagggtttatgtggttagataaactgggactgagcgcaaggatgggcattgaagtcgtgatgcggcaagttttcttcggtgctgggaactaccatctcgtggacgaaaactttgaccctttaccagactactggctcagcctgctgttcaagaagctggtgggtacaaaggtgcttatggcgagcgtgcagggcagtaaacggagaaagctccgggtttacctgcattgtacaaacaccgacaatccaaggtacaaagagggagacctcacactatacgcgatcaacctgcacaatgtcaccaagtatctgcgcctgccttaccctttttccaataagcaagttgataaatatctcctccgcccactcggccctcacggcctcttgtctaagtcagttcaactgaacggcttgacgctgaaaatggtcgatgaccagaccctgccaccacttatggagaagccacttaggcccggatcttccctgggacttccagccttctcctactcgtttttcgtgatcagaaacgctaaggtggccgcttgtatctag

SEQ ID NO: 28883 - DNA, 1062 bp, synthetic construct
  misc_feature 1..1062: note = Description of Artificial Sequence: Synthetic coding sequence
  source 1..1062: mol_type = other DNA
atggagaagacccttgaaacggtgcccctggagagaaagaagagggaaaaggagcagtttcgcaagctgttcatcggcggattgagcttcgagaccaccgaagagtcgctgcgcaattactacgagcaatgggggaagttaactgactgtgtggtgatgcgcgacccagcatctaagagaagtcggggtttcggcttcgttacattctcctccatggctgaggttgacgctgctatggcagcaagaccacactctatcgatgggagggtggtggaacctaagcgggctgtagccagggaagagtctgggaagcctggcgcacacgtgaccgtgaaaaagctttttgtggggggaatcaaggaagacacagaggaacaccaccttcgcgactattttgaggagtacggcaaaattgacacgattgagatcattacggaccggcagtccggcaagaaaagagggttcgggtttgttaccttcgacgaccatgaccctgtggataaaattgtgttacagaagtatcatactataaatgggcataatgctgaagtacgtaaggctctttcacgtcaggagatgcaggaagtgcagagttccagatctggtcgcggagggaactttgggttcggggattcaagggggggaggaggcaattttggcccaggcccaggaagcaattttcggggtggttcggacggttatggctccggtaggggctttggagacggatacaacgggtacggagggggacctggcggaggaaatttcggaggcagtcctggatatgggggaggtcgcggaggatatggaggtggagggccagggtacgggaaccaggggggaggttatggtggcggatacgataattatggcggtgggaattatggtagcggaaattacaacgatttcggcaactacaatcagcagcccagtaattacggccctatgaagagcggtaactttggcggatccaggaacatggggggtccttacggcggaggaaattacggccctggcggtagcggtggaagcggcggatatgggggaagaagtaggtactag

SEQ ID NO: 28884 - DNA, 1026 bp, synthetic construct
  misc_feature 1..1026: note = Description of Artificial Sequence: Synthetic coding sequence
  source 1..1026: mol_type = other DNA
atggagcgagagaaagagcagtttcggaagctgtttattgggggactgagctttgaaaccaccgaagaatctctacgaaactattacgaacagtggggcaaactgacggattgcgtagtgatgcgggacccagcctcaaaacgcagcaggggatttgggtttgtcactttttcttctatggccgaagtggacgctgcgatggcggctagaccgcattcgatcgacggaagagtggtcgaacctaagagagccgtggctagggaggaatcaggaaagccaggagctcacgtgacagtcaagaaactgttcgtgggaggcatcaaggaggacaccgaagagcaccatctgagagattacttcgaagagtacggcaaaattgacaccatcgaaattattacggatcgacaaagcggtaaaaagcgaggtttcgggttcgtaaccttcgatgatcacgatccagtcgacaagatcgtactgcagaaataccacaccatcaatggccataatgcagaggtccgcaaggctctaagtaggcaagaaatgcaagaagtgcagtcttcacgtagcggcaggggcggaaatttcggctttggcgattccagagggggaggtggcaatttcggcccaggaccgggaagcaactttagaggcggttcagatggttacgggtccggaaggggtttcggcgacggatacaacgggtatggcggtgggccagggggtggtaatttcggcggtagcccaggatacggtggcggacgcggaggatacgggggtggtggccctggatatgggaatcagggagggggatatggaggcggttatgataactatggcggagggaactatgggagcggcaattataatgattttggcaattacaaccagcagccctccaactacggtccaatgaagagcgggaacttcggtggtagcaggaacatgggcggaccatacggcggagggaattatggccctggcggatctgggggatccggcggttacggtgggagatcccgctactag

SEQ ID NO: 28885 - DNA, 1062 bp, synthetic construct
  misc_feature 1..1062: note = Description of Artificial Sequence: Synthetic coding sequence
  source 1..1062: mol_type = other DNA
atggaaaaaacgttggaaacggtgccccttgagcgaaagaagcgtgaaaaagagcagtttcggaagctgttcatcggaggtctgtccttcgagacaactgaagaatccctccggaattactacgagcaatggggcaagctaactgattgcgtagtgatgcgcgacccagccagcaaacgtagtcgaggattcggcttcgtgacttttagcagcatggctgaggtggacgccgcaatggccgcacgtccacacagtattgacggcagggtcgttgaaccaaagcgagccgtggccagggaggagtcgggaaaacccggtgcccacgtcacagtgaagaagttattcgtaggcggtatcaaggaagatacggaagaacatcacctgagggattactttgaagagtacgggaaaatcgacaccattgaaatcatcaccgaccgacagagcggaaagaaacgcggattcggcttcgtgacattcgacgaccacgacccggttgataagatagtgctgcagaagtaccatacgatcaacggccacaatgccgaagtgcggaaagctctgtcacggcaggaaatgcaggaggtgcagagtagcagaagtggcagaggaggaaatttcgggttcggagatagtcgagggggtggcggaaacttcggtccgggacctgggagtaatttcaggggtggatcggatgggtatgggtcgggaaggggcttcggggacggatataatgggtatggcggtggtccagggggagggaactttggcggtagccccggatatgggggagggaggggcggttacggaggcggaggtcctggatatgggaatcaaggaggcggatatggcggagggtacgacaactacggaggagggaattatggcagtgggaattataatgatttcggcaattataaccaacagccgtctaactacgggcctatgaaatctgggaacttcggaggctcacgtaatatgggtgggccttatggtggaggcaactacggcccaggcggaagcggcggttccgggggatacgggggacgatccagatactag

SEQ ID NO: 28886 - DNA, 750 bp, synthetic construct
  misc_feature 1..750: note = Description of Artificial Sequence: Synthetic coding sequence
  source 1..750: mol_type = other DNA
atggagagagagaaggaacagttccgcaaactgtttatcggaggactgagtttcgagacgaccgaggagagtctgcggaattactacgagcagtgggggaagttgaccgattgcgtagtcatgcgcgaccctgcctccaaaaggtccagaggctttggcttcgtgacattctcgtcaatggcagaagtcgatgcggctatggctgcgcgacctcactccatcgatggccgagtagtggagcccaagcgggctgtggccagagaggagtccggcaagcctggagctcacgtcaccgtgaaaaaattatttgtgggagggattaaggaagataccgaagagcaccatctaagagattatttcgaagaatatggtaagattgatactattgaaatcatcacagaccggcagtctggcaagaaacgaggattcggatttgttacatttgacgaccatgaccctgtggataaaattgtgctgcagaagtaccacacaataaacggacataatgctgaggtcagaaaggccctgtcaagacaagagatgcaggaagacctggaagtggccattctcgaggtggctcccgtcatggaggaggaagaagaagacatggtggtggaagacttagatatggctacccgggtaggggctactgaggtggtcatgacaacaatggaggaggaaatcatggaggttgagatcaccatgatattggagatcatcacaagcaacttactcacaaccgtgcagtag

SEQ ID NO: 28887 - DNA, 846 bp, synthetic construct
  misc_feature 1..846: note = Description of Artificial Sequence: Synthetic coding sequence
  source 1..846: mol_type = other DNA
atgagcgaagaacagtttggaggggatggggcagctgggaatggtggaggcagacgtgctggtgaacaggagggcgctatggtggccgcaacacaaggagctgccgcacgggaggccgagccagggccaggggcagagcccaggctggaagctcccaagggcgcagagtcagagggagccaagatcgacgccagcaagaatgaggaggatgagggcaagatgtttatcgggggactgagttgggacaccacaaaaaaagatctcaaagactacttttccaagtttggagaggttgtggattgtactctgaagcttgatcccatcacaggcaggtctcgtgggtttggctttgtgctctttaaggagtctgagtctgtagacaaagtgatggatcaaaaagaacacaaattgaatggtaaagtcattgaccctaagcgcgctaaggcaatgaaaaccaaggaacctgtgaaaaagatcttcgtgggcggactttcacccgacacgcctgaagagaagatacgggagtactttggagggttcggggaggtagagtcaattgaactccccatggacaacaaaaccaataagagaaggggcttctgttttattacattcaaagaggaagaacctgttaagaaaatcatggagaaaaaatatcacaacgtgggcctctccaagtgcgagatcaaggtcgcaatgtccaaggagcagtaccaacaacagcagcaatgggggtctcggggtggcttcgccggtcgggctcgcggtagaggcggtgatcagcaatcaggctatggaaaagtatcccggcgtggtggtcaccagaattcctacaaaccatactag

SEQ ID NO: 28888 - DNA, 1068 bp, synthetic construct
  misc_feature 1..1068: note = Description of Artificial Sequence: Synthetic coding sequence
  source 1..1068: mol_type = other DNA
atgtccgaggaacaattcggaggcgacggagcggctgctgccgcaaccgctgctgtgggaggaagtgctggggaacaggagggggctatggttgcagctacgcagggcgcagccgcagcagctggaagcggggctggaacaggcggaggcaccgcctctggcggaactgaagggggaagtgcagaatcagagggcgctaagattgatgcttccaagaatgaggaagacgaagggcattccaactcttctcccaggcacagcgaggcagctacggcccagcgagaggagtggaaaatgttcataggcggactgtcctgggacacaaccaagaaggacctgaaggattacttctcaaagttcggcgaagtggtcgactgtactctgaaattggatcctataactggaagatcgcgagggttcggattcgttttgttcaaggagtccgagtccgtggataaagtgatggatcaaaaggaacataaactgaatggaaaagtgatcgatccgaagcgtgccaaagctatgaaaaccaaagagccagtgaaaaagatatttgttggtggcttgtcacccgacacacccgaggagaagatacgagagtactttggaggcttcggggaagtcgaatctattgaactgcctatggacaacaaaaccaacaaacggaggggattttgcttcatcacattcaaagaagaggaacctgtcaagaaaattatggaaaagaagtaccacaacgtgggcttatctaaatgtgaaatcaaggtagcgatgagcaaagaacaataccaacaacagcagcaatggggctcaagaggcggtttcgcaggaagagctcgcggacggggtggaggccctagccagaattggaatcaggggtattctaactattggaaccagggttacggaaactatggctacaactcccaggggtatggcggatacgggggttatgattacacaggctacaataactattacggctacggcgactactcaaaccagcagtcaggctacggcaaagtatcccggcgtggcggacaccagaactcttacaaaccttactag

SEQ ID NO: 28889 - DNA, 1011 bp, synthetic construct
  misc_feature 1..1011: note = Description of Artificial Sequence: Synthetic coding sequence
  source 1..1011: mol_type = other DNA
atgtccgaagaacaattcgggggtgacggagctgctgcggctgctacagcggcagtcggcggatctgccggtgaacaggaaggcgcaatggttgccgctacccagggggctgctgcagctgccggttccggggcaggaacaggcggaggcaccgcaagcggtgggaccgaagggggtagtgcagagagtgagggcgctaagattgatgcctctaaaaacgaagaggacgaggggaagatgtttatcggcggtctgtcctgggacactaccaagaaggacctcaaagattacttctcaaaatttggggaggtggtggattgtacactgaaactggatcctattactggcaggtctagggggttcggctttgtgttattcaaggaatctgaatctgtcgataaggtgatggaccagaaagaacataagttaaatggcaaagtcatcgatccgaagcgggcaaaagcgatgaagaccaaagaacccgttaagaagatttttgtgggcggtctgtcacccgacaccccggaagaaaagatacgagaatatttcggcggattcggcgaggtcgagtctatagagctaccgatggacaacaaaacaaacaaacgccgaggattctgcttcatcacgttcaaggaggaagagccagtgaagaagatcatggagaagaagtatcacaacgttggattgagcaaatgcgaaatcaaagtggccatgtctaaagaacagtaccagcagcaacagcagtgggggtcacggggagggtttgcgggtagagccagaggcaggggcggtggtcccagccagaactggaaccagggctattctaattattggaatcaggggtacgggaactacggatacaattcccagggttacggtgggtacggtggctacgattacacaggatataacaactattacgggtacggggattactccaatcagcagtccgggtatgggaaagtgtcaagaagggggggtcaccagaacagttataaaccctattag

SEQ ID NO: 28890 - DNA, 921 bp, synthetic construct
  misc_feature 1..921: note = Description of Artificial Sequence: Synthetic coding sequence
  source 1..921: mol_type = other DNA
atgtccgaggagcagttcggcggagacggtgcagcagcagcggcaactgccgctgtcggaggtagcgccggagagcaagaaggtgcaatggtggcagcaactcagggagcagctgccgcagctggatcaggggcaggcaccggtggagggacggccagcggcggaaccgagggcggttccgccgaatctgagggcgcaaagatcgatgcctctaaaaacgaagaagacgagggacactctaacagcagccctcggcatagcgaggccgcaaccgcacagagagaggagtggaaaatgttcatcggaggcctctcctgggatacaaccaagaaggatttgaaagattactttagcaaatttggagaggtcgtagactgcacacttaaacttgaccctatcacagggagatcaaggggcttcggattcgtcctattcaaggaatccgagtcggtcgacaaggtgatggaccagaaggagcataaactcaacggtaaggtcatagaccccaagagggcgaaggccatgaaaaccaaagaacctgtcaaaaagatcttcgtgggcggattgagtccagataccccagaggaaaaaatacgcgaatacttcggaggcttcggtgaggtagagtccatagagctgccaatggacaataaaactaacaagagaaggggattctgtttcatcactttcaaggaggaggagcccgtcaagaaaattatggaaaagaagtaccataatgttggactgtccaagtgtgaaattaaggtggcgatgtctaaggaacagtatcagcagcagcaacagtggggatcacgcggaggattcgctggcagggccaggggtaggggaggagatcagcaatccggctatggtaaagtgtcaagaaggggagggcatcaaaatagctataaaccctactag

SEQ ID NO: 28891 - DNA, 468 bp, synthetic construct
  misc_feature 1..468: note = Description of Artificial Sequence: Synthetic coding sequence
  source 1..468: mol_type = other DNA
atgtctgaagaacagtttggtggggatggcgcagccgcagctgcaactgcagccgtcgggggatcggcgggtgaacaggaaggcgctatggttgccgctactcagggcgctgccgctgctgccggttctggagccggaacaggaggcggtaccgcctctggtggcaccgaaggaggctccgcagagtccgaaggagctaaaatcgacgcctcgaagaacgaggaggatgaaggtaagatgtttattggaggcctctcatgggacactactaagaaggacctgaaggattacttttctaagtttggtgaggtcgttgactgtacccttaaattagacccaattactggcagatctcggggtttcggattcgtgctgttcaaagagagcgagagtgttgacaaggtgatggaccagaaagagcacaagctcaatgggaaagtgattgacccgaaaagagctaaggcatag

SEQ ID NO: 28892 - DNA, 666 bp, synthetic construct
  misc_feature 1..666: note = Description of Artificial Sequence: Synthetic coding sequence
  source 1..666: mol_type = other DNA
atgagtgaggagcagttcggaggtgacggcgcagccgcagcagctaccgctgcggtgggcggttctgccggagagcaggagggagctatggtcgccgctacacagggcgcagcagccgcagctggatcaggggctgggactgggggaggcacagcaagtggaggcaccgagggcggatcagccgagagcgagggtgccaaaatcgacgccagcaagaacgaggaggatgagggccactccaacagcagcccccgtcacagtgaggcagcgaccgcccagagggaggagtggaagatgttcatcggcggattgagctgggataccacaaaaaaggatctgaaggattattttagcaagtttggcgaagttgtcgactgtacactgaagttggaccccatcaccgggagatcacgcggatttggctttgtactctttaaagaatccgagagcgtcgacaaggttatggaccagaaggaacacaagctgaacgggaaggtgatcgatccaaaaagggctaaagccatgaaaaccaaggagccagtgaaaaagatctttgttggcggactgtcacctgacacccctgaagagaaaattcgcgaatatttcggagggttcggcgaggtggaaagtatcgaactgcccatggataataaaacaaacaagtag

SEQ ID NO: 28893 - DNA, 633 bp, synthetic construct
  misc_feature 1..633: note = Description of Artificial Sequence: Synthetic coding sequence
  source 1..633: mol_type = other DNA
tgaaaaatgttcatcggtggcctcagctgggatacgacaaaaaaggatttaaaggactatttttccaagttcggcgaggtggttgactgcacgttaaagctagatcccattaccggtcgatccagaggattcgggttcgtgctgtttaaggagagcgagtccgtggacaaggtgatggatcagaaagagcataagttaaatggaaaggtgatagatccaaagcgagctaaagcaatgaaaaccaaagagcccgttaagaagatctttgtgggtggcctgagtccggacacacccgaagagaagatccgggaatacttcggcggatttggcgaagtagaaagcatcgagcttccaatggataataaaacaaataaacgaaggggattctgttttatcaccttcaaagaggaggagcccgtcaagaagattatggagaagaagtaccacaacgttggcctgtcaaagtgcgagatcaaggtggccatgagtaaagagcagtaccagcagcagcagcaatggggcagtcgcggtggcttcgccggtcgagccaggggcagaggtggggaccagcagagcgggtacggcaaggtttcccgacgcggaggccaccaaaacagctataaaccttattag

SEQ ID NO: 28894 - DNA, 606 bp, synthetic construct
  misc_feature 1..606: note = Description of Artificial Sequence: Synthetic coding sequence
  source 1..606: mol_type = other DNA
atggatcaaaaagaacacaagctcaacggcaaggtgatcgatcctaaaagggcgaaggccatgaaaacaaaggagccagtgaaaaagatattcgttggcggtctgtcaccagacaccccagaggagaaaattagagagtattttggaggctttggcgaggtggaatcaattgaattaccaatggacaacaaaactaataagcgccgaggattttgcttcattaccttcaaggaggaggagcccgtgaagaagattatggagaagaagtaccacaatgttggcctgagtaagtgtgagatcaaagtggccatgtctaaagagcagtatcaacagcagcagcagtggggttctagggggggtttcgccggaagagctcgcggaagagggggaggcccatctcagaactggaatcagggatatagcaactactggaatcagggctatgggaattacggctataactctcagggctatggcggatatggaggttatgactatacgggttataataactattacgggtacggggattacagcaaccagcaatcggggtatggcaaggtctcgcgtagagggggacatcaaaattcctataaaccatactag

SEQ ID NO: 28895 - DNA, 912 bp, synthetic construct
  misc_feature 1..912: note = Description of Artificial Sequence: Synthetic coding sequence
  source 1..912: mol_type = other DNA
atgtccgaggagcagtttggaggggacggagccgcagcagccgcaaccgctgccgcttctggcggtaccgagggcggtagcgccgagtccgaaggtgcaaagattgacgcttccaagaacgaggaggacgagggtaagatgttcataggcggactttcttgggacaccacaaagaaagacttgaaagattacttttccaaatttggagaagtggtggattgtacactcaagttggaccccattactgggagaagtcgaggattcggttttgtgctgttcaaggaaagcgagtcggtggataaagtgatggaccagaaagagcataagctgaatggcaaggtcattgacccaaaacgtgccaaggccatgaagactaaagagccggttaaaaaaattttcgtaggcggattatcacccgacacacccgaggaaaagataagagagtatttcggcggttttggcgaggttgaatctatcgaactgccaatggacaacaagacaaataagaggcgcggtttttgcttcattaccttcaaagaggaggagccagtcaaaaaaattatggagaagaaatatcataacgtgggactctccaagtgtgagatcaaggtggcaatgtccaaggaacagtatcaacagcagcagcaatgggggagcaggggaggatttgcgggacgcgctcggggtaggggcggagggccatcacagaactggaaccagggctactctaactactggaaccaaggctacggcaattatggctacaactctcaggggtatgggggatacggtggttatgattacaccggttacaacaattactatgggtacggtgattatagcaaccaacagtcaggctacgggaaggtgtcaagacggggagggcaccagaacagttacaagccctactag

SEQ ID NO: 28896 - DNA, 1974 bp, synthetic construct
  misc_feature 1..1974: note = Description of Artificial Sequence: Synthetic coding sequence
  source 1..1974: mol_type = other DNA
atgccccgttacactgtccacgtgcggggagagtggctggctgtgccctgccaggacgcacagctcaccgtgggctggctgggcagagaggcagtgcggagatacatcaagaataaacctgacaatgggggttttaccagtgtcgacgacgctcacttcttggtgcgaaggtgcaagggattagggcttcttgacaacgaagatcgcctagaggtggctttggaaaataatgagttcgttgaagttgtgatcgaaggggacgccatgtctccagattttattccttcacagccggagggcgtgtatctctactccaaatatagagagcccgaaaaatatatagagcttgacggcgaccggctgacaacagaggacctggtgaacctgggaaaaggacggtacaagataaaattgacccccaccgcggaaaagcgagtgcaaaaatcaagggaagttatagacagcattattaaagagaaaacagtcgtatatggtatcactacaggctttggcaaattcgctcggacggtcattcctatcaacaaactgcaagagctgcaagtgaacttagtgcggtcccattcctcgggcgttgggaagcctctttctcctgaacggtgccggatgctgctagcactgaggatcaatgttctagccaagggctattcagggattagcctggagacgctaaagcaggtgatagagatgtttaacgccagctgcttgccctacgtgcccgagaaggggaccgttggggcttccggagatttggcccctttgagtcatctggctctcgggctcgtcggagaaggcaagatgtggtccccaaaatcggggtgggcggatgcgaagtacgttcttgaagcccacgggctgaagcccgtgatcctgaagcctaaggaggggctagcgctgattaacgggactcagatgattacttcactggggtgtgaggccgtagaacgcgcatccgcaatcgctcgacaagcagatattgtcgccgctctcaccttagaagtgttgaagggaaccaccaaagctttcgacacagacatccacgctctgagaccgcacaggggacaaatagaagtggcctttagatttaggtcactgttggatagcgaccatcatccctctgaaatagccgagtcacacaggttctgtgatagagtccaagacgcctacactttgaggtgctgccctcaggtgcacggcgttgtgaatgatacaatcgcattcgtaaaaaacatcatcacaacagagttgaactccgctacggataatcctatggtctttgctaaccgaggcgagacagtatccggcggaaacttccatggcgagtatcctgcaaaggctctggattacctggctataggcattcacgagctggctgccatatccgaacgcaggatagaacgcctttgcaacccatcattatccgaactgccagccttcttagtggccgagggtgggctaaactccggatttatgatagctcattgtacggccgcagccctggtgtcggaaaataaggctctatgccacccgagttcagtggatagcttaagcaccagtgctgccaccgaagaccatgtctcaatgggaggctgggccgctcggaaggctctccgcgtgattgagcatgtggagcaagtgctggccatagagctgcttgcagcctgccagggaatcgagttcctcagacccctcaagacaacaacgccgttggagaaagtgtacgacctcgttaggtccgtggtgcggccttggatcaaagatcgttttatggcaccggatatcgaggcagctcacagactgctgctcgaacagaaggtgtgggaggtcgctgctccatatattgaaaagtatcgtatggagcatatcccagagagtagacccctgagccctacagccttcagtctccaatttttgcacaagaaatccacaaagatccctgagagcgaggacttgtag

SEQ ID NO: 28897 - DNA, 1776 bp, synthetic construct
  misc_feature 1..1776: note = Description of Artificial Sequence: Synthetic coding sequence
  source 1..1776: mol_type = other DNA
atgccgaggtacaccgtccatgtacggggtgagtggctggctgtcccatgccaagatgcacaactaacagtcggctggctcgggagggaggcagtccgtcgctacatcaaaaataagccagacaacggcggattcacttcagtggacgacgcgcatttcctggtccggcgatgtaaggggctgggtctgctcgacaatgaagatagactggaagtagccctggaaaacaacgagtttgtggaggtggttatcgagggcgacgccatgagccctgatttcatcccttcacaacctgagggagtgtatctttactccaaataccgtgaaccagagaaatacatcgaattggacggcgatcgattgacaactgaggacctggtcaacctgggcaaaggcaggtacaagattaaactaacccctaccgcggaaaagagagttcaaaaaagtcgggaggttatcgattccataataaaggaaaaaacagtggtgtacggtatcaccactggatttggtaagttcgccaggacagtcatcccaatcaacaagttgcaagagctacaggttaatctggtgcgttcccacagctcaggtgtgggaaaaccactgagcccagagcgctgtcgcatgttgctggccctgcgcatcaacgtgctcgcaaagggctactccggaatctcactcgaaacgttgaaacaggtcattgaaatgtttaatgcttcttgtctaccttatgttccagagaagggaacagtgggagcctcaggtgatttggcacctctgtcacacttggccctcggcctggtgggcgagggaaagatgtggtctcccaaatcaggatgggcagacgctaagtacgtattggaggctcatggcctgaaaccagtgatcctcaagcctaaagaaggccttgccctcataaacgggactcaaatgattacctccctcggatgtgaggcagtggagcgcgcttcagccatcgcgcgtcaggccgatattgtcgccgcactcacactggaggtgttgaagggtaccaccaaagccttcgacacggacatccacgcactgagacctcatagagggcagatcgaggttgcctttagattccggtcacttctggacagtgatcaccatccgagcgagatcgccgagagccaccgcttttgtgaccgcgtgcaagatgcctataccttgcggtgctgcccccaggtgcacggagtcgtgaatgacactatcgcattcgtcaaaaacatcataacaaccgaactcaactccgctacagacaatcccatggtgttcgccaaccgaggagagaccgtctcaggcggtaacttccatggcgagtaccctgccaaggcccttgattacctggccatcgggatccatgagctggccgctattagcgagcggcgaatcgaaaggctgtgtaatccatctctgagtgagttaccggcattcctcgtcgccgagggaggattaaactccggctttatgattgcacattgtaccgccgctgctctcgtaagtgagaacaaggctctgtgtcatccaagttcggtggacagtctgtcgacctcagccgcaacagaggaccacgtgagcatgggtggatgggctgctagaaaggcgctcagagtgatagaacacgtggagcaggtcctggcaatcgaacttctggcggcttgccagggtatcgaatttctccgcccacttaaaacgaccacaccactggaaaaagtgtacgacctggtgaggtccgtggttagattcgggaagtag

SEQ ID NO: 28898 - DNA, 1350 bp, synthetic construct
  misc_feature 1..1350: note = Description of Artificial Sequence: Synthetic coding sequence
  source 1..1350: mol_type = other DNA
atgctcctggcgctgagaattaacgtcctggccaaaggctattcgggcataagcctggagaccttgaagcaggttattgagatgttcaatgcttcatgcctcccgtatgtgcctgagaagggtaccgtcggagcatccggggatctcgccccactaagccatttggcgctgggcttggtcggcgagggcaaaatgtggagccctaaatcagggtgggcagacgccaaatacgtcctggaggctcacgggctgaagcccgtgattctgaaaccgaaggagggtttggccctaatcaatggcactcagatgatcacttcactgggttgcgaagccgtcgagagggcctccgcaatcgccaggcaggcagacattgtcgccgcacttactctggaggttttgaagggtactacgaaggcttttgacacagatatccacgcactgaggccacacagaggccagattgaagtggcatttcgattccgatctttgctggactccgatcatcacccgagtgagatagcggagtcacaccgcttctgcgatcgggtacaggatgcctacactctgaggtgttgtccgcaggtacatggtgtggtcaatgatacaatcgctttcgtcaagaatatcattactaccgagctgaacagcgccacagacaaccccatggtctttgccaatcggggagaaacagtgtccggaggaaactttcatggggaataccccgctaaggctttagactacctcgcgattggcattcacgagctggctgccattagcgagaggcggattgaacggttgtgcaatccctctctgagcgaactgcccgctttcctcgttgccgaaggagggctgaatagcgggttcatgatcgcccattgcacggctgccgctctggtgtccgaaaacaaggccctgtgtcacccatcctccgtagacagcctgtcaaccagcgccgctactgaggaccacgtgagtatgggcggttgggctgctcgtaaagccctgagagttattgagcacgtcgaacaggtgctggccatcgagctgctcgctgcctgccaaggaatcgaattcctgcggcctctaaaaactaccacccctctggagaaggtctatgacctggtgagatcagtggtgcggccatggatcaaagacaggtttatggcccctgatattgaggcggcacataggctgcttttagagcaaaaggtctgggaagtagcagcaccatatattgagaagtaccgcatggagcacattccagagagccgccctctgagccctacggcgttctctctgcagttcctccacaagaaatccacaaagattcccgagtctgaggatctgtag

SEQ ID NO: 28899 - DNA, 1260 bp, synthetic construct
  misc_feature 1..1260: note = Description of Artificial Sequence: Synthetic coding sequence
  source 1..1260: mol_type = other DNA
atggcaggctttggagccatggaaaagtttttggtcgagtataagtctgctgtggagaagaagctggctgagtacaagtgcaatactaacaccgcaatcgagcttaagctcgtgcgctttcccgaagatctagagaacgatatccgaacctttttcccagagtacactcaccagttattcggcgacgacgaaacggccttcggctataaaggcctgaagattctgctctactacatcgctggttctctgtcaaccatgttcagagtggagtacgcaagcaaggtagacgagaattttgactgtgtagaggccgacgatgtggagggcaagattaggcagattatcccccctggcttttgtaccaacaccaatgacttccttagccttctggaaaaggaggttgactttaaaccattcggaactttgctgcacacctattcggtactttccccaaccggcggtgagaatttcacattccagatttacaaggctgacatgacatgtagggggtttcgcgagtaccacgagcgcttgcagaccttcctcatgtggttcatcgagacagccagcttcattgatgtggatgatgagaggtggcactatttcttggtcttcgagaagtataacaaagacggggcaaccctcttcgccaccgttggatatatgaccgtttacaactattacgtttaccccgacaaaactcgcccaagggtaagtcagatgctcattctgacgccgtttcagggtcaaggccatggggcacagctgctcgagacagtccaccgctactacaccgaatttcctacagtgctggacattacagcggaggatcctagtaagagttatgtgaagttaagagatttcgtccttgttaagctctgtcaggacctcccatgcttctcccgagaaaagctaatgcagggtttcaacgaagacatggccatcgaggcacagcagaagtttaagatcaataagcagcacgcgagacgcgtgtatgaaattcttagattactcgtgaccgacatgagtgacgcagaacagtaccggagctatcggctggacatcaaaaggcgtttgatctctccttacaaaaagaaacagcgggatttggccaaaatgcgcaaatgcctccgtccggaggagctgactaatcagatgaatcagattgagatctctatgcagcacgagcagttggaggaatcttttcaggaactggtggaggattaccgcagagtcatagagagactcgcacaggagtag

SEQ ID NO: 28900 - DNA, 1005 bp, synthetic construct
  misc_feature 1..1005: note = Description of Artificial Sequence: Synthetic coding sequence
  source 1..1005: mol_type = other DNA
atgttccgagtcgagtacgccagcaaggttgatgagaactttgattgcgtggaggccgacgacgtggagggtaaaattaggcaaattataccacccggattctgcactaacaccaatgatttcctttctctcctcgagaaggaggtggatttcaagcccttcggtacactgctgcatacatatagcgtactgtctcccaccgggggagaaaatttcaccttccagatatacaaggccgacatgacctgtcggggattccgtgagtaccacgagagactgcagaccttcctgatgtggtttatcgaaaccgcgtcttttatagacgttgacgacgaaagatggcattacttcctggtgtttgaaaaatacaataaggatggtgcaaccttgtttgccacagtaggctacatgactgtgtataactactacgtgtaccctgacaaaactagacccagggtgagccaaatgcttattctgaccccctttcagggtcaggggcacggagcacaattactggagaccgtccatcgctattacaccgaattcccaacggtgcttgacatcactgccgaggatcccagtaaatcctacgtgaaactccgtgattttgtactggtgaagctctgccaggatctgccatgcttttcccgcgaaaagctaatgcagggattcaatgaagatatggccatcgaagcacagcagaaattcaaaattaacaaacagcatgcgaggcgcgtgtacgagatcctgcgcctgctagttaccgatatgtcagatgccgagcagtaccggtcataccgactggacatcaaacggaggttgatatccccatacaagaaaaagcagagagatctggctaagatgaggaagtgccttagaccagaggaactcacgaaccagatgaatcaaatcgaaattagcatgcaacatgagcagctcgaagagtccttccaggaactggtggaggactatcgcagggtaatagaacgtctcgcacaggagtag

SEQ ID NO: 28901 - DNA, 870 bp, synthetic construct
  misc_feature 1..870: note = Description of Artificial Sequence: Synthetic coding sequence
  source 1..870: mol_type = other DNA
atgaccgtgagcttccataagtatggggagtacttcccgggaacaggcgacctgcgagatattggtgccggaaagggcaagtattatgccgtcaactatccattgcgtgatggaattgacgatgaatcttacgaagccatcttcaagcctgtgatgtcgaaggtgatggagatgtttcagcctagcgccgtggtcttacagtgcggaagtgactccttgagcggcgaccgcctaggatgcttcaaccttacaatcaagggccatgcaaaatgtgtcgaatttgtaaaatcatttaacctgcctatgctcatgttgggcggtgggggatacacaatacgcaacgtagccagatgttggacttacgagacggcggtggccctggacaccgagatccctaacgaactaccctacaacgattactttgaatactttggaccggactttaaactgcacatcagcccatcgaatatgaccaaccagaacaccaacgaatacctggaaaagatcaagcagcggctgttcgagaatttgcgtatgttgccccatgctccaggagtgcaaatgcaagccatacccgaagacgcaatcccagaggaaagtggcgacgaagatgaggacgatcctgacaaaaggatcagcatctgctcatccgacaagcggattgcctgtgaagaagaattttctgattcagaagaggaaggagaaggcggacggaaaaatagcagtaacttcaagaaggcaaaaagagtcaagaccgaggatgagaaggagaaggatcccgaagagaaaaaggaggtgacggaggaagaaaagaccaaagaagagaaaccggaggcaaaaggagtgaaagaagaggtcaaattggcctag

SEQ ID NO: 28902 - DNA, 1449 bp, synthetic construct
  misc_feature 1..1449: note = Description of Artificial Sequence: Synthetic coding sequence
  source 1..1449: mol_type = other DNA
atggcgcaaacacagggtacaaggcgcaaagtttgctattattatgatggcgacgtcggtaactactattatggccaaggacatcctatgaagccacatcggattaggatgacgcataacctgctgctgaactacggcctgtatagaaaaatggagatatatcgaccccataaagctaatgctgaagagatgaccaagtatcattcggacgattatattaaattcctgaggtctattagacccgacaatatgtctgaatactccaaacagatgcaacgtttcaatgtgggagaagattgccccgtgttcgacggattgttcgagttttgtcaattatcaacaggcggtagcgtggctagcgcagtcaaacttaataaacagcaaacggacatagctgtgaattgggccggagggctgcatcatgctaagaagtcagaggcctcaggcttttgttacgttaacgacattgtgctcgctatccttgaactgctgaaataccatcagcgcgtcctctatattgatatcgatatccaccacggggacggcgtggaagaggctttctacactacggacagggttatgactgttagctttcacaaatacggcgagtatttccctggtacgggcgaccttagggatattggtgctgggaagggcaaatactacgccgtgaactaccctttgcgtgacgggatcgacgacgagagctatgaagctatcttcaagcctgtcatgagcaaggtaatggagatgttccaaccctcagcagtggtgctgcaatgcggctcagattccctgagtggagatcgcctcggctgctttaacctgactattaaggggcatgcgaagtgtgtggagttcgtgaagtcgttcaatctgccaatgctcatgttgggcggtggtggatataccattcgtaacgtggctcggtgttggacttacgaaaccgctgtcgctcttgataccgagattcccaatgagctgccttataatgattattttgaatactttggccctgattttaaacttcacattagccccagcaatatgactaaccagaacacgaatgaatatcttgagaaaatcaaacaaaggttgtttgaaaacttgcgtatgttgccccatgccccaggtgttcagatgcaggccatcccggaggacgcaatccctgaagaatcaggcgacgaggatgaggacgacccagacaaacgcatttcaatttgtagttccgacaagcgtattgcgtgcgaggaggaattttcggactccgaggaagagggagagggcggacggaagaactcctccaatttcaaaaaagccaaaagagtaaaaactgaggatgagaaagaaaaagaccctgaggagaaaaaagaggtaaccgaagaggaaaagacaaaggaagagaagccagaggcaaagggagtgaaagaggaagtgaagctcgcttag

SEQ ID NO: 28903 - DNA, 636 bp, synthetic construct
  misc_feature 1..636: note = Description of Artificial Sequence: Synthetic coding sequence
  source 1..636: mol_type = other DNA
atggctcaaacacagggcactcgacgcaaagtgtgttactattatgatggcgatgtgggcaattattactacggacagggccatcctatgaaaccccatcgaattcgaatgacacataaccttctactaaattacggactatacagaaagatggagatttaccgcccacacaaagccaacgctgaagagatgaccaagtaccacagcgacgactatataaaatttcttcggtctattcgacctgataacatgagtgaatactctaagcagatgcaaagatcaagtgctgtaaagctcaacaaacaacaaacagatatcgctgttaactgggccggaggactccaccacgctaaaaagagcgaagctagtggattctgttacgtgaatgacattgtgctggcgattctagagttgctgaagtatcaccaacgagtcctctacatcgacatagacatacaccatggggatggggtggaagaggccttctatacgaccgatcgcgtaatgactgtgtcctttcataagtatggagaatatttcccgggaactggtgaccttcgcgatattggcgctggtaaaggcaagtattacgcagtgaattatcctttgagggacgggatagatgatgaatcttag

SEQ ID NO: 28904 - DNA, 1044 bp, synthetic construct
  misc_feature 1..1044: note = Description of Artificial Sequence: Synthetic coding sequence
  source 1..1044: mol_type = other DNA
atgcttcatacaacacagctgtatcagcacgtcccagagaccaggtggcccatagtttactcaccgagatacaacatcacctttatgggccttgaaaaactgcacccattcgacgccggtaagtggggaaaagttataaacttcctaaaggaggagaagttactgtccgattccatgctcgttgaagccagagaagcttcagaggaagatctgcttgtggttcatacccgcaggtacctgaacgaactgaaatggtcttttgctgtggctactatcacagaaatcccccctgtgattttcctgcccaattttctcgtgcagaggaaggtcctcaggcctctgcggacccagactggtgggaccatcatggctggtaaactggccgttgagcgtggatgggctattaacgtgggcggaggcttccaccactgtagctccgacaggggcggaggtttttgtgcatacgccgatattacactcgcaatcaagttcctgtttgaacgggtggagggtatttcccgcgctaccataatcgacctggacgcccaccaaggcaatggccacgagagagatttcatggatgacaagcgcgtgtacatcatggatgtttacaatcgccacatctatcctggggaccggttcgccaagcaggcaatcaggcgaaaggttgaactggagtggggtaccgaagacgatgaatatctcgacaaggtcgaacggaatataaaaaaaagcctgcaggagcacctaccagacgttgtggtctacaatgccggtactgacattctggagggggacaggcttggaggtctgtccattagcccggcaggtatcgtgaagagagatgagttggtatttcggatggtgagaggaaggagggttccgatactaatggtaactagtggcggataccagaagcggacagcacgcatcatcgcggactccattctgaacctgtttggcttgggactgatcggtccggagtcccctagcgtcagcgctcagaactcagacactcctctgctgcctcccgctgtgccgtag

SEQ ID NO: 28905 - DNA, 711 bp, synthetic construct
  misc_feature 1..711: note = Description of Artificial Sequence: Synthetic coding sequence
  source 1..711: mol_type = other DNA
atgggccttgagaagctgcatcctttcgacgccggtaaatgggggaaagtaataaacttcttaaaagaggaaaaattgctgagtgactccatgctcgtggaggccagggaggcatccgaggaggacctcctagtggttcacactcgtagatacttaaatgagctaaaatggtcgtttgccgttgcaactattactgaaatcccccctgtcattttcctaccgaacttcctggtccaaagaaaggtcttaagacccctccggacccagactgggggaactattatgggcgtggcatctacaaccgcacccgctacagtggccggtgcctccgtgcccatgcgcacttcccgtagccctagctccttctgtttgagcgtgtggcgggcatcccctggactgccaagtctgatactgatgcccattcgggctatgggcatgtctgagaccagctggaccacaagtgtgtgcacatcttggatgagtactacggctacttctactcagggtacagccttgccgtcccgaccgtctggtggcagatggtcctggtccggagctcagcgcatgatgtctacatggataagatggcggggtacttcccggaacccgagccgctctacatgtcccacttggtggtacacaatgcaggcccctacatcgagcagaggcacagcactaggtggctgtccatcggcccagcgagccagttag

SEQ ID NO: 28906 - DNA, 960 bp, synthetic construct
  misc_feature 1..960: note = Description of Artificial Sequence: Synthetic coding sequence
  source 1..960: mol_type = other DNA
atgggcctcgagaaactgcacccattcgatgccggtaaatggggcaaagtgatcaactttctgaaggaagagaagctgctgtcagatagcatgctcgtggaggctcgcgaagcttctgaagaagacctcctggttgtgcatactcgcaggtaccttaatgagctgaaatggtctttcgccgtagcaaccatcaccgaaatccccccagtgatcttcctgccgaactttctcgtccagcgcaaggtgttaaggccgcttagaacacaaacaggagggaccattatggcgggaaagctggccgtggagcgaggctgggccatcaatgttgggggtggttttcaccactgcagcagtgaccgtggtgggggattctgtgcttatgcagacataacccttgcaattaagttcttgtttgagcgagtggagggaatcagccgcgctacaataatcgatctcgatgcccaccagggaaatggacacgaaagggatttcatggacgacaagagggtgtacatcatggatgtatataacagacacatctatcctggggatcgcttcgccaagcaagccatacgcagaaaagtggaactcgaatggggaactgaagacgatgaatatcttgacaaagtagagcggaatattaagaagtctttacaggaacaccttccagatgttgtggtgtacaatgccggtacagacatcctcgagggggacagacttggcggactctcaataagccctgctggtattgtcaaacgagacgagttggtgtttcgtatggttcgcggacgacgcgtccccattctcatggttaccagcgggggttatcaaaaaagaaccgccaggatcatcgctgatagcatcttaaacctgttcggcttggggctaatcgggccagagtcaccaagcgtgagcgcccagaacagtgatacacctcttttacctccggctgttccctag

SEQ ID NO: 28907 - DNA, 468 bp, synthetic construct
  misc_feature 1..468: note = Description of Artificial Sequence: Synthetic coding sequence
  source 1..468: mol_type = other DNA
atggacgacaagagagtctatattatggatgtttataacagacatatataccccggagataggtttgcgaagcaggccatccggaggaaggttgagctcgagtgggggactgaagatgacgagtatctggataaggtggagcgcaatatcaagaagtctctgcaggagcatctcccagatgtggtggtgtataatgccggaacagacatccttgaaggggaccgccttgggggactgtcaatcagtccagctggaatcgtgaaacgcgacgaactggtatttcggatggtgagagggagaagagtcccaattctgatggtcacttctgggggttatcagaagagaactgccagaatcattgccgatagcatattgaacttatttgggctcggcctgataggacctgaatctccctccgtgagcgcccagaactcagataccccactgctgccacccgctgtcccttag

SEQ ID NO: 28908 - DNA, 891 bp, synthetic construct
  misc_feature 1..891: note = Description of Artificial Sequence: Synthetic coding sequence
  source 1..891: mol_type = other DNA
atggggcttgagaagctgcacccttttgatgctggtaaatggggaaaggtgatcaatttccttaaagaggaaaaattgctatcagattcaatgctcgtggaagcccgtgaagcaagcgaagaagacctgctggtggtgcacacgcgtcggtatctgaatgagcttaagcgaaaggttctacgaccgctgaggacacagaccggaggtacaattatggctggaaaacttgccgttgagcgtggctgggcgattaacgtcggcggaggcttccaccactgctcgtcagaccgtggcggaggtttctgcgcgtatgctgatataacgctcgccattaaattcctattcgaacgggttgaaggaattagccgcgctacgatcattgatctcgacgctcatcagggcaacgggcatgaacgagacttcatggatgacaaacgagtatatatcatggatgtgtacaaccggcatatttatccgggagataggttcgccaagcaggccattcgcagaaaagtagaactggaatggggcacggaagacgacgaatatttggacaaggtcgaaaggaacatcaaaaagagtctccaggaacacctaccggacgttgtggtgtacaatgcgggtactgacattcttgaaggcgatcgcttaggagggttgagtataagtcccgcaggcatcgtgaagcgcgacgagctggtttttagaatggttaggggaagacgcgtcccaatacttatggtgacatcgggaggttatcagaagcgaacagcacgcattattgccgattcgattttaaacctgtttgggctggggctgattgggcctgagtccccttccgtctctgctcagaatagcgacaccccccttctgccgccagcggttccctag

SEQ ID NO: 28909 - DNA, 1377 bp, synthetic construct
  misc_feature 1..1377: note = Description of Artificial Sequence: Synthetic coding sequence
  source 1..1377: mol_type = other DNA
atgaaaccccacaggattagaatgacccacaatctgttactgaactatgggctgtataggaagatggagatctataggccacacaaagccactgctgaagagatgacgaaataccattcagatgagtacattaagtttctgagatccattaggccagataacatgtctgaatattctaagcagatgcagcgctttaatgtgggggaggactgcccagtgtttgacgggctctttgagttttgccaactcagcactggcggttccgtggccggtgcggtaaagctgaacagacaacaaaccgacatggcagtcaactgggctggagggctgcatcatgccaagaaaagcgaggcatccggattctgttatgtcaacgacattgtattggccatcctggagctgctgaaatatcaccagagggttctgtacattgatattgacattcatcacggtgacggcgtagaagaggctttctatacaacggaccgggtaatgaccgtctctttccacaagtacggagaatacttccccggaacgggcgacctccgcgacataggggcaggcaaggggaaatattacgcagtgaattttcccatgagagacgggatagatgacgaaagttatggacagattttcaaacctatcatctctaaggtgatggaaatgtatcagccctccgcagtcgtcctacagtgcggcgcagacagcctctccggcgaccgtctcggttgcttcaatctgacagtcaaaggacatgccaagtgcgtggaggtggtgaagaccttcaatctcccgctgctgatgctgggcggaggcggatacacgatacggaacgtagctcgttgctggacctacgaaactgcagtcgctcttgactgtgaaatccccaacgaactgccatataatgactattttgagtatttcggacctgacttcaaactccatatttccccatccaatatgactaaccagaacacacccgagtacatggagaaaataaagcaaagactctttgagaaccttaggatgctgccccatgccccaggcgtgcagatgcaggccatcccagaggacgctgtgcacgaagatagtggagatgaggatggggaggatcccgataaacgcatctccattcgggcttccgacaagcgcatcgcttgcgatgaggagtttagcgacagtgaggacgaaggtgagggtgggagacgaaacgtagccgaccacaagaaaggagccaagaaggctcggattgaagaagacaaaaaggagacagaggacaagaaaaccgacgtgaaggaagaggataagtcaaaggacaattcaggagagaaaaccgataccaagggcaccaaaagcgagcagttgtccaatccttag

SEQ ID NO: 28910 - DNA, 1749 bp, synthetic construct
  misc_feature 1..1749: note = Description of Artificial Sequence: Synthetic coding sequence
  source 1..1749: mol_type = other DNA
atgcgctcccctccctgtggcctactccggtggttcggaggtccgctgctggcttcctggtgtaggtgccatctgaggttccgagcctttgggacgagcgccggatggtaccgcgcattcccagccccacctccgctacttccaccagcatgtccctccccacgggattataggcctcatgtgtccttgagcccttttcttagccggccaagccgtggagggagctcctcttctagctcatcgagacgacgctcacctgtagccgctgtggctggcgagccaatggcctattctcagggcggagggaagaagaaggtgtgttattattatgatggtgatattggcaactactattacggacaaggccatcccatgaagccccatcgaatccgcatgacacataatctcctgttgaactatggtttgtatcgaaaaatggagatttatagaccacataaagcaacggctgaagagatgaccaagtaccattccgacgagtatatcaaatttctcagatccatccggccagacaacatgagcgaatacagtaagcaaatgcaaaggtttaacgtgggagaagactgtcccgtcttcgacgggctgtttgaattttgtcagttatctaccgggggtagcgttgccggtgccgtgaagctgaacagacaacagacagacatggctgtaaattgggcagggggtttgcaccacgccaaaaagagtgaagcctcaggtttctgctatgtgaacgatatagtgcttgcgatcttggagttgttaaagtaccatcaacgcgtcttgtatatcgacatcgatattcaccacggtgacggagtggaagaggccttttacaccaccgatagggtgatgacagtttcctttcataaatacggcgagtatttcccagggactggggatctacgggacatcggtgccggtaagggcaagtactatgcagtgaattttcctatgcgggatggcatcgacgatgaatcctatggacagattttcaagcctattatttctaaagtcatggagatgtaccagccctctgctgtggttctgcagtgtggggcagatagtcttagcggcgacaggctgggttgcttcaacctgactgtgaagggccacgccaaatgtgtggaggtagtgaagacattcaaccttcctctgctgatgctcgggggtggagggtatacgataagaaatgtggccaggtgctggacctacgagacagcggtcgctctggattgtgaaatccctaacgagctgccatacaacgactattttgagtacttcggcccagacttcaagcttcatattagtcccagtaacatgacgaaccagaatactcctgagtatatggaaaagatcaaacaacggctgtttgaaaatttgaggatgctgcctcacgccccaggggtgcaaatgcaagcaatcccagaagacgctgtgcacgaggacagcggtgatgaggatggtgaggacccggacaaaagaatatcgatcagagcctccgacaagcgtatcgcctgcgatgaagaattctctgattctgaagacgaaggcgagggcggtaggagaaatgtagcggaccataaaaagggtgccaagaaggctcggattgaggaggacaagaaagagacagaagataaaaaaaccgatgttaaggaagaggacaaatcaaaggataactcaggggagaagacagatacaaaaggcactaaaagcgagcaactctccaatccctag

SEQ ID NO: 28911 - DNA, 1467 bp, synthetic construct
  misc_feature 1..1467: note = Description of Artificial Sequence: Synthetic coding sequence
  source 1..1467: mol_type = other DNA
atggcttactcacaaggtggcggaaaaaagaaggtctgctactattatgacggcgatatcggtaattattactacgggcagggtcatcctatgaaaccccacaggatcagaatgactcataatctattgcttaactacggactctaccggaagatggagatctacaggccacataaggccactgcggaggaaatgacaaagtatcactccgacgagtacataaagtttctgcggagcatacgaccagacaacatgtctgaatactcaaaacagatgcagaggttcaatgtgggagaggactgccctgtgttcgatggcctgttcgagttttgtcagctgtcaactggtgggtctgtggccggtgcagtgaagctgaacagacagcagactgatatggcggtgaattgggccggagggctgcaccacgccaaaaagtcagaagcttccggcttttgttatgttaatgacattgtccttgcaatcctggagcttctgaagtaccaccagcgagtcttatatattgatatcgacattcaccacggagacggggtcgaagaggctttttatactaccgatcgtgttatgacagtgtctttccacaaatacggtgagtatttccctgggaccggtgatcttagggacatcggagccggaaaaggaaagtactacgcggtcaacttcccaatgcgggacgggatcgacgatgaatcctacggccaaatattcaaaccgatcatttccaaagtgatggaaatgtaccagccctccgcagtcgtgttacagtgtggcgcagactctctgagcggggacaggttgggctgtttcaacctaaccgtcaaggggcacgctaagtgtgttgaagttgtgaaaacctttaacttacccctgctgatgctgggcggaggaggctataccattaggaacgtggctaggtgctggacatacgagacggcggttgctctggactgcgagatcccaaacgaattgccttacaatgattattttgaatatttcgggccagattttaaactccacatctcaccttccaatatgactaaccagaacacccccgaatatatggagaagatcaaacaacggcttttcgagaatctgcgcatgctccctcacgccccaggtgttcagatgcaagccattccagaggatgcagtccacgaagattcaggcgacgaggatggtgaggatcccgacaaaaggatatctatccgcgcatccgataaaaggatcgcttgcgacgaggagtttagcgattccgaggatgaaggagagggaggcagaaggaacgtggcagatcacaagaagggtgctaagaaagccaggatcgaggaggataaaaaggaaaccgaagataagaagacggacgttaaagaagaagataaatctaaagataattcaggagaaaaaacagacactaagggaaccaaatccgagcagctgagcaacccatag

SEQ ID NO: 28912 - DNA, 1377 bp, synthetic construct
  misc_feature 1..1377: note = Description of Artificial Sequence: Synthetic coding sequence
  source 1..1377: mol_type = other DNA
atgaaacctcatagaatccgtatgactcacaacctcctcctcaactacggcttatatcgcaaaatggagatttatcgtccgcataaggccactgccgaagagatgaccaaataccactccgacgagtatatcaaatttctgagatcaatcagaccagacaacatgtccgagtatagtaaacaaatgcagagatttaacgttggagaagattgtccggtgttcgatggcctgttcgaattttgccagctgtcgactgggggtagtgtggctggagcggtgaaactgaaccggcagcaaaccgacatggccgtgaactgggccggtggtctgcaccatgccaaaaagagtgaggcctcgggcttctgctacgtgaacgacatagtgctggctatcctggagctgttgaaataccatcaaagggtgctgtacattgatatcgatattcaccacggcgacggggtcgaggaagctttttacacgacggatcgtgtaatgactgtgtcatttcataagtatggcgaatactttcctggaacaggagacttgcgcgacatcggggctgggaagggcaaatactacgccgtcaattttcctatgcgtgatggcatagacgacgaatcatacggtcaaattttcaaacccattatctccaaagtgatggagatgtatcagccaagtgccgttgtgctgcagtgtggcgcagattctctctctggagacagactaggctgttttaacctgaccgtgaaaggccatgctaaatgcgtcgaggtcgttaaaaccttcaacctgccattactcatgctcggagggggaggctataccatccggaacgtggcccgatgttggacgtatgagactgcagttgctttagactgcgagattcccaatgagttgccatacaatgactactttgagtactttggtccagactttaagttacatatttcgccctccaacatgacaaaccagaatacacctgaatacatggaaaagatcaagcagagattatttgaaaatctgagaatgctcccacacgcccctggggttcaaatgcaggctattccagaggacgccgttcacgaagatagcggagacgaagacggcgaagatcctgataagagaattagtattagggcatcggataaaaggattgcttgcgatgaggaattttccgacagcgaggatgaaggggaagggggtcgcagaaacgtggccgatcataagaaaggagctaagaaagccaggatagaagaggacaagaaggaaacagaagataaaaagactgatgtgaaagaggaagacaaatccaaagataactccggcgagaagacagacaccaagggaacgaaatcagaacagctgtctaacccctag

SEQ ID NO: 28913 - DNA, 1287 bp, synthetic construct
  misc_feature 1..1287: note = Description of Artificial Sequence: Synthetic coding sequence
  source 1..1287: mol_type = other DNA
atggctaaaactgttgcgtacttttatgaccctgacgtgggtaacttccactacggggcagggcaccccatgaagcctcaccggttagcacttacccattctctcgtattacactacggactttataagaagatgatcgtgtttaagccttatcaggcaagccagcatgacatgtgtcggttccacagcgaagattatatagattttctccagcgggtaagtccaaccaacatgcaggggtttaccaagtctctgaacgccttcaacgtcggcgacgattgcccagttttccctggactgttcgagttctgctcaaggtacactggtgcctcactgcaaggtgcaacccagctgaacaacaaaatttgcgatattgccatcaattgggccggagggctgcaccatgccaagaagtttgaggcatctggattttgctacgtgaatgacatcgtcattggtatcttggagcttctcaagtaccacccacgcgtcctttacatcgacattgatatccaccatggggatggagttcaggaggctttttatctgacagaccgcgtgatgacagtgtcctttcacaaatacggcaactacttcttcccaggcaccggggacatgtacgaggtcggcgctgagtcaggtcgctattactgccttaatgttccgttgcgcgacggaatcgatgatcagagctacaagcacctttttcagcccgtaatcaatcaagtggtggacttttatcagccaacctgcattgttcttcaatgcggtgctgattcgctcggttgcgatcgccttggatgcttcaatctgtccatcaggggccatggcgaatgtgtggaatatgttaagtcctttaatattccactgctggtcttgggaggcggtgggtatacagtgaggaatgttgcccgatgctggacctacgagacctctcttcttgtggaagaggctatttccgaggaactgccatacagcgagtatttcgagtatttcgcccctgattttacgctgcaccctgatgtgagcaccaggattgagaaccagaattctcgtcagtacctggaccagatacgacagacgatatttgagaacctgaaaatgctgaaccatgcgccttccgtccaaatccatgatgttcccgcagatctgttgacctatgacaggaccgacgaggcagatgccgaagagcgaggaccagaggaaaattacagtaggcccgaggctcccaatgaattctacgatggggatcatgataatgacaaggagagcgacgtcgagatttag

SEQ ID NO: 28914 - DNA, 3255 bp, synthetic construct
  misc_feature 1..3255: note = Description of Artificial Sequence: Synthetic coding sequence
  source 1..3255: mol_type = other DNA
atgtcttcccagtcgcaccctgatgggctgtccggaagagatcaacctgtggagctcctgaatcctgctagggtcaaccacatgccctccacagtggacgtcgcaaccgctctgccgctccaggtggctccgtctgcggttccaatggatctcaggttggaccaccagtttagccttcccgttgccgaaccagctctcagagaacagcagttgcagcaagagctgttagccctaaaacagaaacagcagattcagagacaaatcctgatcgccgaatttcagcgtcagcatgagcagctctcccgccaacacgaggcccaactccatgaacatattaaacagcagcaggaaatgctggcgatgaagcatcagcaggaactgctggagcaccaacgcaaactggagaggcatcgacaggagcaagagttagagaaacagcaccgagagcagaaactccagcagctcaagaataaggagaaggggaaggagtcagctgtagcctcaacggaagtcaaaatgaaattgcaggagtttgtgctcaataaaaagaaggctctggcgcacagaaatctcaaccactgtatatccagcgacccaaggtattggtacggtaaaacacagcactcctcgctagaccagtcaagtccccctcaaagcggcgtaagtacctcctacaaccaccccgtgctaggcatgtacgatgcaaaggacgattttccactccggaaaacagcaagcgaaccaaatctgaaactgcgcagtagacttaaacagaaagtggctgagaggagaagttccccgctgctccgcaggaaagacggtccagtggtgacagctctcaaaaaaagaccgttggacgttaccgactctgcatgctcatctgccccagggagcggcccaagctctcctaacaactcaagcggctccgtgtccgccgagaacggaattgctccagccgtcccgtctatcccagccgagacgagcttggcccaccgtttggtggcccgagagggaagtgcggcacccctgcctttatataccagcccttctcttcctaacatcacgcttggtctgccagccaccggaccctccgctggtacagccggtcagcaagatgcagaaaggctgacgttacctgcactacagcagcggctgagcctgttccccggaacccacctcaccccctatttaagcacaagccctcttgagagagacggtggcgctgcgcactcccctctgctacagcatatggttctcctggagcagcctcctgctcaggcaccacttgttaccgggctgggcgcactccccctgcatgctcagagccttgttggggcagaccgtgtaagcccgagcatccacaaactaagacagcacaggccactgggtcggactcagtctgccccactgccacagaatgcacaagctctgcagcacttggttattcagcaacagcatcagcagtttctggagaagcataaacagcagtttcaacagcaacaactgcagatgaataaaattatccccaagccctctgaacccgctaggcagcctgagagccatcctgaggaaacagaagaagagctgagagagcaccaggccctgctggatgaaccttatcttgacagactcccgggacagaaggaagcgcatgctcaggccggtgttcaggtgaagcaggaacccatcgaatccgacgaggaggaagcggaaccccctagagaggtggagccaggccagcggcagccctctgagcaagagctgctcttccgacagcaggcactgctgttggaacagcaacggatacaccagttaaggaactatcaggcatccatggaggccgctggcatccctgtaagtttcggcggacacagaccactcagtcgtgcacagagttcgccagcgagcgcaacatttccagtcagtgttcaggagcctccaacaaagcctcgtttcactaccggcctggtctatgacactctcatgctgaaacaccagtgtacatgcggctcaagcagctctcatccggaacatgcaggaagaattcagagcatttggtctcgcttgcaggagaccgggctgagagggaagtgcgagtgtattaggggacgcaaggctacattagaggaacttcaaactgtccacagtgaggcccataccttgctgtacggcactaatcccttgaaccggcagaagctggactcaaaaaagctgctgggtagtctggcgagcgtatttgttcgtcttccatgcgggggagtgggagtagattctgacaccatctggaacgaagtacacagtgcaggcgctgcccgactggccgtggggtgtgtcgtcgagttagtgttcaaggtggcaaccggtgagctgaaaaatggcttcgctgtggtcaggcccccaggccatcatgccgaggagtccactcctatggggttctgttacttcaatagcgtggccgttgccgctaaactcctgcagcagcgtctgtccgtgtccaaaatcctgatcgtggattgggacgttcaccacgggaacgggacccagcaggctttctattccgatccaagcgtgctttacatgagccttcaccggtatgacgatgggaatttcttccccggaagcggcgcaccagatgaggtcggcacgggccctggggttggatttaatgtaaacatggccttcaccgggggtttagaccccccaatgggggatgccgagtatttagccgcattccgcacagtagtgatgcctattgcttccgagttcgccccagatgtcgtgctagtgtcttccggctttgatgcagtagaggggcacccgacccctctggggggttataatctcagtgcccgttgttttggctacctgaccaagcagctgatggggctggctggcggtcgcatcgtgctcgctttggagggaggtcacgacctgactgctatctgtgacgcgagcgaggcctgcgtgtccgcattgctgggcaacgagctggatcctttaccagagaaggttttacaacagcggcctaacgccaatgccgtccgatctatggagaaggtgatggagatccatagtaagtactggagatgtcttcagcgcaccacaagcacagctggcagaagtctgattgaggctcaaacatgtgaaaacgaggaagccgaaacggtgacagccatggcctcactctccgtcggcgtcaagcccgcagagaaacgccctgacgaagagcctatggaggaggagcctccgctttag

SEQ ID NO: 28915 - DNA, 1941 bp, synthetic construct
  misc_feature 1..1941: note = Description of Artificial Sequence: Synthetic coding sequence
  source 1..1941: mol_type = other DNA
atgcttgctatgaagcaccagcaggagctgcttgaacaccagagaaagctggagcgccatagacaggagcaagaactggagaaacagcacagagagcagaagctgcagcagcttaagaataaggaaaagggaaaggaaagcgcggtggcatcaaccgaggtgaagatgaaactgcaggagttcgtattaaacaagaaaaaggccctagcccacagaaatctgaatcattgcatttcttctgatcccaggtactggtacggcaaaacccagcactcttcactggaccagagttctccaccccaatctggcgttagcacctcctacaaccaccccgtcttgggaatgtacgatgctaaggatgacttcccattgcgcaagacagcttccgagcctaatctgaaactgcggagccgacttaagcagaaggtggcggaacgcagaagttcccccctgttgaggcgcaaagacggccctgtggtgaccgccctgaagaagaggcccctggatgtgacggactctgcttgctcttctgcaccagggtctggtccatcttctcctaacaatagtagtggctccgtgagcgccgagaacggcattgcacctgctgtcccctccattcccgctgagacaagcttagctcaccgcctggtcgcccgagaaggtagtgccgctcccctccctctgtatacctccccatcccttcctaacattacgctgggcctgcctgctacaggtccctccgccggtacagccggtcagcaagacgctgagcggctgacgttgcccgcactgcaacaacgcctttctctgttccccggaactcatctgactccgtatctgtcaacctccccccttgagcgtgacgggggtgctgcccattcaccactcctccagcacatggtgctgctcgagcagccaccggcacaggccccactcgtgaccggactcggtgcactgccactccatgcacagtccctggtcggagccgatagggtttctccatcgattcacaagctgcgccagcaccggccacttgggaggacacagtccgctccgctgcctcagaacgcacaggccctgcaacacctggtgatacagcaacagcaccagcagttcctggaaaaacataaacagcagtttcagcagcagcagctgcagatgaacaagatcataccgaagccctctgaaccggcaagacaaccggagtcacacccagaagaaactgaagaggaactacgtgaacaccaggcgctgcttgatgagccttacctggatcggctgcctggtcagaaggaggcacatgcacaggccggagtgcaggtaaagcaggagcccatcgagtctgacgaagaggaagccgagccccctcgggaagtggagcctggacagcggcaaccctccgaacaggagctgctcttcaggcagcaggccttgctgctggagcagcagcgcatccaccagttgcgaaactatcaggccagcatggaggccgcaggaattccagtgtctttcggcggacaccgccctctctcgagggcccagtcctcacccgcatcggctactttcccagtgtcagttcaggagcccccaacgaagcccaggtttaccacaggtctcgtctacgataccctaatgctcaaacaccaatgcacatgcggctcatcaagcagtcatccagaacacgctggtaggatacagagcatatggtcccgactgcaagagacaggactccggggtaagtgtgaatgtatccgaggacgcaaggcaacattggaagagctccagacagtgcactcggaagcacacaccctcctatacggtacaaaccccttgaatagacagaaactggatagtaagaagctgttgggctccctggcttccgtcttcgtgcgcctgccttgtggaggggttggggttagtgtccctttgatgtgtaaatag

SEQ ID NO: 28916 - DNA, 2919 bp, synthetic construct
  misc_feature 1..2919: note = Description of Artificial Sequence: Synthetic coding sequence
  source 1..2919: mol_type = other DNA
atgctggcaatgaagcaccaacaggaattgctggaacatcagcgaaagctggaaaggcaccgtcaagagcaagaattggagaaacagcacagggagcaaaagctccagcagctcaaaaacaaggaaaaaggtaaagagtctgcagtggcaagtaccgaggttaaaatgaagcttcaggagtttgttcttaataaaaagaaagcactggctcacaggaatctaaatcactgtatctcgtccgacccaaggtattggtacggaaaaacccagcactccagcctagaccagagctcgccgcctcaatctggcgtgtctacttcttataatcaccccgttctgggcatgtacgatgccaaggacgacttcccattgcgcaagacagcctccgagccaaacctaaaactccgctctagattaaaacaaaaagtggccgagcggaggtcgtccccactgcttcggaggaaggatgggccagtagtgaccgcactgaagaaacgcccattggatgttaccgatagtgcatgtagctccgcgccaggaagcggtccctcctcgccaaataattctagtggcagcgtgtctgctgagaacggaatcgcccctgccgttccatcaatcccagcagaaacctcccttgcgcaccggctcgttgctcgagagggaagcgctgcacctttgcccttgtacacaagcccctctttgcccaacataacgctcggactccctgccacaggaccatcggccggtacagccggtcagcaggatgccgaaaggttgactctccccgcactccagcagcggcttagtttgtttccaggcacccacctgactccttacttgagtacaagtccgctcgagcgcgacggaggagctgcccattcacctctgttgcagcacatggtgctgctcgagcagcctccagctcaggctccgctcgtgacggattggtatttgagcggcttgggagccctcccgctgcacgcccagtccttggtgggcgcagacagggtttctccgtctattcataagctgcggcagcatagacccctgggacgaacacaatccgcacctcttccccagaacgctcaggccttgcagcacctggtcattcagcaacagcaccaacagtttctggagaagcataagcagcagttccagcagcaacagctgcagatgaataagattatcccaaagcctagcgaacctgctcggcagcccgaaagccaccccgaggaaactgaggaggaactgcgggagcatcaggctctcctggacgaaccttatctcgacaggttgcccggacagaaggaagcacatgcgcaggccggagttcaagttaagcaggaacccatagaaagcgatgaagaggaagctgagcctccacgtgaagtcgagcccggtcagcgacaaccctcagagcaggagctgttgtttcgccaacaggcactgctgttggagcagcaaaggatccatcagctgcgtaactatcaagcctcaatggaagctgctggcatcccagttagtttcggcggacaccggccactgtctcgggcacagtcgagtccagctagcgctacgtttccagtgagtgtgcaggaaccccctacaaagccccgttttactaccggtttagtgtacgacacactcatgctgaagcatcaatgcacttgtggatcgtcatcctcacaccctgagcacgctggaagaatccagtcaatatggtcacggctgcaggaaaccggcttgagaggcaagtgcgagtgtattcgcggtagaaaggcgaccttggaggagctccagactgtacatagtgaggcacacacattgctgtacggcacaaacccactgaacagacaaaagctggatagcaagaaacttctagggtccttggccagtgtatttgtccgactgccttgcggaggagtcggtgtggatagtgacactatttggaacgaggtccacagtgcaggcgctgccaggctagccgttggatgtgtggttgaactggtgtttaaggtcgccacgggggagttaaaaaacggcttcgccgtggtgcgccctccaggtcaccacgcggaagagtcaacccctatgggtttttgctactttaattccgtcgctgtggcagctaaactcttgcaacaacgcctgagcgttagtaagatcctgatcgtcgactgggatgtccaccacggtaacggaacacagcaggcattctactctgaccccagtgttctgtacatgtctttacatagatacgacgacggcaacttctttcccggtagtggggctcccgatgaggtaggcactggcccaggcgtgggttttaacgtgaacatggcattcacaggtggccttgaccctcccatgggcgatgccgaatacctggctgcctttaggaccgtagtgatgccaattgcctccgagtttgcgccagatgtggtgctggtgagctcaggcttcgacgcagtcgagggacatccaactccactgggtggctacaacctgagtgcaaggtgcttcgggtacttgacgaaacagcttatggggctggcgggaggtagaatagtattggctcttgaaggcggtcacgaccttactgctatctgcgacgcttctgaggcttgcgtctctgccttgctcggaaatgagcttgatcccctgcccgagaaggtcctgcagcagaggccgaacgccaatgcggtgaggtccatggagaaggtgatggagatacattctaaatactggcgttgtttacagaggactaccagcaccgccggtcgatctctcatcgaggcccaaacatgtgaaaatgaagaggcagaaacagtgactgctatggcgtccctttctgttggagtcaaacccgcagagaaacgccctgatgaagagccaatggaagaagagcctccactctag

SEQ ID NO: 28917 - DNA, 2214 bp, synthetic construct
  misc_feature 1..2214: note = Description of Artificial Sequence: Synthetic coding sequence
  source 1..2214: mol_type = other DNA
atggacgttgccaccgctctgcccctccaagtcgccccttccgccgtccccatggacctgaggctggatcaccaattttctcttcccgtggcagagcctgctttgcgcgaacagcaattgcagcaggagttattggcactgaaacaaaaacagcagatccaaagacaaatcctcattgcggaatttcagcggcagcatgaacagctgtcaagacagcacgaggcccagctgcacgagcatatcaagcagcaacaagaaatgctcgccatgaagcaccaacaggagcttttggagcatcagaggaaacttgagaggcacagacaggagcaagagttggagaagcagcatagggagcagaaactccagcaattgaagaataaggagaagggcaaggagagtgccgtggcatcaacggaagtgaagatgaaactccaggaatttgtgctgaacaagaagaaagccctggcccatcgcaacctgaatcactgtattagttcggatccaaggtattggtatggaaaaactcagcatagttcgctcgaccaaagttctccgccacagtccggagtttccaccagttacaaccaccccgttttaggcatgtatgatgccaaggacgatttcccattgaggaaaactgcctccgaacctaacctgaaactgagatcccgtctgaagcagaaggtggctgagcgaaggtcatcacccctcctgaggcggaaggacggtcctgtggtgactgccctcaagaaaagacccttagatgtcactgattccgcctgttcttctgcacctggtagtggacctagtagccctaacaattcgtcaggctctgtcagtgcggagaatgggatcgccccagccgtgccaagcattcctgcagaaacctctctggcacataggctcgtcgcccgagaggggagcgcagcccctttgccactctataccagccctagtctgccgaatattaccctgggcctccctgccacaggtccttcagccggaactgccggacagcaagacgcagaaagactgaccctgccagctctccaacagaggctgagcctctttcctggaacgcatctgacgccatatctaagtactagtcccctagagcgggacggcggagcagcccactccccactgttacagcacatggtccttctggaacagcctcccgctcaggcaccactcgtgaccgattggtatttgagcggtttgggcgcactgccgctgcatgcccaatcgctagtcggggcagaccgtgtgagtccgtcaatccataaacttcgccagcataggcccctgggcagaacccagagtgccccactgccccaaaatgcccaggcactacagcacctagtgatacagcagcagcaccagcagttcctcgaaaagcataaacaacagtttcagcaacagcaactgcagatgaacaaaattataccgaagccctcagagccagcgaggcaacccgagtcccaccctgaagagaccgaagaggaattgagggagcaccaggccctcctagatgagccctatctagaccggctgcccggacagaaggaagcccacgctcaggcaggagtgcaggtgaagcaggagccaatagagtcggatgaagaagaggcggagcctcccagagaggtggagcctggacagcgtcagcccagtgaacaagagctactctttcggcagcaagcgctgctgcttgagcagcagcgaatccaccagttgcggaattatcaagcttccatggaagccgctggcatacctgtgagcttcggcggtcacagacccctgtctagagcacagagcagccccgctagcgccaccttcccagtatcagtccaggagcccccaacgaagcctcggttcaccaccggattggtgtacgacactttaatgcttaaacatcagtgcacatgcggctcatcaagctcccacccggaacatgccggacgcatacaatccatatggtcacggctgcaggagaccggattacgcggtaagtgcgaatgcattagaggcagaaaagccacgctcgaggaattacaaactgtacattcggaggcccataccctgttgtacggaacaaatcctctaaatcgacagaaactggacagcaagaaattgctgggaagcttagcgtccgtgttcgtgagattgccttgtggcggagttggggtctctgtgcctctgatgtgcaagtag

SEQ ID NO: 28918 - DNA, 2007 bp, synthetic construct
  misc_feature 1..2007: note = Description of Artificial Sequence: Synthetic coding sequence
  source 1..2007: mol_type = other DNA
atggtgctccttgaacagcctccagcccaggcaccactggtcactggcttaggggctctgccgttacacgcccagagtctcgtcggtgctgatagagtgtctcctagtattcacaagcttaggcagcaccgacctctcggtagaacacagtctgccccactcccccagaacgcccaagcgctgcagcaccttgttatccagcaacaacaccaacagttcctcgagaagcataagcaacaattccagcaacagcaactccagatgaacaagatcattccaaagccgagcgaacccgcacgacagcccgaatcccacccagaagaaactgaggaagagctccgcgaacatcaggcattgttggacgagccctatctagacaggctccccggtcagaaggaagcacacgcacaagcaggggttcaggtgaagcaggaacccatcgagagcgacgaagaagaggccgagcccccacgtgaggtggagcctgggcagcgccagccctcagagcaggagctcctgttcagacagcaagccctacttctggagcagcaacgcatccatcagctgaggaactatcaggcatccatggaagcagctggtatccccgtttcattcggcggacataggcccctgtctcgcgctcagtcctcacccgctagcgcgactttcccagtctcagttcaggagccaccgaccaagccgcgatttacgactggcctcgtttacgacactctgatgctgaagcatcagtgcacctgcggtagctcaagctctcaccccgagcatgctggacgcatacagagtatttggtcccgtctccaggagaccggactgcgcggaaaatgcgaatgtattcgcggaagaaaggccaccctggaagaattacaaacagtgcactctgaagcccatacactcttgtacgggacaaacccactgaacagacaaaagcttgatagtaagaaactgttgggaagtcttgcaagcgtgttcgtgcgtctgccctgtggtggtgtcggggtggattccgacaccatatggaatgaggtgcatagcgcgggagccgcaaggctcgccgtgggctgtgtggtggaattagtattcaaagtcgccactggcgagctaaagaacggattcgccgtggttcgtccacctggacatcacgcagaagagtcaaccccaatgggcttctgctactttaactctgtcgccgtcgccgctaaactgctgcagcaaaggctgagtgtgagcaaaattcttatcgtcgactgggacgtgcaccacggaaatggcactcaacaagctttttactctgatccttccgtcctgtatatgagcctgcaccggtacgatgacggcaacttcttccccggttcaggggctcccgatgaggttggcacagggcctggggtggggtttaatgtgaacatggctttcacaggcggattggatccaccgatgggtgatgcagaatacctggcagcatttaggaccgtggtgatgccaattgcaagcgaattcgctcctgacgtcgtgctagtctcctctggttttgatgctgtggaggggcatcctacacccctggggggttataatctgagcgctaggtgtttcggctacctcacaaagcaacttatgggactggctggaggaagaattgtgttggcactggaggggggtcacgacctcactgcaatctgcgacgcatcagaggcttgcgtgagcgccctgctggggaatgaactcgatcctctgcccgaaaaggtactgcagcagcgaccaaatgcaaatgctgtcagaagcatggaaaaggtcatggaaattcatagtaaatattggaggtgtctccagagaaccacatccacagcgggaagatctctgattgaggcacaaacgtgtgaaaatgaggaggccgaaactgtaaccgccatggcaagtctaagtgttggggtgaaacccgctgagaagaggcctgatgaggagcctatggaggaggaacctccactgtag

SEQ ID NO: 28919 - DNA, 90 bp, synthetic construct
  misc_feature 1..90: note = Description of Artificial Sequence: Synthetic coding sequence
  source 1..90: mol_type = other DNA
atgtcttctcagagccacccagacggcttgagcggccgtgatcagcccgtggaattgctgaacccagccagagtgaatcacatgccttag

SEQ ID NO: 28920 - DNA, 3648 bp, synthetic construct
  misc_feature 1..3648: note = Description of Artificial Sequence: Synthetic coding sequence
  source 1..3648: mol_type = other DNA
atgacctcgacgggacaggattccactactacccgtcaacgacgtagtaggcagaatccgcagtcgccaccgcaggactcttctgtaacctctaaaaggaatatcaagaaaggagcagttcccaggagcatcccaaacttggcagaggtaaagaagaaaggcaaaatgaaaaaactcggtcaggccatggaagaggacctgattgtcggcctgcaaggcatggatctgaatctggaagccgaagcccttgcgggtactggcctggtgctcgatgagcaactgaacgaattccattgtttatgggacgatagtttcccagaggggcctgagcgtctgcatgctatcaaggagcagctcatacaagagggcttgcttgataggtgcgtcagctttcaggcaaggtttgctgagaaagaagagctgatgctggtgcactccttagaatatattgatcttatggagactacccagtacatgaatgagggtgagttgagggttctggccgacacttatgattcagtgtatctgcacccgaacagttactcatgtgcctgcctcgctagcggcagcgtgctgcggctggtggatgcagttctgggcgcagaaatccgcaacggtatggccattatacggcctccagggcaccacgctcagcatagcctcatggacggatactgtatgtttaatcatgtggcggtggctgctaggtacgcacaacagaagcacagaatcaggcgcgtgctcatcgtcgactgggacgtacaccatggccagggaacccagtttacattcgaccaggatccgagcgtcctgtacttctctatccaccgttatgagcaggggaggttctggccccacctcaaggccagtaattggtctaccacgggcttcggccagggccaagggtacacgatcaacgtgccgtggaaccaggtgggtatgagggacgcagattacattgccgcttttctgcacgtgctcctacccgtggccttggaattccagccacagcttgtgctggtggccgctgggtttgacgcactgcagggcgatccaaagggagaaatggcagcgactcctgccggatttgctcagttgactcacctgctgatggggctcgccggagggaaattgattctcagtcttgaaggtgggtataacttgcgtgcccttgctgagggcgtcagtgccagtctgcacacccttctgggtgacccttgccccatgcttgagtcaccgggagcgccttgtcgatctgctcaggccagcgtgtcctgcgcgttagaagccttggaacccttctgggaagtgctggtacgatccaccgagaccgtggagcgggataacatggaagaagacaacgtcgaagagtcggaggaagaaggcccttgggagccacccgtacttccaatccttacctggcccgttcttcagtctagaaccggcctggtgtacgaccagaacatgatgaatcattgtaatctctgggattcacaccacccagaggtgccccagcgaattctgaggatcatgtgcaggttggaggagctgggtttggccggtcgctgcctgacactaacccccagacctgctaccgaagccgaattgctgacatgtcacagcgcagaatatgtgggccacctccgagcaaccgagaagatgaaaaccagggagctgcaccgggaatcaagcaattttgattccatttatatctgtccgtcaaccttcgcgtgcgcacaactcgcaaccggggcagcctgccgcctggttgaagctgttctaagcggggaggtgctcaacggggcagcagtggtccggccaccgggacaccatgccgaacaggatgcagcctgcggattttgcttttttaactctgtggccgtggccgcacgtcacgcccagacaatcagtggacacgctctgagaatcttaatcgttgattgggatgttcatcatggtaacggaacacagcatatgtttgaggacgatccctctgtcctttacgtttccctgcacagatacgatcacgggaccttctttcccatgggtgacgagggcgcttcttcccagattggacgcgctgccggaaccggatttacagtcaatgttgcatggaacggcccacgaatgggtgacgctgattacctcgccgcatggcatcgactggttctgcccatcgcttacgaatttaaccctgaattggtcctggtgagcgccggattcgacgccgctcggggagacccgctcggagggtgccaggtgtctcccgaaggttatgcacacctgactcatctcctgatgggactcgcgtcagggaggatcattctcattctggaaggtggctacaatttgacctcaattagcgaaagcatggctgcttgtaccaggagccttctgggcgaccccccaccgcttttgacgctgccccgacccccactctccggcgctctcgccagtattacagaaacgattcaagtgcaccggaggtattggcgctcgctcagagttatgaaggttgaggatcgcgagggcccttctagctccaaactggtcaccaagaaggctccccagcctgcaaagcctcgccttgcggaaaggatgactacccgggaaaagaaggttctcgaggccggaatgggtaaggtcacttctgcctccttcggtgaggagtccaccccaggccaaactaatagtgagaccgcagtcgtggcactgacgcaggaccagccttctgaggcagcgaccggcggtgcaaccttggctcaaactatttctgaggctgcaatcggtggcgcaatgctggggcagactacctctgaagaggcggttgggggagccactcctgaccagactacaagcgaagagactgtgggtggagccattctggaccagaccacatcggaggatgcagtcgggggagctacgctggggcagacaacctccgaagaggcagtcgggggagctaccctggcacagaccactagtgaggccgctatggagggtgcaacactggatcagaccacctccgaggaggcacctggcggtacagaacttatacagacccccctcgcctctagcactgaccaccagacgcctcctacgagcccagttcaggggactacaccacaaatcagtccttccaccttaatcggcagtctgagaactctggaattaggcagcgagtcacaaggggcttcagaatcgcaggcaccaggggaggagaatctactcggagaggctgcaggcggacaggacatggccgattcaatgctgatgcagggcagccgtgggttgaccgaccaggccattttttacgccgttaccccgcttccatggtgtccgcacctggtcgccgtatgccccattccggctgccggtctggatgtaacccagccttgcggagactgcggtaccatccaagagaactgggtgtgtctttcttgctaccaggtctattgtggtagatatatcaacggacacatgctgcaacatcacggcaacagcggccatcctcttgtgcttagctacatcgatttgagcgcatggtgctattactgtcaggcctatgttcaccaccaggcactgctggacgtgaaaaatatcgcccatcagaataaatttggtgaagacatgccgcatcctcattag

SEQ ID NO: 28921 - DNA, 633 bp, synthetic construct
  misc_feature 1..633: note = Description of Artificial Sequence: Synthetic coding sequence
  source 1..633: mol_type = other DNA
atgacttcaactggccaggattcaacaaccacaaggcaacgaaggtcacgccagaacccacagtctccgccacaggattctagcgtcacttccaaacgtaatatcaaaaagggcgcagtgcctaggagtatcccgaatctcgccgaagtgaagaagaagggcaagatgaaaaagctgggccaggccatggaagaagatcttattgtaggcctgcaaggaatggaccttaacctcgaggctgaggcgctggcgggtaccggactggtcctcgacgaacaactgaacgaatttcattgtttgtgggacgattcctttcccgaaggcccagaaagactgcatgctatcaaggaacagctgattcaggaggggttgctggatcgctgcgtcagcttccaggcccgattcgctgagaaggaagaactaatgctggtgcatagcctggagtacatagacctcatggagactacacaatacatgaacgaaggggagttgagagttctggccgacacctacgactcagtttatctgcacccaaacagctactcgtgcgcttgtctggctagtggatcagtcctgcggctcgtggatgccgttctaggggcagagatacggaatggtatggcaatcatatag

SEQ ID NO: 28922 - DNA, 3648 bp, synthetic construct
  misc_feature 1..3648: note = Description of Artificial Sequence: Synthetic coding sequence
  source 1..3648: mol_type = other DNA
atgaccagcaccggtcaggacagtaccactacgcgtcaacggagatcaaggcagaatccacagtcccccccacaggactccagtgtgacttctaagaggaacattaagaaaggcgcagttccaaggtcaatccccaacctggcagaggtgaaaaaaaagggaaagatgaaaaagttgggtcaggcaatggaagaggatctgattgtgggcctgcaagggatggacctgaatctggaggcggaagccctggctggcaccggcctggttctagacgagcagctgaacgagtttcactgtctgtgggacgatagctttccagaaggtcctgaaagacttcatgcaataaaagagcagctgatccaagaaggtctcctcgaccgctgtgttagctttcaggcacgatttgccgaaaaagaagaactgatgttagttcacagcctggaatatatcgatcttatggagacaacgcagtacatgaatgagggcgaactacgcgttcttgccgacacctatgattccgtttatctgcatcccaattcctatagttgcgcctgtctggcgtccggatccgttctgagattggtggacgcagtattgggcgcagagatacgtaacggcatggcgatcattagaccgcctggtcatcacgcccagcattccttgatggatggatactgcatgtttaatcacgtggccgtcgctgctcggtatgcacagcagaagcaccggatcagacgggtcctgatcgtagactgggacgtccaccacggacaggggacacagtttacattcgaccaggatccttcagtcttgtacttctccattcataggtacgaacaaggaaggttctggccccatctgaaggcctccaactggagtaccaccggtttcgggcagggtcagggctacaccataaatgtgccctggaaccaggtgggcatgagggacgccgactacatagccgctttcttgcacgtgctactccctgtagccctcgagtttcaaccacagctggtcttggtagccgctggcttcgacgccctccaaggagatcccaagggcgaaatggcagccacgcccgcagggttcgctcaactgacacaccttttaatggggctggcgggaggcaagctgattctttctctggagggcggttacaatcttcgcgcactagcagaaggagtgtcagcgtcactccacacattgctgggcgatccttgtcccatgttagaatcacccggagcgccatgtaggagcgcacaggctagcgttagctgtgccctggaggccttagagccattttgggaggtccttgtgaggagtacggaaactgtggagagagacaacatggaggaggacaacgtggaggagtctgaagaggaagggccatgggagccacctgtactgcctatattgacctggcctgttctgcagagcaggacaggtttagtctacgatcagaatatgatgaatcactgtaatctctgggactcccaccaccccgaggttccgcaaaggatacttaggatcatgtgccgcctcgaagaactggggctcgctggacggtgtttaacccttactccgcgacccgcaactgaagctgagttgctcacctgccactcagcagagtatgtcggtcatctacgtgccactgagaagatgaagactagagagctgcatagagagtctagcaacttcgactccatttacatctgcccctcgacgttcgcctgcgctcaactggccaccggagccgcatgcaggctagtggaggctgtgctttcaggggaagtgctaaatggcgctgccgttgtccggccacccggtcaccacgcagaacaggatgctgcctgtgggttttgcttttttaatagtgtcgccgtcgccgctcgacatgctcagactatctctggccatgccttacgaattcttatcgtggactgggacgtccaccatggtaatggcactcagcacatgttcgaggacgacccttccgtgctttacgtgtccctccatagatatgaccacgggacttttttcccaatgggcgatgagggcgcaagctcacaaataggcagggctgcgggaaccgggttcacagtgaacgtagcctggaatgggccacgtatgggggatgcggactacctggctgcctggcataggctggtgctgccgattgcatacgagtttaatcccgagcttgtccttgtcagcgcaggattcgacgcagcgaggggtgacccccttggcggttgccaggtgagccctgaaggctacgcccatttgacacatctcctgatgggcctggcctccggcaggataatcctgatccttgaagggggatacaacctaacttcaatctcggaaagtatggctgcttgcaccaggtcccttctgggggatcccccaccattactgaccctgcctcgcccaccactatccggtgcattagcatccattacagagacaattcaagtccaccggagatactggagatcactgcgcgtcatgaaggtagaggatcgagaggggccatcatcctccaagctcgtgacaaaaaaggccccacagcctgccaaaccaagactcgcagagagaatgaccacacgtgagaagaaggtgctggaagccggtatgggtaaggttacctctgcaagttttggagaggagtccacccctggacaaaccaatagcgaaaccgccgtggtcgccctcacccaggaccagccctcggaggctgctaccgggggagccaccctagctcagacgatctccgaagcagccatcggaggtgccatgctcggacaaacgaccagcgaagaagccgtcggcggagctacccccgaccagaccacaagcgaggagacagttgggggtgcgatactcgaccagacgacttcagaggatgctgttggtggggctaccttgggtcagacgacctcagaggaagcagttggaggagctacattggcgcagaccacatctgaggctgccatggagggcgctacccttgaccaaactacatctgaagaagcaccaggcggaacggaattaattcaaacaccccttgcaagtagcacagaccatcagactcctcctacctcacccgtccagggcactacgccccagatctcaccttctacattgataggttctttgcggaccctagagctgggatcagaatcccagggcgcaagtgaatctcaggctcctggggaggaaaatcttctgggagaggccgcaggtggacaggacatggccgactccatgcttatgcagggcagccgagggctgactgaccaggccatcttttacgccgtcacccccctgccatggtgccctcatctagttgccgtgtgcccaattccagctgctgggcttgacgttacccagccatgcggcgactgcggtaccatacaagagaactgggtgtgcctgtcttgctatcaggtgtactgcggacgttatatcaacggccacatgcttcaacaccacggcaactctggtcatccactagtattatcttacatcgatctcagcgcctggtgttactattgccaagcttacgtacaccaccaagcactgctagatgtgaaaaacattgcccaccagaataaatttggagaagatatgccacatccgcactag

SEQ ID NO: 28923 - DNA, 633 bp, synthetic construct
  misc_feature 1..633: note = Description of Artificial Sequence: Synthetic coding sequence
  source 1..633: mol_type = other DNA
atgacgagcactggtcaggactctactaccacgagacagagacgatcccggcagaatcctcaaagtccgccacaggattccagtgtcacaagcaagcggaatatcaaaaagggcgctgtgcctcggtccatccctaatctggccgaagtgaaaaaaaaaggaaagatgaaaaaattgggacaggcaatggaagaagacctgatcgtgggactccaggggatggaccttaatttggaagcagaggcactggctggaactggcctcgtgctggacgagcaattaaacgagtttcattgtctgtgggatgattcttttccagagggcccagaacgcttacatgccattaaggagcaactgattcaggaggggctacttgatcgctgcgttagcttccaggcccgattcgctgaaaaggaagaactcatgctggttcatagcctggagtacatagatcttatggaaacgacacagtacatgaatgaaggtgagctgagagtccttgccgacacttatgatagtgtgtacctccacccaaactcctactcctgtgcctgtctggcctcagggagtgtactgcgcctcgtggatgctgtgctgggggcagaaataaggaacggtatggctatcatttag

SEQ ID NO: 28924 - DNA, 891 bp, synthetic construct
  misc_feature 1..891: note = Description of Artificial Sequence: Synthetic coding sequence
  source 1..891: mol_type = other DNA
atgaaaaaactgggacaggccatggaggaagacctcatagtggggctgcagggtatggaccttaatctggaagcagaagcccttgcagggactggcctggtgcttgacgagcaactcaatgagtttcattgtctttgggatgactcttttcccgagggcccagagcgtcttcatgcaattaaagaacagctcattcaggagggtttgctggatcgctgtgtttcttttcaggctcgctttgcagagaaagaggaactgatgctcgttcattctctcgaatatatcgacttgatggaaaccacgcagtacatgaatgaaggcgagctaagagtcctcgcagatacgtacgactctgtctaccttcatcctaacagttacagttgtgcctgcctggccagcggaagcgtacttaggctggtcgacgctgttctaggcgctgagataaggaacggtatggcaatcatccgccctcccggacatcacgctcagcattcccttatggatggctattgtatgtttaatcacgtggctgtggccgctcgttatgctcagcagaaacatcggattcgcagagtgttaatcgtggactgggacgtccaccacggccagggcacacagttcacattcgatcaagaccccagtgttctttatttttcaattcacaggtatgagcagggtaggttctggcctcatctgaaggccagtaactggagtacgaccgggttcggtcagggacagggctataccattaatgtcccctggaaccaggtagggatgcgtgatgccgactacatcgcggcattcctccatgtcctgctgccagttgccctcgaggtgctgggaatttggggcgttttaggtgggggagtcgccctgaaggtcaggttgtag

SEQ ID NO: 28925 - DNA, 429 bp, synthetic construct
  misc_feature 1..429: note = Description of Artificial Sequence: Synthetic coding sequence
  source 1..429: mol_type = other DNA
atgacttctacaggtcaagactcaaccacaactcgccagaggaggtcacggcagaacccacagtcgcctccacaagactcttccgtcaccagtaagcgcaacattaagaagggagcagtgcctcggagcattcccaatctggccgaggttaagaaaaaggggaagatgaaaaagctgggtcaggccatggaggaggacctgatcgtcggtttgcagggaatggacctcaatctggaggcggaagcccttgccggaactgggctggtcttagacgaacagctgaacgagttccattgcctttgggatgacagctttccagaagggccagaacgccttcacgcaattaaagagcagctgatccaggaaggcctacttgatagatgtgtctccttccaggctcggtttgccgaaaaggaagaactgatgtag

SEQ ID NO: 28926 - DNA, 810 bp, synthetic construct
  misc_feature 1..810: note = Description of Artificial Sequence: Synthetic coding sequence
  source 1..810: mol_type = other DNA
atgaccagcacgggtcaagactctacgacaaccaggcagaggcgtagcaggcagaaccctcagtcacctccccaggacagcagcgtgaccagcaaaaggaatatcaagaaaggggcagtcccccgttcaattcctaatctcgcggaagttaagaagaagggaaaaatgaaaaaactgggccaggctatggaggaggacctgatcgttggcttgcagggtatggacctcaatttagaggccgaggctttagccggaacaggcctcgttttggacgaacaactgaacgaattccactgcttatgggacgactcttttcctgagggacccgaaaggctgcatgctataaaggaacaactgatccaggagggcctgctcgaccggtgcgtatcttttcaagcccgattcgcagaaaaggaagaactgatgcttgttcatagccttgagtatatcgatctgatggaaacaacccagtacatgaacgaaggtgaactgcgcgttctggccgatacttatgacagcgtatacctgcatcccaatagttatagctgtgcttgtctggcctccgggtctgtactgcgattggttgacgcagtccttggcgctgaaatccgcaacggtatggccattattaggccgcctggccatcacgcccaacactccctcatggatggctactgcatgttcaaccatgtcgctgtcgcggctaggtatgctcagcagaagcatcgtattcgtagggtgctgatcgtggattgggacgtccatcacgggcaggggactcaatttacctttgatcaagaccccagatag

SEQ ID NO: 28927 - DNA, 2454 bp, synthetic construct
  misc_feature 1..2454: note = Description of Artificial Sequence: Synthetic coding sequence
  source 1..2454: mol_type = other DNA
atgaccagcaccggacaggactccacaaccaccaggcagcgaaggtccagacagaacccgcaaagtcctcctcaggattcctccgtaacaagcaaaaggaacattaaaaaaggggcagttcctcgaagtattcccaacttggctgaggtgaagaaaaagggcaagatgaagaagctgggccaggcaatggaagaggacctgattgtgggcctccagggtatggacctgaacctggaggctgaagcacttgctggcactggattagttctcgacgaacaacttaacgaatttcactgcctctgggacgactccttccctgaaggccctgaacggttgcatgccataaaagagcaactgatccaggaaggactgctagatcgatgtgtgtctttccaggcccgatttgccgagaaagaggaattgatgcttgtgcattccttggagtacatagacctcatggaaacaactcaatatatgaatgagggcgaacttagggttctcgcggacacctatgactctgtctatctgcatccaaacagttattcctgcgcctgcctcgcatctgggtctgtgctccgtctcgttgacgccgtgctcggcgcagaaatcagaaacggaatggctataatccgcccaccaggacaccacgcccagcattcattgatggatggctactgcatgttcaaccatgtggcggtggcagctaggtacgcgcagcagaaacaccgtatccgcagagtgctcattgtggattgggatgtccaccacggccagggaacccagtttacattcgatcaagatccttcagtcctgtatttcagcattcacaggtatgagcaggggcgtttctggcctcatctgaaagcttctaactggtccactacaggatttgggcagggtcaaggctatactattaatgtgccgtggaatcaggtgggaatgcgcgatgctgattacatcgctgcctttctgcacgtattgctgccagtggcgctggagtttcaaccccagctggtattggtggctgccggattcgacgccctgcagggcgatcctaagggcgaaatggcagctacccctgccggttttgctcagctgactcacttgctcatggggttggcgggagggaagttgatactcagcctggagggtggctacaatcttcgggctcttgctgaaggggtatctgcaagcctgcacaccctgctcggtgacccgtgccctatgctcgagagtccgggagcgccttgtaggagcgcacaggccagcgtctcttgcgcactcgaagccttggagcctttctgggaagtactggtgaggtccacagagaccgtagagagagacaacatggaggaagacaacgtagaggagtctgaagaggaggggccatgggagccaccggttctgcctattctcacttggcctgtactccaatcccggactgggctggtctacgatcagaacatgatgaatcactgcaatctgtgggatagccatcatcccgaagtgccccagcggattttgaggataatgtgccgccttgaagagctaggtcttgctggcagatgtttgacactcaccccacggccagctactgaggccgagctgctcacatgccacagtgcggagtatgttgggcatctacgcgctacagagaagatgaagaccagagagttgcatcgggagagcagcaacttcgactcaatttatatctgcccaagtacattcgcttgcgcccagctcgcaaccggggctgcatgtcgactcgtggaggcagtcttgtcaggtgaagtgttgaatggcgctgcagtagtgcggccacctggtcatcacgcagagcaagacgccgcttgtggcttctgcttctttaattccgtggccgtcgccgcacgccacgcccagactatctctggacacgccctaaggatcttgatcgttgactgggacgttcaccatgggaatggaacccagcatatgttcgaggatgacccatcggtgttgtacgttagtctgcataggtacgatcatggcacatttttcccaatgggagatgaaggagcctccagtcagatcggtagagctgccggtacaggattcacagtcaacgtcgcatggaatggtccccgaatgggcgatgcagactatctcgcagcctggcaccgtctggtcctgccaatcgcatacgagttcaaccccgagctggtgttagtgagtgcgggattcgacgctgcgcgtggggatccacttggtggatgccaagtgagccccgaggggtatgcccacctcactttgccaatcgcatgtctgagagggactaccactcccgcacagaaggagcggggtgcagctcaatggccacaggagggcgcagatatcatgcggattacgctggctggcggagaactcaccggtcgtcacgggaaggtggcatacgtcatcaagtacaagctgtag

SEQ ID NO: 28928 - DNA, 156 bp, synthetic construct
  misc_feature 1..156: note = Description of Artificial Sequence: Synthetic coding sequence
  source 1..156: mol_type = other DNA
atgacttccacagggcaggattcgaccaccacccgacaacgcaggagcaggcagaaccctcagagccctccacaagacagtagcgtgacctcgaagcggaatatcaagaagggagctgtgccgagatctatccccaatctcgctgaggtgaagtag

SEQ ID NO: 28929 - DNA, 516 bp, synthetic construct
  misc_feature 1..516: note = Description of Artificial Sequence: Synthetic coding sequence
  source 1..516: mol_type = other DNA
atgacctctaccggccaggatagcacgacaacacgccagcgtaggtcccgccagaacccgcagtccccaccccaggattcaagcgtaaccagcaagcgcaacattaaaaagggagcagtgccccgatccattcctaatcttgctgaggtcaaaaagaagggtaagatgaagaagctaggtcaggctatggaggaggatctcattgtggggctgcagggcatggatctgaacctcgaggctgaggctctcgctgggacaggcttggtactggatgagcagctgaatgaattccattgcctatgggacgacagcttcccggaggggccagagcggcttcacgccataaaggaacaactcattcaagagggcctcttggataggtgtgtgtcatttcaggcaagatttgcagagaaggaggagctgatgctggtccattctctggagtacattgatctgatggagaccactcagtacatgaatgaaggcgaactgcgtgtactggccgacacctattag

SEQ ID NO: 28930 - DNA, 486 bp, synthetic construct
  misc_feature 1..486: note = Description of Artificial Sequence: Synthetic coding sequence
  source 1..486: mol_type = other DNA
atgacctcaacgggccaggactccactactactaggcagcgcagaagtcgccagaaccctcagagtccccctcaggattctagtgtcacctctaagcgcaacatcaagaaaggcgctgtcccaagaagcatccctaacctggccgaagtgaagaagaaaggaaaaatgaaaaagttaggacaggcaatggaggaagacttaatagttgggttacaggggatggacctgaatcttgaagcagaagctctggctggtaccggactggtgcttgatgagcaactcaacgaatttcattgcctttgggatgactcttttccagagggtcccgagcgactacacgccataaaggaacaattgatccaagaaggcctactcgatagatgcgtgtcttttcaagccagattcgccgagaaagaggaactgatgttggtacactccttagagtatatcgatctaatggagactactcagtacatgaatgaatag

SEQ ID NO: 28931 - DNA, 504 bp, synthetic construct
  misc_feature 1..504: note = Description of Artificial Sequence: Synthetic coding sequence
  source 1..504: mol_type = other DNA
atgacctctactggccaggactccacaacaacgaggcagcggagatcacgccagaatccccagagccctccccaagactcttccgttacctctaagcgcaacattaaaaagggggctgtgccgagaagtatccccaatctcgccgaggtgaaaaagaaaggcaagatgaagaagctgggccaagccatggaagaggatctcatagtggggctgcaaggaatggacctgaatttggaggcagaagccctagccggtactggtctggtgctggatgaacagttgaacgaatttcattgtctctgggacgatagctttcccgagggcccagagaggcttcacgccattaaggaacagttaatccaagaagggctgctggacaggtgtgtgagttttcaggctcgcttcgcagagaaagaggagctgatgcttgtgcacagcctggagtacatagacctgatggagacgactcaatacatgaatgaaggggaactgcgagtcctttag

SEQ ID NO: 28932 - DNA, 3690 bp, synthetic construct
  misc_feature 1..3690: note = Description of Artificial Sequence: Synthetic coding sequence
  source 1..3690: mol_type = other DNA
atgtcaggcgctaacaggggaagaggacaggcatcaagtactatgacaagtacaggacaggactcaacaaccacgcggcagaggcgctcaagacagaacccacagtctccgccacaagatagttccgtgacctccaagcgaaacatcaaaaagggcgctgtgcccagatccatccccaacctcgccgaagtgaagaagaaaggaaagatgaagaagttgggccaggctatggaggaagatctcattgttggcttgcagggcatggatctgaatctcgaggcagaggccctcgctggtactgggcttgtcctggatgagcaactgaacgagttccactgtttgtgggacgactcgttcccagagggtccagagcgacttcacgccattaaggagcaacttattcaagagggccttctcgatagatgtgtgagttttcaggcacgctttgcagagaaggaagagctaatgttggtccacagcctggagtatatcgacctcatggagactacacagtatatgaatgaaggcgagctcagagtgttggccgacacttacgactctgtgtacctgcatcctaactcttactcctgtgcatgtctggcatcagggagcgtgctccgcctagtagacgcagtattgggcgctgagatcaggaacggcatggccatcattagaccccctggccatcacgcacaacattctctcatggacggctactgtatgtttaaccatgtggctgtggctgccaggtatgcccagcaaaagcacaggatccgtagagtcctcatcgtggattgggacgtgcaccacgggcagggtacccagttcacctttgaccaagaccctagtgtgctctacttctccattcatcggtatgaacaaggtaggttttggccacacctcaaagctagcaattggtccacaaccggcttcggtcaggggcaagggtacaccataaatgtcccatggaaccaggtgggcatgagagacgctgattacattgctgcttttcttcatgtcctgctgcctgtggctctggaattccaaccacagctcgtcttggtcgcagctgggttcgacgccctgcagggcgaccccaaaggcgaaatggctgcaacgcccgcaggatttgctcagttgacacacctcttaatggggttagccggaggtaaacttatcctgtctttagaaggaggttacaatcttcgggcacttgcggagggagtaagtgctagtctgcatacactattgggggatccctgtccgatgctcgagagcccgggagcaccctgtaggtctgctcaggcaagcgtgtcatgtgcattagaagccctcgaacctttctgggaggtactggtgcggagtaccgaaactgtggagagggataatatggaggaagacaatgtcgaggaatctgaggaagaaggaccttgggaaccacctgtgctcccaatattgacctggcccgtcctgcagagccgcactggtctcgtttacgatcaaaatatgatgaaccactgtaatctctgggactctcatcaccccgaggtgcctcaaagaatccttcgcatcatgtgcagactggaagagctcggtctcgcagggagatgcctgacgctgacgcctagacccgctactgaagctgagctgctcacttgccattcagcagaatacgtgggccatctcagagcaacagaaaaaatgaaaaccagagaactgcaccgagaaagcagcaactttgactcaatttacatctgcccctccacttttgcctgcgcccaactggcaaccggcgctgcctgtcggctagtagaggcggtactgagcggcgaggtcctgaatggtgccgcagtcgtacggcctccgggacaccatgcggaacaggacgcggcttgtggcttttgtttcttcaattctgtcgctgtagccgctcgccacgcccagacgattagcggccacgcacttagaatcctcatcgtggactgggatgtgcaccacggcaatggcacacagcacatgtttgaagatgacccttccgtgctatatgtgtccttacaccggtatgaccacggaaccttcttccccatgggagacgagggtgcttcaagtcagattgggagggctgccggaacgggcttcactgtgaacgtcgcatggaatgggcctcggatgggcgacgctgactacctcgcagcgtggcatcgactcgttctccctatcgcttatgaattcaaccccgaactggtcctcgtgtctgcaggatttgacgccgctaggggagatccactggggggatgtcaagtgtcacctgaggggtacgcccacctcacccacctcctcatgggccttgcgagcggtcgcattatcctgatcctggagggtggatataatttgactagtatcagtgaatccatggcagcctgtacaagaagcctccttggtgatcctcctcctctccttacgttgcctcgcccaccactgtctggtgctttagcctccattactgagactatacaggtgcacaggcgttattggcggtcactgcgcgtgatgaaagttgaggatagagaagggccaagctcgtccaaactggtaacaaagaaggcaccccagcctgcaaagccccgacttgccgagcgtatgactactagagagaaaaaggtactggaagccggaatgggcaaagtgacgagtgcaagctttggcgaagagtcgacacccggtcagaccaatagtgaaactgccgtcgttgcgttgacgcaggaccagccttcagaagccgctaccgggggagcgacattggcacagaccatttcagaagccgcaattggcggtgcaatgctcggccaaaccacttccgaagaagccgtaggcggagcaaccccagaccaaacaacttctgaggagacggtcgggggagctatcctcgaccagaccacctcagaggacgctgtgggtggcgcaacgttagggcagacaacgtccgaagaggcagtgggcggagctacacttgctcagaccactagcgaagccgctatggaaggggctacactggaccagactacgagtgaggaagcgcctggtgggacggaactgatacagactccccttgcctcctcgactgatcaccaaacccccccaacgtcccccgtacaggggaccacaccgcaaatctccccatccacactgatcggaagtttgaggaccctcgagctcggctctgagtcccagggtgccagtgaaagccaggctcctggcgaagaaaatctgctgggcgaggcggctggtgggcaagacatggctgatagcatgctgatgcagggatcaagaggactgacagatcaagcgatcttctacgcggtcactcccctgccctggtgcccacacctagtggctgtttgtccaatccctgcggctggcctcgatgttacgcaaccctgtggcgactgtggcaccatacaagaaaattgggtgtgtctgagttgttatcaggtgtactgtggcaggtacatcaacgggcatatgctgcagcaccacggcaattcaggccacccccttgttctatcgtacattgacttgagcgcatggtgttattactgccaggcctacgtgcaccaccaagccctgctggacgttaagaacatcgcccaccaaaacaaattcggtgaagacatgccccacccccactag

SEQ ID NO: 28933 - DNA, 2976 bp, synthetic construct
  misc_feature 1..2976: note = Description of Artificial Sequence: Synthetic coding sequence
  source 1..2976: mol_type = other DNA
atgcattcacctggcgcagacggcacacaggtctctccaggggcacattactgctccccaactggggctggctgtcctcggccttgcgccgatactccaggacctcagccacagcccatggatttgcgtgttggtcagcgtccacctgtcgaacccccacccgagcctactttactggcattacaacgccctcagaggttacatcatcacctgttccttgctggattgcagcagcagcgaagcgttgagcctatgaggctctccatggatactccgatgccagaacttcaggttgggccacaggagcaagaattaaggcagctgctgcataaagacaagagtaagagaagtgccgtggcctcttcagtggtaaagcagaagctggcagaagtgatcttaaagaagcagcaggccgctctcgaaaggacagtgcatcctaacagcccaggcatcccttaccgaactctggagcctcttgaaaccgagggtgctacaaggtctatgctgtcatcattccttccacctgtgccttctctgcctagcgacccgccagaacacttccctctgagaaagaccgtctcagaacccaacttaaaactgagatataagcccaagaaaagcctcgagagaagaaagaaccctctgctgcgcaaagagtcggcacccccatcactgagaagaaggcctgctgaaaccctgggggacagctcaccgagtagttcatctactccagcgtccggttgcagctcccccaacgattccgagcacggtcctaaccccatcctcggaagcgaggcccttttgggtcagcgccttcgactgcaggagacatctgtcgccccattcgccttacccactgtttccttgctcccagccattacgctgggattaccagcccctgccagagcggattccgaccgcagaacacacccgacactgggccctagaggccctattctaggatcgccgcacacccctctgtttttaccacacggcctggagccagaggctggcggtacgcttccttccagactgcagcctatactcttgctggacccgagcggtagtcacgcccctctgttgaccgtgcctgggttaggccctctgcctttccacttcgcgcaatccttgatgacaacagaacgcctctctggctcaggactgcattggcctctgtcacgcaccagatcagaacctttgcccccatccgccaccgccccacctccaccaggacccatgcagcctcggctcgaacaactcaagacacatgtgcaggtgatcaaaaggagcgccaagccctccgagaagcctcgcctgcggcagatacccagtgcagaagaccttgagaccgacggaggcggaccgggacaagtggtcgacgatggtctggaacaccgcgagctgggacatggccagccggaagcacgaggtcccgctccgctccaacagcacccccaggttctgctatgggagcagcagcggctggcaggccgtctccctcgtgggagcactggcgatactgtgctcttgcctctcgcccagggaggacaccggccactgtcacgtgcacaaagctcgcctgccgctccagctagcctaagcgccccagagcccgctagtcaggcacgggtcctgtctagctccgagactccagctcgaactcttccgttcacgaccggactgatctatgatagtgtcatgttaaaacaccagtgttcctgcggggataactctagacatccagagcatgctggccgtatccaatctatctggtcgagattgcaagagaggggactacggagtcagtgtgagtgtttgagggggcgaaaagcgagcctggaggagctccaatctgtccacagcgagaggcacgtgctcttatatggaactaacccactttctcgccttaaactggacaacggtaagttagccggattgcttgcacagagaatgtttgtgatgctaccctgcggcggagtcggcgtggatactgacactatctggaatgagctgcattcctccaacgcagccaggtgggccgctggatccgtcaccgatctggccttcaaggttgcttccagggaactgaaaaatggattcgccgtggtcaggccgccaggtcaccacgccgaccattctacggcaatgggcttttgttttttcaactccgtagctatcgcatgccgccagctccaacagcaatctaaggctagcaagatccttattgtggactgggatgtccaccatgggaacgggacacagcaaaccttttaccaagatccgagcgtgctttacatctctctccatcgccacgatgatgggaactttttccccggtagcggggcagtggatgaggtaggcgcaggctctggggaagggttcaacgtcaatgtagcctgggccggtggactcgatcccccaatgggtgaccccgaatatctggcagcttttagaatagttgtgatgcctattgccagagagttctcacccgacctggtgctcgtgtctgcgggattcgacgccgctgaaggacaccccgcacctttaggaggctatcacgtgagcgccaagtgtttcggctacatgactcagcagttaatgaacctggcaggcggtgctgtggtgctcgctctggagggtggccatgacctcaccgcaatatgtgacgctagcgaagcctgtgtcgccgcactcttgggaaaccgagtcgatcccctgagcgaggagggatggaagcagaaacctaaccttaacgcgatccggtccctggaagctgtcattcgcgtgcactctaagtactggggctgcatgcaaaggcttgcctcctgcccggattcctgggtccctagagtgcccggagcggacaaagaggaggtcgaggctgtgactgccctggcgtcgctctcagttgggatactcgcggaagatcgaccctctgaacagctggtcgaagaggaagagcctatgaacctctag

SEQ ID NO: 28934 - DNA, 2865 bp, synthetic construct
  misc_feature 1..2865: note = Description of Artificial Sequence: Synthetic coding sequence
  source 1..2865: mol_type = other DNA
atgcacagccctggcgctgatggcacacaggtctcccctggggcacactattgttctcctaccggtgcaggttgtcccagaccctgtgccgacacaccagggcctcagcctcagcctatggacctgcgggtggggcaacggccacccgtcgagccccctccagagcccactttgcttgcgctgcagcggccacaacgcttacaccaccatcttttcttggcgggactgcaacagcagcggtccgttgagcctatgcgcctgtctatggacaccccaatgccagagcttcaggtcggacctcaggagcaggagctccggcagctcctgcataaggacaagagtaagcggtccgccgttgcaagcagcgttgtgaaacagaaactagccgaggtgatcctcaagaagcagcaagcagctcttgaaaggacagtgcacccgaattcaccaggcattccttaccggactctggagccactggagacagaaggcgcaacacgaagcatgctgtcctcttttctgccacctgtcccctcacttccttcagatccccctgaacacttccccctccgcaagaccgtaagtgagccgaacttaaaactcaggtataagcccaagaagtccctcgagaggaggaagaatccattgttgaggaaagaatctgcgcctccgagtctaagacgacgtcctgcagagaccttgggtgattcttcaccttccagctcctccactccggctagtggctgtagctctcctaacgactcagaacacgggcctaatcccatcttgggctctgaagccgactcagacaggcgaacccatccgactctgggaccacgcggacccattctgggatcccctcacacgccactctttctgccacacgggctggagccagaggcagggggaaccttgcctagtaggctgcagccaattctactgctggaccctagcggcagccatgctcccttattgacagtgcctggactgggcccattgcctttccactttgctcagagcctgatgaccaccgagcgcctgtctggatctggcctccactggcccctctcccgcactcgcagtgaacccctgcctcccagcgctacggccccaccacccccaggacccatgcagcctagactggaacagctcaagacccacgtgcaagtcatcaagcgcagtgcaaagccaagtgaaaaacctcgccttcgtcagataccatccgctgaggacttggagacagatggaggaggcccaggccaagttgtggatgacggcctcgaacatcgtgaactgggccacggtcagccggaggccagaggaccggctcccttgcaacagcatcctcaggtcctactgtgggaacagcagaggcttgcgggtagactccccagaggtagcacaggtgacaccgtgttactaccattggcacaggggggacacaggccattgagtagagcccagagctcccctgcagcccctgcctctctgagtgccccagagccggctagccaggcccgagttctgagtagttctgaaactcctgccaggaccctgcctttcacaacggggctgatctacgattccgtgatgcttaaacatcaatgctcatgcggcgataactccaggcaccctgagcacgcgggaaggatccaaagcatttggtcaaggctgcaggagcgcggattgcggtctcaatgcgaatgtctgcgtggccgtaaggcgtcactggaagagctgcagagtgtgcattcggaaagacacgtcctcctgtatggcaccaaccctctgagcaggcttaagctggataatggaaagcttgccggactgctcgctcagcgtatgttcgtgatgctgccttgtgggggtgtgggagtagacacagacactatctggaacgagctgcatagctctaatgccgctcggtgggcagccggaagcgtgacggacttggcctttaaggttgctagccgagagctgaagaacggctttgcggtggtgaggcctcccggtcatcacgcagatcacagcactgcgatgggtttctgcttttttaactccgttgccatcgcctgccggcagttacagcagcagtctaaggcaagtaaaatcttaattgtcgactgggatgtgcaccacggaaatggaactcagcagacattctaccaggatcctagtgtgctgtacatttccctgcacaggcacgatgatggtaatttcttcccaggtagtggtgcagtcgatgaagtcggcgcaggtagcggtgaaggttttaacgtcaacgttgcctgggccggaggcttggaccctccaatgggtgaccctgagtatttagccgctttcaggattgtggtgatgccaattgcacgagaatttagccccgacctagtcctagtgtcagcgggatttgacgcagccgaagggcatcctgccccactcggaggctatcatgtctctgccaaatgcttcggctatatgacccagcaactcatgaatctcgctgggggagccgtggtgttagccctagaaggcggacacgatctgaccgccatctgcgatgcctctgaggcgtgcgtggcagcactactcgggaaccgtgtagaccctctgagcgaagaagggtggaagcagaagcccaacttaaacgccatccggtctcttgaagccgtgatccgggtgcactctaagtactggggttgcatgcagaggctggctagctgtccagatagctgggtgccacgggtgcccggagctgacaaggaggaagtggaggccgtgactgcactggcctccctctcagtggggattctagcagaggaccgcccttctgagcaattggtggaagaggaggaaccaatgaacctctag

SEQ ID NO: 28935 - DNA, 3045 bp, synthetic construct
  misc_feature 1..3045: note = Description of Artificial Sequence: Synthetic coding sequence
  source 1..3045: mol_type = other DNA
atgagtgatctcaggaagcgagagctcggggctctatttactagccgtggtaccgggggagtggagtgggacgggactcaggtcagtccaggcgctcactattgctcacctaccggcgctggctgccctaggccttgcgccgatacacctggccctcagccgcagcctatggacctgagggtggggcaacgtccccctgtagagcctcccccagaaccaacgctgctcgctttacagaggcctcaaaggctgcatcaccacctttttcttgctggccttcaacagcagcgcagtgtggagcctatgagattaagcatggacactcccatgccggagcttcaagtcggacctcaggaacaggagcttcgccagctgcttcacaaagataaatctaaaagaagcgcggtggcctcatcggtggtcaaacagaaactagcggaggttatccttaagaagcagcaagcggctctggagaggaccgtgcatcccaactccccgggtattccttatcgcaccctggaacctctagagacggaaggagcaacacgatccatgctgtcatcattcctccccccagtgccatctttaccttcggacccacccgaacatttcccccttagaaagactgtctctgaaccgaatttaaagctccgctacaaaccgaagaagagtctcgagcggcgaaagaaccctctgctccgcaaggaaagcgcacctccttctcttcgaaggaggccggctgaaacactcggggatagctcaccttccagcagcagcacccccgcatccggttgctcaagtcctaatgactcagagcatggccctaacccgattcttggttcggaagccctgttgggccaacgcctgcgcctgcaggaaacatctgtggctccgtttgccttgcctaccgtttcactgttaccggctatcactctgggcctgcccgcaccagccagggccgattccgatagacggacacaccctacattgggccctcggggtcctattctaggatctccacatacccccctgtttctcccgcacggactcgaacccgaggccggtggaaccctgccctcgaggcttcaaccgatcctgttattagatccctcgggcagccacgcccctctgctgacggtcccagggctcggccctttgccatttcactttgcacagtccctgatgactacagagaggctcagtgggagcggcctgcactggcccctctcaagaacccgctccgagccactgcccccttccgccactgctcctccacctccgggacctatgcaaccccgacttgagcagcttaagacacacgtccaggtgattaaaagaagcgccaaaccatctgaaaaaccaagactgaggcagatcccaagcgctgaagacctcgagaccgatggcggaggccctggacaggtggtagacgacggtctcgaacaccgggaactgggacacggacaacctgaagccaggggacctgcgccactccagcagcacccccaggtgctcctgtgggagcaacaacgtttagccggaaggctaccaagggggtctacgggagatacggtgctcctccccctcgcccaggggggtcaccgccctctgagtcgagcgcagagctcacctgctgctcccgcatctctcagcgccccagagccagcaagtcaagccagggtgcttagtagcagcgagaccccagccagaacgctcccttttacaacgggactgatctacgacagtgtgatgctaaaacaccagtgcagttgcggagataattcccggcacccggaacatgccggaagaattcagtctatatggagtcgcctgcaagaacgcggacttaggtcacagtgcgagtgcctaaggggacggaaagctagtctggaagaactgcaatcagtccattccgagaggcatgtgctcttgtacggaacgaatcccctctccagattaaagttggacaacgggaagctggccggactgctggcccagcggatgtttgtgatgcttccctgtgggggagtgggcgtcgacaccgacaccatttggaacgaacttcatagctccaatgcagcacggtgggcagcgggtagcgtgactgatttggcctttaaagtcgcctccagggagctgaaaaatggttttgccgtggtgagacctcctggccatcacgcagaccactccaccgccatgggattttgcttctttaattcggttgcaattgcatgtagacaactccagcaacagagcaaggcttctaagattcttattgtggattgggacgtacatcatggcaatggtactcagcaaactttttaccaagatccctctgtcctgtacatttcattacatcgtcacgatgatggcaatttctttcccggttcaggcgcagtggacgaggtcggagccggatctggagaaggattcaatgtcaacgtggcatgggccggaggcctggacccgccaatgggggatccagagtacctggctgcctttcggatagtggttatgccgatcgctcgcgaattcagtcctgatctggttctcgttagtgcaggttttgacgcagccgaaggacaccccgctcctctcgggggttaccacgttagcgcaaaatgctttgggtatatgactcaacagctcatgaatctggctggcggagccgtggtgctggccctggagggtggccacgacctcactgcaatttgcgacgcatccgaggcctgcgtagctgccctactgggtaacagagtcgatcccctgtcggaggaaggttggaagcagaagcccaatttgaatgccatccgcagcctcgaggccgtcatacgagtgcacatgggagctctcactctgtctcagatccctggtcacggcagcagccagcagcaagctggaggcgcattcagctggccaggacacccttgtagggctgccgtggtcatggttaatacgggcgctgcctgcagcgcttggcctcctgttcaaactcccggatgtctagaatgccaagggctcactaagaagaagtggagacagtag

SEQ ID NO: 28936 - DNA, 402 bp, synthetic construct
  misc_feature 1..402: note = Description of Artificial Sequence: Synthetic coding sequence
  source 1..402: mol_type = other DNA
atgcattcgccgggagccggttgtcctaggccatgcgctgatactcctggtcctcagcctcaaccaatggacctaagggttggacagcgacctcctgtagagccaccgccagagcccacgcttttggccttacagaggcctcagcgtctccatcaccaccttttcctcgcgggtttgcagcagcagcgtagcgtggagcccatgcgactctcaatggacactcccatgccggagctgcaggtgggccctcaggaacaggaactccgtcaactgctgcacaaggacaaatctaagagaagtgcggtggcttccagcgtggtgaagcaaaagctggctgaagtgatcctcaagaaacaacaggcagccctcgaaagaactgtgcatccaaatagcccaggatag

SEQ ID NO: 28937 - DNA, 2859 bp, synthetic construct
  misc_feature 1..2859: note = Description of Artificial Sequence: Synthetic coding sequence
  source 1..2859: mol_type = other DNA
atggatcttagggtgggccagaggcctcctgtggaacccccacctgagccgacactccttgcactccaacggcctcagcgtctgcaccaccacctgttcctggccggtcttcagcagcagcggtccgtggagccgatgagattgtcaatggacacacctatgcccgagcttcaagtggggccacaggagcaggagctgcggcagttgctccacaaggataaaagtaagcggagtgccgtcgctagcagcgtggtgaagcagaaattggccgaagtgattctcaagaagcagcaggccgctctggaaaggactgtgcacccaaacagccctggcattccttacaggaccctagagccgctggaaaccgagggcgcaacaaggagcatgctgagctccttcctgcccccagtaccaagtctcccttccgacccgccagaacactttcccctgcgcaaaacagtcagcgagcctaatctgaagctccgctacaagccaaagaagagcctggagaggaggaagaacccacttctgcgaaaagaaagcgctccaccctccctccgtaggaggcctgccgaaactctgggtgatagcagcccctcatcatcctcaactcctgcatccggatgcagttctcctaatgattctgagcacggtcccaaccccattctgggctccgaggctctgctcgggcagcgcctgaggcttcaggaaactagtgtggcgccatttgccctgcccacggtcagcctgctcccagctattacactcgggttgcccgctcccgcaagggctgattcggatagaaggacccatccaacactgggtcccagaggacctatcctgggcagtccacacaccccattatttctcccacatgggttagaacccgaagcagggggaactttgccctccagattgcagccaatcctgttgctggatccttcgggctctcacgctccattgctcacggtccctgggctaggccctctgccatttcacttcgcacagagcctgatgacaacagagcggctatctggtagtggcttgcactggcccttgtcgaggacacgatccgaaccccttcctcccagcgctacggcaccccctcccccaggccctatgcagcctcggcttgagcaactcaaaactcatgtgcaagtgatcaaacgaagtgccaagccctctgaaaaacccaggctgaggcaaataccttcggccgaggatctcgagactgacgggggtggccctggccaggtggtggatgacggtctggaacacagggagctggggcacggacaacctgaggcaaggggaccagctccccttcagcagcatccacaggtgctgctatgggagcagcagcgacttgctgggagactccctaggggatctacgggtgataccgttctactccccctggcccaggggggtcaccggccattgagccgcgcacagagcagcccagctgcaccagcttctctttcggctcctgaaccggcttcacaagcacgcgtgcttagttccagtgagacgccggctcgcacactacctttcaccacaggtctgatttacgattccgtcatgctgaaacaccagtgctcttgcggcgataattcccgccaccctgaacatgcaggccgtatacagtcaatctggtcccgactgcaggagcgaggtcttcgctctcagtgtgaatgcttgcgtggacgaaaggcaagcttggaagagcttcagtctgttcattcggagcggcacgtcctgctctacgggaccaatcctctttccagactgaaacttgacaatggcaagctagccggactactcgcccagcgcatgtttgtcatgctgccatgtgggggagtgggagtggacactgataccatttggaatgaactccacagctccaacgccgctcggtgggcagcagggtcagtgaccgacctcgcatttaaggtagcttctcgggagcttaaaaacggtttcgccgtggtgaggccacctggccaccatgccgaccactccaccgccatgggattctgtttttttaatagcgtggctatcgcttgcaggcagcttcagcagcagtctaaggcctctaagattctgatagtcgactgggacgtccaccatgggaatggtacgcaacagaccttttaccaggacccatctgtgctctacataagcctccaccgacatgatgatggaaacttttttcccggatccggggctgtagacgaggttggggctggttccggagaaggcttcaacgttaacgtggcctgggctgggggactcgacccacctatgggtgatccagagtatctggccgcttttcggatcgtggtcatgccaatcgccagggagttctcacccgacctggtgcttgtaagcgccggattcgatgccgcagaaggacatccagcccctctgggcggataccacgtttcggctaagtgctttgggtatatgacccagcaactgatgaacctggctggcggtgccgtggtgctggcactcgaagggggtcacgacctaacagctatttgcgatgcatccgaagcttgtgtagcagctctgcttggaaatcgggtggacccactgtctgaagagggatggaagcagaagcccaacctgaacgccattcgctctctggaagccgttatcagggtccacagcaagtattggggctgtatgcagagactcgctagctgcccagactcttgggtaccaagggtcccaggagccgacaaggaagaggttgaggctgtcactgccctggcctcacttagcgtgggaattctggctgaggacagaccgtcggaacagctggtggaagaagaggagcccatgaatctctag

SEQ ID NO: 28938 - DNA, 2925 bp, synthetic construct
  misc_feature 1..2925: note = Description of Artificial Sequence: Synthetic coding sequence
  source 1..2925: mol_type = other DNA
atgcacagcccaggggctggatgtccacggccatgcgccgataccccagggcctcagccacagccaatggacctgagggtagggcaacgtccaccagtcgaacctcctcccgagcccacactgctggctttgcagcggccacagaggttgcatcaccacctcttcctcgccggactccaacagcagagatcggtcgagccgatgcggctgagtatggacactccgatgcctgagcttcaggtgggcccacaagagcaggagctccgacagctgctgcataaagataaatctaagaggagtgccgtagccagcagtgtcgtcaaacagaagctggccgaagtgattctcaaaaagcaacaggctgcgctcgagaggaccgtgcatcctaactcacctggcattccttatcgcacgctggaacctttagaaaccgaaggggctacccgctccatgttatccagcttcctgccacccgtcccaagtcttccctctgacccaccagaacactttcctttgcgaaagaccgtgagcgagcccaacctcaagctgagatacaagcccaagaagtccttggagaggcgtaagaatccgctgctgcgcaaggagagtgcccctccaagcttgagaaggcgcccagcagaaacacttggagattcttccccgagtagttccagcactccagccagcgggtgcagctcaccaaacgattccgaacacgggcctaaccccatattgggttcggaagctctactggggcaacgtttgcggcttcaggagacatcagtggctccatttgcactgccgactgtgagtctgctgcccgctatcaccctcggtttgccagcccctgccagggcagacagtgaccgtaggactcatcctactctcggtcccagaggacccatacttggttcgcctcatacacccttgttcctgccgcatggcctggagcccgaggcgggtggaaccctgccaagtcgccttcaaccaatcctgttattagatcccagcggttcccacgcaccactgttaaccgtccccggacttggacccctgccctttcacttcgcccagagcctgatgacaacagaacgcctgtccggcagcggtcttcactggccactctccagaaccagatctgaacccctgccaccatctgccacagcccctccccctccaggaccgatgcagcccaggctcgagcaactcaaaacacacgttcaagtgatcaagcggtcggctaagccctctgaaaagccgcgacttcgccagatacctagcgcggaggatcttgagaccgacggcggaggcccaggtcaagtagtggacgatggcctcgagcacagggaactaggtcacggccagccagaggctagaggaccagcgcctctccagcagcacccccaggtgctactctgggagcagcagcgactggcgggtcgattgcctcgagggagcaccggtgacactgttctgttgcctctggctcaggggggacacaggccccttagcagagcccagagcagtccagccgctccagcctcattatctgctccagaacctgccagccaggccagagttctgtcaagctctgaaacccctgctcgaacgttaccctttaccaccggactcatctacgacagtgtgatgcttaaacatcagtgctcctgcggggataattcacgtcaccctgaacacgcaggacgtatccagagcatctggtcacgactgcaggagcggggattaaggtcacagtgcgagtgcctccgagggaggaaagcctctctagaagagctccagtctgtgcacagtgagcgccatgtcctgctttatgggactaatccactatccagactgaagctggataacggcaaattagcagggctcctggcgcagagaatgtttgtgatgctcccctgtggaggggtcggagtggatacagacaccatttggaacgagttgcattcgtctaatgctgctcgatgggcagctggttcggtgaccgacctggcctttaaggtggcaagtcgagaactgaaaaacggttttgccgtcgtgcgaccacctggacaccacgcggatcactccaccgccatgggcttttgcttcttcaattctgtggccatcgcttgcagacagctgcagcagcagagtaaggcctctaagatcctcatcgtggactgggatgtgcaccacggcaatggaacccaacaaacgttctaccaggatccttcagtgctttatatttcccttcacaggcacgacgacggaaatttttttcccggttccggggcagtggacgaggttggcgctgggagcggtgaaggctttaatgttaatgttgcgtgggctggcggattagatccgcctatgggggatcctgaatacctagcagcttttcgcatcgtcgttatgccaatcgctagggagttctccccggatttagtccttgttagcgccggattcgatgccgctgagggacacccagcacctttagggggatatcatgtctccgccaagtgcttcggatacatgacccagcagcttatgaatctggcaggcggagcggtggtactcgctctggaaggcggtcacgacctgacggctatatgtgacgcctccgaagcctgcgtggctgccctcctcggaaaccgggtcgatcccctcagtgaagagggctggaaacagaagcctaacctcaatgccattaggtcactggaggccgtcattcgggtgcattccaagtattggggttgtatgcaacgcctcgcctcttgcccggattcatgggtgccacgtgtgcccggagcagataaggaagaagtggaggccgtaaccgccctggcgtccctctctgtcggcattctggcagaggatcgcccatctgagcagctcgtggaggaagaggagcccatgaatttgtag

SEQ ID NO: 28939 - DNA, 819 bp, synthetic construct
  misc_feature 1..819: note = Description of Artificial Sequence: Synthetic coding sequence
  source 1..819: mol_type = other DNA
atggaggagccggaggaacccgctgatagcgggcagtcacttgtaccggtttacatttacagtcccgagtatgtatctatgtgcgattccttagcaaagatccccaagcgcgcaagcatggtccactccctgattgaagcttatgccctgcataagcagatgagaatagtcaagcctaaagtggctagtatggaggagatggctacattccacacagatgcatatcttcagcatctacagaaagtttcacaggaaggggacgacgaccaccctgattctattgaatatgggctggggtatgactgccctgcaacagagggcatctttgactatgccgcagctatcgggggagccactatcacagccgcacaatgccttatagacggcatgtgtaaagtggctatcaactggagcggtggttggcatcacgcgaagaaagacgaggctagtggattctgttatctaaatgacgcggtgttgggcattctgagactcagaagaaaatttgaacgtatcttatacgtggatctagatttgcatcacggcgatggggtcgaggacgcattttcatttactagcaaggtgatgacagtgagtctccataagttcagccccggattctttccaggaaagagcgacgtgtcagatgtgggcctggggaaggggaggtactactccgtgaatgttcccattcaggatggcattcaggacgaaaaatactaccagatttgtgagagtgtgcgcacttcgtgccccaagagtagacccgtggaagctgctgcagcggcatgcctacctcacctccattccttggtgtag

SEQ ID NO: 28940 - DNA, 1134 bp, synthetic construct
  misc_feature 1..1134: note = Description of Artificial Sequence: Synthetic coding sequence
  source 1..1134: mol_type = other DNA
atggaggagcccgaagaaccagcagacagcggtcagtcactggtgccagtatatatctactccccagaatacgtctccatgtgcgactcattggccaaaatcccgaaaagagctagcatggttcattccctcatagaggcctacgctcttcacaagcagatgagaatcgtgaagcctaaggtagccagcatggaagaaatggctaccttccacactgacgcatacttacagcacttacagaaggtgtcacaggagggagatgatgatcacccagattccattgagtacggcctgggatacgactgtcccgctacagaggggatatttgattacgctgcagccatcggtggcgctactatcaccgccgcacaatgcctaatagacggcatgtgcaaggttgccataaactggtccgggggatggcaccatgccaagaaggacgaggccagtggattctgctatctgaacgacgcagtcctggggatcttacggctgagaaggaaatttgaaaggatactttacgttgatctggacctgcaccacggcgacggtgtggaggatgcattttcctttacttcaaaagtcatgacagtgagtcttcacaagttctctcccggtttttttcctgggacaggcgacgtgtctgacgtgggactcggaaaaggtcggtactactccgtgaatgtgcccatccaggatgggattcaggacgagaaatattaccagatttgcgaaagtgttttaaaagaagtctatcaggcattcaaccccaaagcggtggtcctgcagttgggcgctgataccattgcaggcgacccaatgtgttcatttaacatgactcccgttggcataggaaagtgcctgaagtatatattacagtggcagctcgccactctaatcctggggggtggcggatacaatctagccaatactgcacgttgttggacttacttaacgggtgtgattctcggaaaaaccctgagtagtgagatccccgatcatgagttttttaccgcctatgggcctgactacgtgctggaaatcacaccctcatgtagacctgataggaacgagccccaccggatccagcagatcctgaactacatcaagggcaatttgaaacacgttgtctag

SEQ ID NO: 28941 - DNA, 861 bp, synthetic construct
  misc_feature 1..861: note = Description of Artificial Sequence: Synthetic coding sequence
  source 1..861: mol_type = other DNA
atggaggaaccggaggagcccgcagattctgggcagtctcttgtccctgtgtatatatattctccagaatatgtgtctatgtgtgactctcttgccaagataccaaaaagggcttcgatggtacacagtctgatcgaggcttatgctctgcataaacagatgagggatgaggccagcggattctgctaccttaacgatgccgtcctcggtatactgaggctgcgacgtaaatttgaacggattctatatgtcgatttggatcttcaccatggcgacggagtggaagatgctttttcatttacatccaaggtcatgacagtctccctgcataaattcagtccgggattttttccaggcactggcgacgtctcagatgtgggattgggaaaaggcaggtactactccgtgaacgtgccaattcaagacggaatccaagatgagaaatactatcagatctgcgagagcgtactgaaagaggtgtatcaagcctttaaccctaaagcagttgtgctgcagctgggagccgacacaattgctggcgaccccatgtgttcctttaatatgacccctgtgggaatcgggaagtgtctaaagtatatcctccagtggcagctcgcaacgctcattctcggtgggggaggctataacttagctaacactgcaagatgctggacatatctgaccggggttatccttggcaaaacgctctcctctgagattcccgaccacgaattttttacggcgtacgggccagattatgtgctggagattaccccttcctgtcgcccagatagaaacgagccccacagaattcagcagatcctaaactacattaagggcaatcttaagcacgttgtgtag

SEQ ID NO: 28942 - DNA, 549 bp, synthetic construct
  misc_feature 1..549: note = Description of Artificial Sequence: Synthetic coding sequence
  source 1..549: mol_type = other DNA
atgaccgtatcactgcacaaatttagccctggctttttccccggaactggcgacgtgtcggacgtgggactaggaaaaggcaggtattactccgttaacgtcccaatacaggatggtattcaggatgagaagtactatcagatatgtgagagcgttttgaaagaagtgtatcaagcattcaacccaaaggcagtggtcctccagctgggcgcagataccatcgccggtgatcctatgtgttcattcaacatgacccccgttggaatcgggaagtgccttaaatacattttacaatggcaattagccaccttgatcctgggcggaggaggatacaatctggcaaacaccgcacgatgttggacctacttgacgggcgtcatcctgggaaaaactctcagcagtgagattcccgatcacgagttcttcaccgcttacggcccagattacgtccttgagattaccccttcctgtcggcctgacaggaatgaacctcaccgcatccaacagatcttgaactacatcaagggcaacctgaagcatgtggtgtag

SEQ ID NO: 28943 - DNA, 441 bp, synthetic construct
  misc_feature 1..441: note = Description of Artificial Sequence: Synthetic coding sequence
  source 1..441: mol_type = other DNA
atggaggagcccgaagaaccagcagactctgggcagagcctggtgcctgtgtatatctactccccagaatacgtaagcatgtgtgactccctcgccaagattcccaaacgcgcaagcatggtgcacagcctgatcgaagcctacgcactgcacaaacagatgaggatcgtgaagcccaaggtcgcatccatggaagaaatggctacttttcacaccgacgcatacctgcagcatttacagaaggtctctcaggaaggagatgacgaccacccggacagtatcgagtacgggttgggctacgactgtccagccaccgaaggtatattcgactacgccgcagcgataggaggagccaccatcacagccgctcagtgcctcatcgacggcatgtgtaaggtggccattaactggtccggtggatggcatcacgccaaaaagtag

SEQ ID NO: 28944 - DNA, 477 bp, synthetic construct
  misc_feature 1..477: note = Description of Artificial Sequence: Synthetic coding sequence
  source 1..477: mol_type = other DNA
atggaggaacccgaggaaccggcagattcaggccagtctctcgtacccgtttacatctactctcccgagtacgtttccatgtgcgactccctggcaaaaatccccaaacgggctagcatggtccactcgctgatcgaggcctatgccctccacaaacagatgcgaatagtgaaacctaaagttgcctctatggaagaaatggctacattccacacagacgcgtacctccagcacctccagaaggtcagtcaggaaggtgacgacgaccatccggacagcattgagtacgggctcggatacgattgtccagccacggaaggcatcttcgattacgctgctgctatcggcggtgctaccattaccgcagctcagtgcttgatagacggaatgtgtaaggtcgctataaactggtcgggcggatggcaccacgccaaaaaggaaacatgtgtgtatgtagcactatacaaggccttttag

SEQ ID NO: 28945 - DNA, 420 bp, synthetic construct
  misc_feature 1..420: note = Description of Artificial Sequence: Synthetic coding sequence
  source 1..420: mol_type = other DNA
atggaggaacccgaggaaccagctgacagcggccagtcactggtacccgtttacatctattctccagagtatgtttctatgtgtgactccctggcaaaaatcccaaaacgggcaagcatggttcactctctcattgaggcctatgcgcttcataaacaaatgagggacgaggccagcggtttctgctatctcaacgatgcagtgttaggaattctgcgcctgcgcaggaaattcgaacggattctgtatgtggacttagatctccaccacggtgatggcacgggggacgtttcagacgtggggttaggtaagggccgttactactcggtaaatgttcccatacaggacgggatccaggacgaaaaatattaccagatatgcgagcggtacgagcctccagcccctaatcccggattatag

SEQ ID NO: 28946 - DNA, 771 bp, synthetic construct
  misc_feature 1..771: note = Description of Artificial Sequence: Synthetic coding sequence
  source 1..771: mol_type = other DNA
atggaagaacccgaggagcccgcagattcaggtcagagtctggtccctgtctacatttattctcctgagtatgtatcaatgtgtgacagtctggctaagattcccaagagggcctctatggttcatagccttatcgaagcttacgctcttcacaagcagatgcgcattgttaagccaaaggtggcaagcatggaggagatggccaccttccacacagacgcatatctccagcacctccaaaaagtgtcacaggaaggcgatgatgatcatcctgattccatcgagtatgggttgggttatgactgtccagcaacagagggcatttttgactacgctgccgcaattgggggagccacgatcacagcagctcagtgccttatcgatgggatgtgtaaggtggctatcaactggtctggaggttggcaccatgccaaaaaggacgaggcctccggtttctgctacctgaacgacgccgtcttgggaatcctccggctgagacgcaaattcgagagaattttgtatgtcgatttggaccttcatcacggtgatggggttgaggatgccttctcttttacatctaaagtcatgacagtgagcctgcataaattcagccccggtttcttcccaggaaccggcgatgtgagcgacgtgggactgggtaaaggcaggtactattctgtgaacgtgccaatccaagatgggattcaggatgaaaagtactatcagatctgcgagcggtacgaaccgccagcacccaaccctggtctgtag

SEQ ID NO: 28947 - DNA, 831 bp, synthetic construct
  misc_feature 1..831: note = Description of Artificial Sequence: Synthetic coding sequence
  source 1..831: mol_type = other DNA
atggccggacccgctgccttgtccgccgctgccgctgctgcgctcgcagccgctttacttttgctgcggagagaggatcctggccctggcgctggaccgtcaatggccgaaactgaagctctgtcgaaactgcgggaagacttcaggatgcagaataagtcagtgttcatccttggagcatccggtgaaactggacgcgttctgctgaaggagatcctggaacaaggccttttctcaaaagtcaccctgattggacgcagaaagttaactttcgacgaggaagcgtacaagaatgttaaccaagaggtagtcgactttgaaaagctggatgactacgctagtgccttccaaggacacgatgtaggcttttgctgccttgggacgaccaggggaaaagctggcgcagaggggttcgtgcgcgttgatagagattacgttctaaagagtgcagagctcgcaaaggccggtgggtgcaagcactttaacctgctgagctccaagggagctgataaatcgagtaattttctttaccttcaagttaaaggcgaggtggaggccaaggtggaggagctaaaatttgatcggtatagtgtctttcgcccaggcgttctgctatgtgaccgccaggaatcacgacccggagaatggctagtacgtaagtttttcggaagtctgccagattcatgggcgtccgggcactctgtgcctgtcgtgaccgtggtcagagccatgttgaataatgtggtcaggcctagggacaagcaaatggaactcctggagaataaggccattcatgacctaggcaaggcacatggcagcctgaaaccgtag

SEQ ID NO: 28948 - DNA, 729 bp, synthetic construct
  misc_feature 1..729: note = Description of Artificial Sequence: Synthetic coding sequence
  source 1..729: mol_type = other DNA
atggctgagaccgaagctctctccaagctgcgtgaagacttccgcatgcagaacaaaagtgtgtttattctgggcgctagtggggagactgggcgagtgctgctgaaagagatcttggagcagggtctcttctcgaaagttacccttatcggaaggcggaaactgaccttcgacgaggaagcttacaaaaacgtcaatcaggaagtcgtagactttgaaaagctggacgactacgcctccgccttccaaggacacgatgtcggcttctgctgcttaggcactacccgaggcaaggccggagctgaaggcttcgtgagagtcgatcgggattacgtgttgaaaagtgccgagctcgcaaaagctggcggttgtaaacactttaatctactttcatcaaaaggtgcagacaaatcctccaatttcctttacctccaggtgaagggcgaagtcgaggcaaaagtagaggaactaaagttcgataggtattccgtgtttagaccaggcgtgctgctgtgcgacagacaggagtcgagaccaggggagtggctcgtgaggaagttctttggctctctgcccgactcatgggcgagtggccattcggttccggtggtcacagttgttcgggcaatgcttaacaacgtggtccgaccccgtgacaagcagatggaactgctggagaataaagccattcacgacctgggaaaggcccatgggagtctgaaaccgtag

SEQ ID NO: 28949 - DNA, 729 bp, synthetic construct
  misc_feature 1..729: note = Description of Artificial Sequence: Synthetic coding sequence
  source 1..729: mol_type = other DNA
atggccgagactgaggcactgtcaaaattgcgggaagacttcagaatgcagaataaatccgtttttatacttggagcctctggcgagacaggccgagtgctgctgaaagaaatcctggagcagggtctttttagtaaagtgactctcatcggtcgtcgcaagcttacattcgacgaggaggcctacaaaaacgttaaccaggaggttgtggacttcgaaaaactcgatgactatgcctcagcctttcagggccacgacgtaggcttctgctgcctcggcaccacaagggggaaggctggagccgaggggttcgtccgggtagatcgcgactatgttctgaaaagtgccgagctagctaaggctggtggatgtaaacatttcaatttactgtcgagcaaaggagccgacaagagttccaacttcctgtatctccaggtgaaaggagaggtcgaagccaaagtggaagagctgaagtttgatcgttacagtgtgttccgcccaggagttctcctgtgcgataggcaggagtcaaggcccggagaatggctcgtgaggaaattctttggctcccttccggatagctgggccagcggccactctgtccccgtcgttactgttgtacgtgccatgctaaataatgttgtcaggccgcgagacaagcagatggagctgttggagaataaagctatccacgacctgggtaaggcgcatggtagcttgaagccatag

SEQ ID NO: 28950 - DNA, 729 bp, synthetic construct
  misc_feature 1..729: note = Description of Artificial Sequence: Synthetic coding sequence
  source 1..729: mol_type = other DNA
atggcagagaccgaagcattatctaagctgagagaggatttccgtatgcagaacaaatctgtgttcatcttgggggcaagcggcgagacaggcagggttctgcttaaggagattctcgaacagggtcttttttccaaggtcacccttattggccgacgcaagctgaccttcgacgaagaagcttataaaaacgtcaatcaagaggtcgttgattttgagaaattagatgactatgcctccgcttttcagggccacgacgtgggtttttgttgcctggggacaacacggggtaaggccggtgcggagggattcgtgcgtgtggacagagattacgtcctgaagtcagctgaactggccaaggccggtggatgcaaacactttaaccttctgagttctaagggggctgacaagtcctccaacttcctgtatcttcaggtgaagggggaagtagaagccaaggtcgaggaacttaaatttgaccggtacagtgtattcagacctggtgtccttctttgcgatcgccaagaaagtcggcctggcgaatggctggtaaggaagttttttgggagtctcccagactcctgggcgtccgggcactcagtcccagtggtcactgtcgtacgggcaatgttgaataacgtggttaggccaagagataagcagatggaactgttggaaaataaagctattcacgaccttgggaaggcccatggcagcctgaaaccatag

SEQ ID NO: 28951 - DNA, 402 bp, synthetic construct
  misc_feature 1..402: note = Description of Artificial Sequence: Synthetic coding sequence
  source 1..402: mol_type = other DNA
atggccgaaactgaggcattgtccaaactcagggaggattttaggatgcaaaataagtccgtgtttatcttgggcgcatctggggaaactggacgagtactgctgaaggaaatcctggaacaggggctgttcagcaaagtcactcttattggtcgcagaaaactgacctttgacgaggaagcctataagaacgtgaatcaggaagttgttgacttcgagaaactggacgactacgcctcagccttccaggggcatgacgtgggattttgttgtcttggtaccactcgcggaaaagctggagccgttcggaaggcgtatgccctctttcccttctgctggcctgttatttctaggattctgtttctcctgacactgtttctgtgcgcctgctgcaacgcgtag

SEQ ID NO: 28952 - DNA, 402 bp, synthetic construct
  misc_feature 1..402: note = Description of Artificial Sequence: Synthetic coding sequence
  source 1..402: mol_type = other DNA
atggcggagaccgaggctctgtccaagttgcgggaagatttcagaatgcagaataaatcagtcttcatcctgggtgccagtggggaaacagggagggtgctgctgaaagagatcctggaacaagggctgttttccaaagtaacactgatcggcagacgcaagctgactttcgatgaagaagcctataaaaatgtgaaccaagaggtggtggattttgagaagctggacgactacgccagcgctttccagggacacgatgttggcttttgctgcttgggtaccacccgaggcaaagccggagctgtgaggaaagcatacgcccttttccctttctgctggcctgtcatctcccggattctttttctcttaaccctttttctctgcgcctgctgtaatgcatag

SEQ ID NO: 28953 - DNA, 402 bp, synthetic construct
  misc_feature 1..402: note = Description of Artificial Sequence: Synthetic coding sequence
  source 1..402: mol_type = other DNA
atggccgaaaccgaggcgttgtctaaattgcgggaggatttcagaatgcagaataagtccgtgtttattctgggcgcttccggcgaaacgggcagggtgctgctgaaagaaattctggagcagggcctcttctcaaaagtaacgctgattgggagacggaagttaacttttgatgaagaagcctataagaatgttaatcaggaagttgttgacttcgaaaaacttgacgattacgcgtctgcctttcaaggccacgacgtgggtttttgctgtctgggcactaccagagggaaagcaggcgctgtccgaaaggcttatgctttgttccctttctgttggcccgtgatttcccgtatactttttctgttgaccctgttcttatgcgcctgttgtaatgcctag

SEQ ID NO: 28954 - DNA, 1080 bp, synthetic construct
  misc_feature 1..1080: note = Description of Artificial Sequence: Synthetic coding sequence
  source 1..1080: mol_type = other DNA
atggcggagcacggggcacacttcacagcagctagcgtggcggatgaccaaccctctatctttgaagtagtagcacaggactcacttatgacagcagtgcgtcctgccctccagcatgtggtgaaggtcctcgcagagagtaatccaacacactatgggttcctctggcgttggttcgatgagatcttcacattactggacctgcttctgcagcaacattatctgagtaggaccagtgcatctttcagcgagaacttttacggactcaagagaatagtcatgggtgatacccataagagccagagactcgcaagcgcaggtctgcccaagcagcagctatggaaatctatcatgttcctggtgctattgccctatttgaaagttaaactggaaaagctggtttcgtcactgcgtgaagaagatgagtacagcattcaccccccaagttctcggtggaaacgcttttaccgagcattcttggcagcgtacccctttgtcaatatggcatgggaggggtggtttcttgtgcagcagttgaggtacatcctggggaaggcccagcatcactcacctctactccggcttgccggagtgcagctcgggaggctgacagtccaggacattcaggcgctggagcacaagccagctaaagcttcaatgatgcagcaacctgcacggtccgtgagtgagaaaataaattctgccctgaagaaggcagtgggcggtgtcgctttatcgttgtccaccgggctcagtgtgggcgtgttcttcctccagtttttagactggtggtattcaagcgaaaatcaggaaacaatcaagtctttaaccgcactcccgacacccccaccccctgtccacctggattacaacagtgactctcctctcctccctaagatgaagactgtgtgcccactgtgcaggaagacacgcgtcaacgatacagtgctggctaccagtgggtacgtgttctgttacagatgcgtctttcattacgtgagaagtcatcaggcgtgtccaatcactgggtaccctactgaagtgcagcacttgatcaagttgtactccccagaaaactag

SEQ ID NO: 28955 - DNA, 1374 bp, synthetic construct
  misc_feature 1..1374: note = Description of Artificial Sequence: Synthetic coding sequence
  source 1..1374: mol_type = other DNA
atggtaagtaagctgacctccttgcaacaggagctgctctctgcgttgctatcttcgggagtgaccaaggaagtgctggttcaggccctggaggaactgcttccaagcccaaatttcggggtcaaactagagacgctaccattgagtccaggaagcggcgctgaacccgacaccaaacctgtgttccacaccttaactaatggacacgctaagggccgtctgtcaggcgatgagggatccgaggacggagacgactacgacactcctcccatcttgaaggagcttcaagccttaaatacagaggaagccgcagaacagcgggctgaggtggacaggatgttgtcagaggatccctggcgagctgccaaaatgattaagggatatatgcagcaacataatataccacagagggaggttgtggatgtgacgggcttgaatcagagccacttgtcccaacacctgaataaagggactccaatgaagacacagaagagagccgcactttatacctggtacgtacgcaaacaacgggagatcctgagacagttctcccaacaaagtcatggccctgggcagtccgacgacgcgtgctctgagcctactaataaaaagatgcgacgaaatcggttcaagtgggggcctgcctcacagcagattctttaccaagcctatgacaggcagaagaatccgtctaaggaagagagggaggccctcgtcgaagagtgtaatagagctgagtgccttcagcgcggagtgagcccttccaaggcccacggcctgggctctaacctggttactgaagtcagagtttacaattggttcgccaaccgacggaaagaagaagcattccggcagaaactggctatggacgcatacagttctaatcagacgcactcactgaatcccctgctcagtcacggtagcccccaccaccaacctagcagttcacctcctaacaagttatccggggtcagatactctcagcagggcaataatgaaataacttccagctcaacaatttctcatcacggtaatagcgcaatggtcacatctcaatctgtccttcagcaggtgagtccagcaagcctcgatcctggtcacaacctcctcagtcctgacgggaagatgataagcgtgagcggaggcggtctgccacctgtcagtacactaacaaatatacattccttgtcccaccacaacccacagcagtcccagaatctgatcatgactccactttcaggggttatggccatcgctcagatgagctccacttcccttgttatgccaacccaccatttactcagggctcagcaacaggggccatgcttccctcaccatcaccctctgggctcgtgtcacggcaaagctcagtag

SEQ ID NO: 28956 - DNA, 1338 bp, synthetic construct
  misc_feature 1..1338: note = Description of Artificial Sequence: Synthetic coding sequence
  source 1..1338: mol_type = other DNA
atgctctccgaggacccctggcgcgctgcaaagatgattaagggctacatgcagcagcataacattccgcagagggaagtcgtggacgtgacgggcctgaaccagtcccacctgtcccagcacttaaataagggaacacccatgaaaactcaaaaacgcgctgccctgtatacatggtacgtacgaaagcagcgcgagattcttcggcagtttaaccagaccgtgcaatcctccggcaacatgactgataagtcgagtcaggaccaactgttgtttttgtttcctgaattctctcagcagagccacggaccaggccagtcggatgatgcttgttcagagccgaccaacaagaaaatgcgcaggaatagatttaagtggggacctgcttcccagcagattctgtaccaagcctatgatcggcagaaaaacccgtccaaagaggagagggaagccctcgtggaagaatgtaatagggcagaatgtctccagcggggtgtctcaccctctaaggctcacggtctgggtagtaatctagtgactgaagtccgcgtctataactggttcgctaatcgcagaaaggaagaggccttccgccaaaagctggccatggacgcatacagctcgaatcaaactcatagtctcaatccgctgttaagtcacggtagcccacatcatcagccctcatcgtcccccccaaataaactgagtggggtgcgttactcccaacaggggaacaacgaaattactagttcttctaccatctctcaccacggcaatagtgccatggtgacgagtcagagcgtcctgcagcaggtgtctcctgcctcactggatcctggccataacctgctgtctcctgatggtaagatgattagcgtctctggaggaggtttaccaccagtatctactctcactaacatccatagtctgagtcaccacaacccacagcaaagccagaatttgataatgaccccactgtcaggagttatggcaatcgcccaaagtctcaacacctcccaagcccagtccgtgcctgtgattaactccgtggccggatccctcgcggctctccagcccgtgcaattttctcagcagctgcacagtccacaccagcaaccactgatgcagcagagccctggctcacatatggctcagcaaccttttatggcagcagttacgcagctccagaactcccatatgtacgcccataaacaggaacctccccagtatagtcatacctcaagattcccctccgccatggtagtaaccgacacctccagcatttctacattaaccaatatgtcgagcagcaaacagtgccctctgcaggcctggtag

SEQ ID NO: 28957 - DNA, 1278 bp, synthetic construct
  misc_feature 1..1278: note = Description of Artificial Sequence: Synthetic coding sequence
  source 1..1278: mol_type = other DNA
atggtgagtaaattaactagtcttcaacaagagttactgtccgcactcctgtcgtcaggagtgaccaaagaggtactagtccaggccctggaggagttgcttccgtcccctaacttcggggtgaagcttgaaactctcccactgtcccccggttccggcgcagaaccggatactaaacctgttttccacactctgacaaatggccacgccaagggcaggctttcaggcgatgaagggtccgaggatggcgacgattatgacaccccacccatcttaaaggagcttcaggcccttaataccgaagaggccgcagagcagagagctgaagttgacaggatgctgagcgaggatccttggagggcagccaaaatgatcaagggctacatgcagcagcacaacattccccagcgcgaagtagtggacgtcacagggctcaaccaaagtcatctcagccaacacctgaacaaagggacccccatgaagacgcaaaagagagccgcactttatacttggtacgttaggaagcaaagggagattttaagacaattcaaccagacagtgcaatcctccggcaatatgaccgataaatcgtctcaagatcagcttcttttcctattccccgagtttagccagcagtctcatggccctggccaaagcgatgatgcgtgttccgaaccaactaacaagaagatgcgtcgcaaccggttcaaatggggacctgcttcccaacagatactgtatcaagcctacgacaggcagaaaaaccctagtaaagaagagcgagaggctttagtagaagagtgcaatagggcagaatgcctccaaaggggtgtgtcgccctctaaggcccatgggcttggaagcaatttggtgactgaagtccgcgtctataattggttcgctaaccgccgtaaagaggaggccttccggcaaaaactggccatggatgcttacagctctaatcaaacccacagcctcaacccgctgctgtcccacggttctccccatcaccagccctcgtcaagccctcccaataaactcagtggtgtgcgctacagtcagcaggggaacaacgagatcacctcctccagcaccatttctcatcacggcaattcagccatggtaacatcccaatcagttctgcagcaggtgagccccgcttcactggacccgggacacaacctcctatcacctgatggtaagatggatttgtctctccggagaagattcgcccctagccaacacctcgacgagtacccccagcctcttccaccatag

SEQ ID NO: 28958 - DNA, 1596 bp, synthetic construct
  misc_feature 1..1596: note = Description of Artificial Sequence: Synthetic coding sequence
  source 1..1596: mol_type = other DNA
atggtgtcaaagctcacctccctgcagcaggaactcctcagcgcccttctgtcgagtggggtgactaaggaagttctggtgcaggccctggaggagctgctcccctcacccaatttcggggttaagctggagaccttgcccctttctcctggcagcggggctgagcctgacaccaaacccgtgttccacaccctgaccaatggccatgcgaaaggccgtctgagcggcgatgaggggagtgaggatggcgatgactacgacacccccccaatcctgaaggaacttcaggcccttaacaccgaggaggctgcggaacagcgggcagaggtagatagaatgctgtcggaagatccctggcgcgcagcgaagatgattaaaggatatatgcaacagcataatatcccgcagcgagaggtggtcgacgtgacaggtctgaaccaatcccacctatcccagcatctgaataagggcacaccaatgaaaacccagaaacgggcagcactctacacatggtatgtgaggaagcaacgcgagatccttcgacaatttagtcagcagtctcacggacctgggcagtccgatgacgcctgcagtgagcccactaacaaaaaaatgcgaagaaatcgcttcaaatggggtcccgcaagccaacaaatcttatatcaggcttacgaccgtcaaaagaacccgtcaaaggaggagcgggaggctctggtcgaggaatgtaaccgggcagagtgtctgcagcgaggcgtgtctccaagcaaagcacatggactaggatccaatctcgtcactgaagttcgcgtttataactggttcgcgaataggcgcaaggaggaagcattccggcagaagctggctatggatgcctatagcagtaaccaaactcattccctgaaccccctgctgtcacatggttccccgcaccatcagccgagtagcagccctcccaacaagctgtctggcgtgcggtactcacagcaggggaataacgagattacatcttcgagcaccatctcccaccacggcaacagtgctatggttacaagccagtctgttctccaacaggttagtcctgcctcacttgaccccggacataatctactttccccggatggaaagatgatttcagtgtccggcggtggactgccgcctgtgtccacactcacgaacattcattcattaagtcatcacaatccccagcagtcccagaacctcatcatgaccccgctgagtggcgttatggccatagcacagtcactgaataccagccaggcacagagcgtgccggttataaatagcgtagctgggtctctggcagcgcttcagcccgtgcagtttagccagcagctgcactctcctcaccagcaaccactgatgcaacaatccccgggatcccacatggcacagcagccattcatggctgcagtcactcagctgcagaactcgcacatgtatgcccataagcaggagccgcctcagtattctcatacatcccgctttccaagtgcaatggtggtgactgatactagcagcatctctacgttgacaaacatgtcgagctccaagcaatgtcccctccaggcctggtag

SEQ ID NO: 28959 - DNA, 843 bp, synthetic construct
  misc_feature 1..843: note = Description of Artificial Sequence: Synthetic coding sequence
  source 1..843: mol_type = other DNA
atgaagttccgcgctaagattgtggacggcgcttgccttaaccacttcacccggatctctaatatgatcgccaagctggccaaaacctgcactctccgtatcagcccagataaactgaattttatcttatgcgacaagctcgccaacggcggagtttccatgtggtgcgagttggagcaggaaaactttttcaacgagttccagatggaaggggttagcgccgagaataatgagatttaccttgagttaaccagtgagaatctgagcagagcattaaaaacagcacagaacgcgagggcactcaagattaagctaactaataagcattttccatgtctgaccgtgagcgtggagctactcagcatgtcctccagctccagaatcgtaacgcacgacattccaattaaagttataccacgcaaactctggaaggatctacaggaacctgtggtgccagatccagatgtctcaatctacctgccagtactgaaaaccatgaaatccgtcgttgagaagatgaagaatatttccaatcacttggttatcgaagcaaacctcgacggggagctgaacctgaagattgagacggaactggtgtgtgtgacaacccactttaaggacctcggcaatccaccgcttgcctcagaaagtacacatgaggaccgaaacgtggagcacatggccgaagttcacatcgatattcgcaaactgctccagttcctggcagggcaacaagttaatcccacgaaggctctgtgcaatatagttaataataagatggtccattttgacctccttcacgaagacgttagtttacagtattttatcccagccctttcatag

SEQ ID NO: 28960 - DNA, 780 bp, synthetic construct
  misc_feature 1..780: note = Description of Artificial Sequence: Synthetic coding sequence
  source 1..780: mol_type = other DNA
atgatcgctaagttggcaaaaacctgcaccttgcgcatctcaccggacaagctgaattttatcctctgtgacaaactcgcgaatggaggagtgtctatgtggtgtgagcttgagcaggagaactttttcaatgaatttcagatggaaggcgttagcgcagagaataatgagatctaccttgaattaaccagcgagaatctgtctagagctctgaaaacagcccagaacgctagggctttgaagattaaactcacgaacaaacacttcccgtgtttaactgtgtcagtggaactgctgtctatgagtagctcgagccgcattgtcacccacgacatccctattaaagttatccctcgaaaactctggaaagatcttcaagagccagtagtccctgatccagacgttagcatttacctgcctgtgctgaagactatgaagagcgtcgtggaaaagatgaagaacatctccaatcacttggtcattgaagcaaatttggatggcgagctgaacctgaagatcgagactgagctcgtgtgcgtaaccacacatttcaaggatctcggtaatccaccactggctagcgagtcaacacatgaagatcggaacgtagagcacatggccgaggtgcacatagatattcgcaaattgttgcagttcttagccggacagcaggttaatcccacaaaagcactctgtaatattgtcaataacaaaatggttcatttcgacttactgcacgaagatgtatcccttcaatactttatccctgccctctcgtag

SEQ ID NO: 28961 - DNA, 843 bp, synthetic construct
  misc_feature 1..843: note = Description of Artificial Sequence: Synthetic coding sequence
  source 1..843: mol_type = other DNA
atgaaatttcgggcaaagatcgttgatggggcatgcctgaatcactttacacgcataagtaatatgattgccaagctggccaagacatgcaccctaaggatctctccagataaactcaatttcattttgtgcgataagctggctaatggaggggtgagcatgtggtgtgaattagaacaggagaatttttttaacgagttccagatggagggcgtgtcagccgagaacaacgagatctacttggagctcacctccgaaaatctgagcagggccctgaagaccgcccagaatgcacgggctctcaagatcaaactaacaaataaacattttccgtgtctgacagtgagcgtcgaattgctgagcatgtcctcgagttcacggatagtgacgcacgatattcctatcaaggtgattccgagaaaactgtggaaagatttgcaggagcctgtggtgcctgatcccgacgtgtcaatttacttgccggtgttaaaaaccatgaagtcggttgtagagaagatgaaaaatatctccaatcaccttgtgattgaagcaaacctggacggagagctcaacttaaagattgaaacggagctggtttgcgtgacgacacactttaaggatctcgggaacccaccacttgccagtgaatccacccatgaggaccgaaacgtagaacacatggccgaggtgcatattgatatacggaaattacttcaattcctggccggtcagcaggtaaatcctacgaaggctttgtgtaatatcgtaaacaacaaaatggtccattttgatttacttcatgaagacgtgagcctacagtatttcatacccgcactgagctag

SEQ ID NO: 28962 - DNA, 780 bp, synthetic construct
  misc_feature 1..780: note = Description of Artificial Sequence: Synthetic coding sequence
  source 1..780: mol_type = other DNA
atgatcgctaagctggctaaaacatgtacactgcggattagccctgacaagctgaacttcatcttgtgtgacaaactggcaaatgggggtgtcagtatgtggtgcgaattggagcaggagaatttctttaacgaatttcagatggaaggtgtctctgctgaaaataatgagatatacctcgagctgactagcgaaaacctgtcccgagccctgaagaccgctcaaaatgcacgggctttgaaaatcaaattgactaacaagcattttccctgccttaccgttagtgtggagctgctttcgatgtcctcatcctcaaggatcgtaacgcacgatattcctattaaggtaataccccgaaagctctggaaagatctccaggagccagtcgtaccggaccccgacgtctccatctacctgcctgtgcttaagaccatgaaatccgtcgtcgagaaaatgaagaacatctctaaccacctcgtgatcgaggccaacctcgatggcgaactgaatctgaaaattgagacggaactggtatgcgttacgacccatttcaaagaccttggcaatccccctctggccagcgagagtacgcacgaggacagaaacgtcgagcacatggcggaggtccacattgatattcgcaagctcctccaattcctggcaggccagcaagtgaatccaactaaagctctctgcaatatagtgaacaacaagatggtgcactttgacctcctacacgaggacgtgtccctacaatattttatccctgctctgtcctag

SEQ ID NO: 28963 - DNA, 2130 bp, synthetic construct
  misc_feature 1..2130: note = Description of Artificial Sequence: Synthetic coding sequence
  source 1..2130: mol_type = other DNA
atgtcattccctaaagctccccttaagcgctttaacgacccgtctggctgtgctccatctcctggcgcttatgatgttaaaacactggaagtcctcaaggggcctgtgagcttccagaagtcccagagatttaagcagcagaaagaatctaagcagaatttaaacgttgacaaagataccacgctgcccgcatccgctcgtaaggtcaaatcctccgaatcaaaaatccgagtgcttctgcaggagagaggggcacaggaccggaggatccaagatctcgagacggaactcgaaaagatggaagcgagactgaatgcggctctgcgcgagaagacaagtctgagcgccaataatgcgactctagaaaaacaactgatagagctgacacggaccaatgagctgctcaaatcaaagttcagcgagaatggcaatcagaagaatctccgcattctgagcctggagctgatgaaactgcgtaataagagggaaaccaaaatgcgaggaatgatggccaaacaagagggaatggagatgaagcttcaggtcacccagagatcacttgaagaatcccaaggtaaaatcgcccagctggagggcaaactcgtgagtatcgaaaaagagaaaatagacgagaaaagcgaaacagagaaactgctggaatacatcgaggagatctcgtgcgcctcagaccaggttgagaagtacaagctggacatcgctcagctggaagaaaatctgaaggagaaaaacgacgaaatcttatcactcaaacaatccctcgaggaaaatatcgtcatactgtctaagcaggtggaggatttgaacgtgaaatgccagctgctggagaaagaaaaagaggaccatgtgaatagaaaccgcgagcacaatgaaaacttgaacgccgagatgcagaacctgaagcagaagtttatcctcgagcagcaggagagggagaagctgcaacagaaagagctgcagatcgatagtctactgcagcaggagaaggaactgagttcgagtctgcaccagaagttatgttcgttccaggaggagatggtcaaagaaaaaaatttattcgaagaagagcttaagcagacactcgacgagctcgacaaattgcagcagaaggaagagcaggcagaacgactggttaaacagctcgaggaggaagccaaatcccgcgcagaggaattgaaactgctggaggagaaactcaagggcaaggaggctgaactagaaaaatcctctgctgcacatacccaggctacgttgctgttacaagagaagtatgatagcatggtgcaaagccttgaagacgtaacagcccagttcgaatcttataaagcactgactgcctccgagatcgaggatctcaagctcgagaattcctcactgcaagaaaaagctgccaaagcaggtaaaaacgcggaggacgttcagcaccaaatcctggcaacggaatccagcaaccaggagtatgtgagaatgctccttgatctccagacaaaatcagctctgaaagaaacagagatcaaggaaattaccgtgagttttctgcaaaagatcaccgatctgcagaaccaacttaagcagcaggaggaggacttcaggaagcaactggaggatgaagaaggtagaaaggctgagaaggagaataccactgcggaactcaccgaggaaatcaacaaatggcgtctcctctacgaggagctttataacaaaaccaagcccttccaacttcagctcgatgcctttgaagtcgagaagcaggcgttacttaatgagcacggagcggcacaggaacagctcaacaaaatccgcgattcttacgcaaaactgctcgggcaccagaacttgaagcagaaaattaaacatgttgtcaagctgaaagacgaaaattcacaactgaaaagtgaagtcagtaagttaagatgccaattagcgaagaagaagcaatctgagacgaagttacaagaggaacttaacaaagtgcttggaatcaagcactttgatccttctaaagcttttcaccacgagtcaaaagagaactttgctctcaagacaccactaaaagagggcaacactaactgttatcgggctcctatggagtgtcaagaatcctggaagtag

SEQ ID NO: 28964 - DNA, 2175 bp, synthetic construct
  misc_feature 1..2175: note = Description of Artificial Sequence: Synthetic coding sequence
  source 1..2175: mol_type = other DNA
atgtcctttccaaaggctccactgaagcgcttcaacgacccatctgggtgcgcaccctcaccaggcgcttacgacgtaaaaacactggaggtactcaagggacctgtgtctttccaaaagagtcagagattcaagcaacagaaagagtcaaagcagaacttgaacgttgataaggacaccacactccccgcatccgcaagaaaggttaaatccagcgaatctaaggagtctcaaaagaatgataaagatctcaaaattctggaaaaggagattcgtgtcctgctgcaggagagaggcgctcaggatcgtcgtattcaggacctggaaactgagctagagaaaatggaagccagactgaacgccgcactaagggagaagaccagcctgtccgcaaacaatgcaaccctcgagaaacagctcattgagctgacccgcaccaatgagctgttgaagagtaaattttcagaaaatggcaatcaaaaaaacctgagaattttgagtctcgagctaatgaaacttcgaaacaagcgagagaccaagatgcgaggcatgatggctaaacaagaagggatggaaatgaaactgcaagttacccaacgctccctggaagaatcgcaagggaagatcgcccaattagaaggaaagttggtttcaattgaaaaagaaaaaatcgacgagaaatcagaaacggaaaaactcctcgaatacatagaggaaatcagctgtgcgagtgaccaagtcgagaaatataagctcgatatcgcccagctggaagagaatctgaaagaaaaaaatgatgagattctcagccttaagcagtctcttgaggagaatatcgtgatcctttccaagcaggtcgaagatctcaacgttaagtgccagctgttggagaaagaaaaagaagaccatgttaaccggaacagggagcataacgagaacttgaacgcggagatgcagaacctcaaacagaagttcatcctcgagcagcaggagcgagagaaactgcaacagaaggagcttcagatcgattctctcctccagcaggagaaagagctctcctcctccctccatcagaaactgtgttccttccaggaagaaatggtgaaggagaagaacctctttgaagaagagctgaagcagaccctagacgaactagataagctgcagcagaaggaagaacaggccgaacgcctcgttaagcagctggaagaagaggccaaatcccgcgctgaagagcttaagttactagaggagaagctgaagggaaaagaggcagaattggagaagagtagtgccgctcatacacaggccaccctgcttctccaggagaagtatgactcgatggtgcagagtctcgaagatgtcacagcccaattcgaatcttataaggccctcacagcatccgaaattgaagatctaaagttggaaaattctagcctccaagagaaggcggctaaagccggtaagaacgcagaggacgtgcaacatcaaatccttgcgacagaatccagtaaccaagagtacgtgaggatgctgctcgatcttcagaccaaatcagcactgaaggaaaccgagattaaagagataacagtgtcttttctgcagaagattaccgacctccagaatcagctcaagcagcaggaggaggactttagaaagcaactcgaagatgaagagggcaggaaggccgaaaaggaaaacacgaccgctgaactgaccgaggagatcaataaatggcggttactgtacgaggagctatataataagaccaagcctttccagctgcaactggatgcatttgaagttgagaaacaggctctgctgaatgagcacggggctgcgcaggagcaactgaacaagatcagggactcttatgccaaactcctcgggcatcagaacttgaagcagaagattaaacacgtcgtcaaactgaaggatgagaactcccaactgaaatccgaggtgagcaagctgcggtgccagctggctaaaaaaaagcaatccgaaaccaagctgcaggaggagctcaacaaggtactggggattaaacactttgatccttctaaggcattccatcatgaatctaaagagaacttcgccctgaagactccactgaaggaagggaacaccaattgttatcgggcacctatggagtgccaagaatcatggaagtag

SEQ ID NO: 28965 - DNA, 2178 bp, synthetic construct
  misc_feature 1..2178: note = Description of Artificial Sequence: Synthetic coding sequence
  source 1..2178: mol_type = other DNA
atgtctttccccaaggccccactgaaaagattcaatgatccctctgggtgtgctccttctccgggtgcctacgatgtaaagaccctggaggtcttgaaaggtcctgtctctttccaaaagtctcagcgttttaaacaacaaaaagagagtaaacagaacctcaacgttgataaggacacaacactgcctgcctctgcccgtaaagtgaaatcttctgaatcaaagaaggaaagccagaagaacgacaaagacttgaagattctggagaaggaaattcgcgtgctgctacaggaacggggagcccaagatagaagaattcaggacctggaaacagagctggagaaaatggaagctaggttgaatgctgcactgcgggagaagaccagtctgtcggctaacaatgccacgttggaaaagcagctgatagagctcacacgcacaaacgagcttctcaaatctaagttttcagaaaacggaaaccagaagaacttaagaattctgtcccttgagttgatgaaactgaggaacaaaagagaaaccaaaatgcggggtatgatggccaagcaggaggggatggagatgaaactccaggtgacacaacgatctttagaggagtctcagggtaagattgcccagctcgagggtaaactcgtgagcattgagaaggagaaaatagacgagaagagcgagactgaaaagctgctcgagtacattgaggagataagttgtgcatccgaccaggtagaaaaatacaaacttgacatcgcccagctggaggagaatctgaaagagaagaatgacgagattctgtccctgaaacagagccttgaagagaacattgtcatcttatccaagcaggtcgaggatctgaacgtgaaatgccagctccttgagaaggagaaagaggaccatgtcaaccgtaatagggagcataatgaaaacctcaacgctgaaatgcagaatcttaagcagaaattcatcctagaacagcaggaacgggaaaaacttcaacagaaggagctgcagatcgatagtctgctgcaacaggagaaagagcttagcagcagtctccaccagaagttgtgtagttttcaagaagagatggtcaaggagaagaatctgtttgaagaggaactgaaacagacgctcgatgagttggacaaactacagcaaaaggaggaacaggccgagagacttgtaaagcagctggaagaagaggcaaaaagtagagcggaggaactcaaacttctggaagagaaattgaaaggtaaagaggccgagctggagaaatcgtccgccgctcatacacaggccacactgctcttgcaagagaagtacgattccatggtacagtcacttgaagacgtcaccgcacagtttgagtcttacaaagccctcacagcctccgagatagaggatctgaagctggagaattcttccttgcaggagaaagcagcgaaggcgggtaaaaatgcggaagacgttcagcatcaaattcttgccacggagagctctaaccaggagtacgttaggatgctactggacctacagactaagagtgcactgaaagagactgagatcaaggagattaccgtgagtttcctccagaagattactgacttacaaaaccagttaaagcagcaagaagaagactttcgcaagcaactggaggatgaggaaggccgaaaggctgaaaaagagaatactaccgccgagttaactgaggagatcaacaaatggcggctgctgtatgaagaactttacaacaaaaccaagccttttcagctgcagctagatgccttcgaagtggaaaagcaggcactcctgaacgaacacggcgcagcgcaggagcagttgaacaagatcagagatagttatgctaaactgttaggccaccagaacctgaagcagaagatcaagcacgtcgtgaagcttaaggacgaaaatagccagctcaagtctgaggtcagcaagctccgatgtcagctagcaaagaaaaagcagagcgagacaaaattgcaagaggaattaaacaaggtactgggtatcaagcacttcgacccatcaaaagcatttcatcacgaatccaaggaaaattttgcactgaaaaccccactaaaggaggggaacacaaattgctaccgagcacccatggagtgccaggagtcctggaagtag

SEQ ID NO: 28966 - DNA, 2106 bp, synthetic construct
  misc_feature 1..2106: note = Description of Artificial Sequence: Synthetic coding sequence
  source 1..2106: mol_type = other DNA
atgtcgtttcccaaagcgccactgaagaggtttaacgatccaagcggctgcgcaccaagccccggtgcatatgatgttaaaacgttggaggtgctgaaaggaccggttagtttccagaaaagtcagcggttcaagcagcaaaaagagagcaagcaaaatttaaacgtcgataaagatacaactctgcccgctagcgccaggaaggtaaagagctccgagtcaaagaaggaatcacagaagaacgataaagaccttaagatcctggaaaaggagatcagagtactgctgcaggaacggggagctcaagatagacggatccaagatctcgagaccgagctggaaaaacagttgattgaactgacccgcaccaatgagctgctgaaatccaagttcagcgaaaacggaaaccagaagaatttgcggattctgtcccttgaacttatgaaactgcgcaacaaacgggagacaaagatgcgcggaatgatggccaagcaagaggggatggagatgaagctgcaggttacgcagaggtccctggaagagtcccagggtaaaatagcgcagttggaagggaaattagtaagcatcgaaaaagagaagatcgacgagaagtccgaaactgagaagcttctagaatacatcgaggaaatttcgtgtgcctcagaccaggtggagaaatataaactggacattgctcaactggaagagaacctgaaagaaaaaaacgacgaaattctctcattgaaacagagtctcgaagagaacattgtaatactgagtaagcaggtagaggacttgaacgttaaatgccagcttctcgaaaaagaaaaagaggatcatgtcaaccgcaacagggaacataacgaaaatctaaatgcagagatgcagaatctaaagcagaagtttattctcgaacagcaggaacgggagaaactccagcagaaagagcttcagatcgactccttgctccagcaggagaaagagctctcttcctctttgcaccaaaaactgtgctccttccaggaagaaatggtgaaagagaaaaacctgtttgaggaggagttgaagcagactttggacgagttagacaagctccagcaaaaggaggaacaggccgagaggctcgtgaagcagctggaagaagaagcaaaatccagggcagaagagctgaaactcctcgaggagaaactcaagggtaaggaggcagagttagagaagtccagcgccgctcacactcaggcgaccttgctgctacaggagaagtatgacagtatggtccaatctctggaagacgtgacggcccagttcgaatcatacaaagctctcacagcatccgagattgaggatttgaagctggaaaattcttcacttcaggagaaggctgctaaagccggaaagaacgccgaagatgtccagcaccaaatcctggctacagagtctagcaaccaggaatatgtacgcatgctcttggatctgcagaccaagtccgccctgaaggagaccgaaattaaggaaattaccgtgtcattcctccagaagatcaccgatctccagaatcagctgaaacaacaagaggaggatttcaggaaacagctggaggatgaggaaggcagaaaagctgagaaggagaataccacagccgaattgacagaagagatcaataagtggaggctcctttatgaggagctctataataaaacgaagccgttccagctccaactggatgccttcgaggtggaaaagcaagccctcctcaacgaacacggagccgctcaagagcagctgaataagatacgtgactcttatgctaagctgttgggccaccagaatttaaagcagaagattaagcatgtggtgaagttgaaagacgagaacagccaactaaaatcagaggtgtctaagttaagatgccagcttgcaaagaaaaagcagtccgaaactaaactccaggaggaattaaataaggtcctcggcattaagcattttgacccctccaaagctttccaccatgaatcaaaagagaactttgcattaaagacaccacttaaggaggggaatacaaactgctatagagcgcctatggagtgtcaagaaagttggaaatag

SEQ ID NO: 28967 - DNA, 1917 bp, synthetic construct
  misc_feature 1..1917: note = Description of Artificial Sequence: Synthetic coding sequence
  source 1..1917: mol_type = other DNA
atgacactgttgatcagagtgctgcttcaggagcggggagctcaggatcggcgaatccaagatctggagacagagctggagaagatggaagcacgcctgaatgctgctttgagagagaaaaccagcttgagtgctaacaacgccactctggagaagcagctgatcgagctaaccaggactaacgagctcctgaagtcaaagttctcagagaacgggaatcagaagaacctgagaatcctatccctggagctgatgaagctcaggaataagcgcgagactaaaatgcgcggaatgatggcaaagcaagagggaatggagatgaagctgcaggtcacccaacgctctctggaggagtcacagggcaagattgcgcagctggaaggaaagctggttagcattgaaaaggaaaaaattgacgagaaaagtgaaaccgaaaaactactggagtacattgaagagatttcatgtgccagtgaccaggttgagaaatataagctagacattgctcagctggaggagaacctcaaagaaaagaacgatgaaatcctttcattgaagcaaagccttgaagagaatatcgtgatcttgagcaagcaggttgaagacttgaacgtgaagtgtcagctgctcgagaaggagaaagaggaccatgtgaacaggaatcgtgagcataacgaaaatctgaacgccgaaatgcaaaacctgaagcagaagttcattctggaacagcaggaacgcgaaaaactgcagcagaaagagctgcagatcgattcgcttcttcagcaggagaaggagctgtcgagctcactccaccagaaactgtgctccttccaggaggaaatggtcaaggagaagaaccttttcgaagaggagttaaagcaaacgctggatgagttggacaaattgcagcagaaggaggaacaggctgagcggttggttaagcagctggaagaagaggctaaatcgcgggctgaggagctgaaactgctcgaggagaagctgaaagggaaagaggctgagctcgagaaatcttctgccgctcatacacaggccaccctactgctccaagaaaaatacgacagtatggtgcagagtctcgaggacgtaaccgcccagttcgagtcatacaaggcgcttacagcgagcgagatcgaagaccttaaactggagaacagtagcctccaggagaaggctgcaaaagccggtaaaaacgccgaggacgttcagcaccagattttggcgaccgaaagttcaaatcaggagtacgttcgcatgctgttggatctccaaactaagagcgccctgaaagaaactgagattaaagagattacagtctcctttctgcagaagataaccgacctacagaaccagctcaaacagcaggaggaagatttccgaaaacagctggaagacgaagaaggaaggaaagccgagaaggaaaacacaactgcagagttgacagaagagataaataaatggcgcctactctacgaagaactttacaacaagactaaaccgtttcagttgcaacttgatgccttcgaagtggaaaagcaggctctgctgaatgaacacggcgctgcacaggagcagttgaacaagatccgggatagctatgccaagctgctcggccatcagaacctgaagcagaagataaaacatgtcgtgaagctgaaagacgagaatagccaactgaagagcgaggtgtctaaactcagatgccagctagcaaaaaagaaacagagcgagactaaactccaggaggagctgaataaggtcctcggaattaagcactttgacccgtctaaagccttccatcatgaatccaaggagaattttgccctgaaaactcctctgaaggaaggcaataccaattgctaccgggcacccatggagtgccaggagagttggaagtag

SEQ ID NO: 28968 - DNA, 996 bp, synthetic construct
  misc_feature 1..996: note = Description of Artificial Sequence: Synthetic coding sequence
  source 1..996: mol_type = other DNA
atgagttttcccaaggcgcctctaaagcgttttaacgatccctccggttgcgccccaagtcccggagcttacgatgtcaaaaccctggaagttctcaaaggtcccgtatcatttcagaagagtcagaggttcaagcagcagaaagaatccaaacagaacctgaacgttgataaagatacgactttacccgcatctgcaaggaaagtgaagtctagcgaaagcaaaataagagtgctgcttcaagaacgaggggcacaagacaggagaatccaagacctggagaccgaattggagaaaatggaagctcgcctcaatgcagccctgcgtgagaagacctcactcagcgccaataatgccaccctggagaaacagctcatcgagctgacaaggaccaatgagttactgaagtcaaaattcagcgagaacggtaatcaaaaaaacctgagaatcttatcactggagctcatgaagctgagaaataagagagagaccaagatgagaggcatgatggctaagcaggaggggatggaaatgaaacttcaagtcacgcagagaagcctcgaggagagtcaggggaagattgcgcagctcgagggtaaactggtgagtatagaaaaggagaaaatagatgaaaaaagcgaaaccgagaagctcctggagtacattgaagaaatttcatgtgcttccgatcaggttgagaaatataagctggatattgcccagctggaagagaatttaaaagagaaaaacgacgagatcctgagcctgaagcaaagtctcgaggagaacatagtcatactgagcaagcaggtggaagaccttaacgtcaagtgccagctcctggaaaaggagaaggaggatcacgttaataggaaccgtgagcacaatgaaaacctgaatgcggaaatgcagaatttgaaacagaagtttatcctggagcagcaggagagggaaaaactccagcagaagaagaaacaaatgcgtcgcaaaaaatag

SEQ ID NO: 28969 - DNA, 537 bp, synthetic construct
  misc_feature 1..537: note = Description of Artificial Sequence: Synthetic coding sequence
  source 1..537: mol_type = other DNA
atgcacgtgaacggcaaggtggcattggtaactggtgcggctcagggaatagggcgtgcttttgcagaggcacttctcttgaagggcgctaaggtcgcgctcgttgactggaacttagaagccggtgtacagtgcaaggccgctctcgacgaacaattcgagcctcagaaaactctcttcattcaatgtgacgtcgccgaccagcaacagctgagagatacatttcgcaaggtcgtagatcacttcgggcgtctcgacattctagtgaacaatgccggagtcaataacgaaaaaaactgggaaaagacactccaaataaacctcgtttcagtgatttccggtacctatttggggttagattacatgagcaagcagaatggaggagaaggcggtatcatcatcaacatgtctagtctggctggtctgatgccagttgcacaacagcccgtgtactgcgccagcaagcatggcattgtgggctttactcggtccgcagcaccaaccatcgactgccagtggatagacaacacccattag

SEQ ID NO: 28970 - DNA, 801 bp, synthetic construct
  misc_feature 1..801: note = Description of Artificial Sequence: Synthetic coding sequence
  source 1..801: mol_type = other DNA
atgcacgtgaacggaaaagtcgccctcgtgacgggggctgcgcagggcattggtagggcctttgcggaggccctcctcctcaagggtgccaaagtagccttagtcgattggaacttggaggctggggttcaatgcaaggccgctctcgatgaacagtttgagccccagaagaccctcttcattcagtgcgacgtcgctgatcaacagcagctgcgcgacacctttagaaaagtcgtggaccacttcggcagacttgatatactggtaaataacgccggagtcaataacgaaaaaaattgggagaaaaccctgcagatcaacctcgtgtctgtgattagtgggacctatttgggactggattatatgtcaaaacagaacggcggagaaggtggtatcattattaacatgagtagcctggctggtcttatgccagtcgctcagcagcccgtttattgtgcctcaaaacatggaattgtgggctttactcgttctgccgcattggctgcaaacttgatgaactctggtgtacgtcttaatgccatatgtcctggctttgtaaacaccgctattttagagagcattgaaaaggaggaaaacatggggcagtatatcgaatataaggaccatattaaggacatgataaaatactatggaatcctggaccctccgttgattgcaaatgggctgataaccctgatcgaggatgacgctctgaacggagctatcatgaaaatcactacaagcaaaggaatccactttcaggactacgatactacgcctttccaggctaagacccagtag

SEQ ID NO: 28971 - DNA, 438 bp, synthetic construct
  misc_feature 1..438: note = Description of Artificial Sequence: Synthetic coding sequence
  source 1..438: mol_type = other DNA
atgagtaagcagaatggcggtgagggcggaatcataattaatatgtcctccttggccggactgatgcccgtcgctcaacaaccagtgtactgtgcctctaagcatggcatcgtcgggtttaccagaagcgcggcacttgccgcaaacctaatgaatagcggagtgcgcctgaacgcgatctgtcctggctttgtaaatacagcgatcctcgagtctatcgagaaggaagaaaacatgggtcagtatatcgagtacaaagaccacataaaggatatgattaagtactacggtatactcgatccaccgctcatcgccaatggactcatcactcttatcgaggatgatgctctgaacggcgcaattatgaagattactacaagtaaaggcatccatttccaggactacgacacaaccccatttcaggccaaaacccaatag

SEQ ID NO: 28972 - DNA, 438 bp, synthetic construct
  misc_feature 1..438: note = Description of Artificial Sequence: Synthetic coding sequence
  source 1..438: mol_type = other DNA
atgagtaagcagaacggcggagaaggcggaattattatcaacatgtcatctctggcaggcctgatgcctgtggcccaacagcccgtatactgcgctagcaagcatgggatagtgggatttacccgttcggccgctctggcagccaacctgatgaacagcggtgtgcggctgaatgctatctgcccgggatttgtcaatacggccatactcgagtcaattgaaaaggaggaaaacatgggtcagtatatcgagtataaggatcacattaaggacatgattaaatactacggaatactggatccgccacttattgctaacggcttgatcacactgattgaagatgatgcacttaacggcgctattatgaagatcaccaccagtaagggaattcactttcaggattatgatacaactccgttccaggctaagactcagtag

SEQ ID NO: 28973 - DNA, 432 bp, synthetic construct
  misc_feature 1..432: note = Description of Artificial Sequence: Synthetic coding sequence
  source 1..432: mol_type = other DNA
atgcacgtgaatggtaaggtcgctttggttaccggtgctgcccagggcataggtcgcgctttcgccgaagccttgcttctgaaaggcgctaaggtcgctcttgtcgactggaatctggaggctggagtgcagtgcaaggccgctctagacgagcagttcgagcctcagaagacactgtttatccagtgcgatgtggccgaccaacagcagctgcgggacacctttaggaaagtagtagaccattttggcaggcttgacatcctcgttaacaacgctggcgtgaacaacgagaaaaactgggagaaaacattgcagatcaatctggtttcagtaatttccgggacttatctgggccttgattacatgagtaaacaaaatggaggagaagggggtatcatcattaatatgtcatctctggcagcccaccattag

SEQ ID NO: 28974 - DNA, 2202 bp, synthetic construct
  misc_feature 1..2202: note = Description of Artificial Sequence: Synthetic coding sequence
  source 1..2202: mol_type = other DNA
atgactttcccagaggcggatatactgttgaagtcgggtgagtgcgccggacagaccatgctggatacaatggaggctccaggacattctcggcaactgctgctgcagctgaacaaccagagaactaaaggcttcctgtgtgatgtgattattgttgttcaaaatgccctgttcagggcacacaagaacgtgctggccgcatcatctgcatatctgaaaagtttagttgtccacgataacctgctgaatctggaccatgacatggtgtctcctgctgtgtttagactggttctcgatttcatttacacaggacggttggccgatggcgcagaggccgcagcggctgctgccgtggccccaggagccgagccttctctgggggcagttctggccgctgcctcataccttcagatcccagatctagtggccctgtgtaagaaacggctgaagcgtcacggaaagtactgtcacctgcgaggaggcggaggcggaggtggcggatatgcaccatacggccgaccaggtcgaggtttgagggctgccactcccgtgatccaagcatgctatcctagcccagttggacctcctccccctccagctgccgaacccccttctgggccagaggcagcagttaatacccactgcgcagaactgtacgcctcaggccctggacccgctgcagctctttgcgccagcgagcggagatgttcccctctctgtggactggacctctcaaagaaatctccccctggatccgccgctcccgaacgaccactggcagagcgagaacttcctcccagacctgatagtcccccatcagctgggcctgccgcatataaggagcccccattggccctgccgagtcttccgcctctcccatttcagaaactggaagaggctgccccaccctccgacccattccggggtggtagtgggtcaccaggcccagaaccaccaggcaggcccgatggaccatctttgctctataggtggatgaagcatgaacctggcttgggctcttatggagacgagttaggtcgagaaaggggctcaccttctgaaaggtgcgaggagaggggaggtgatgctgccgtgagcccgggagggccaccgttgggcctggccccacccccaagatacccaggatcactggatggcccaggggctggtggggatggggatgattacaaatcgtcttccgaggaaaccggatcgtctgaggacccttctccccctggaggacaccttgagggatacccatgcccccatcttgcgtatggggagcccgagtcctttggggacaacctttatgtctgtatcccatgtggcaaaggcttcccatccagcgagcaattgaacgcacatgtcgaggcacacgtggaggaggaggaagcgctgtatgggagggcagaagcagctgaggttgccgcaggtgcagccggtttaggccctccattcggtggcggaggcgacaaggtcgccggagctccaggcggattaggcgaactgctgcggccatatcgatgcgccagttgtgacaaatcctacaaggaccctgccaccttaaggcaacacgaaaagacgcactggctaacccgcccttacccttgtactatttgcgggaagaagtttactcagcgcggaactatgactcgacacatgcgcagccacctggggctcaaacccttcgcgtgcgacgcatgcggtatgcggtttacgaggcagtacagactcaccgaacacatgcgcattcactccggcgaaaaaccttacgagtgccaggtttgtggcggaaagttcgcccagcagaggaatctcattagtcatatgaaaatgcatgcagtgggcggagccgcaggagctgccggtgccctggcaggccttggtggcctgcctggggttcccggaccggacgggaaaggcaaactcgactttcccgagggagtgttcgctgtggccagacttaccgctgagcagttatcccttaagcaacaggacaaggcggctgcagccgagcttttagcacaaactacacatttcctgcacgaccccaaggtggccctggaatcactgtaccccctggctaaattcaccgccgagctggggctgtctcctgataaggccgctgaggtactgtctcagggggcacacctggccgctggtccggatgggaggaccatcgatcggttctctccgacctag

SEQ ID NO: 28975 - DNA, 2145 bp, synthetic construct
  misc_feature 1..2145: note = Description of Artificial Sequence: Synthetic coding sequence
  source 1..2145: mol_type = other DNA
atgttggatactatggaggcacctggacactctagacagctgctgctacagctaaacaaccagcggacgaaagggtttttgtgtgatgtcataatcgtcgtgcagaacgcgttattcagggcgcacaaaaacgttctggctgcttccagcgcctacctgaaatcactggttgtccacgacaatctcctaaaccttgaccacgacatggtttcgccagctgttttcagactggtcttggatttcatatacaccggccgtctcgcagatggcgcagaagctgctgccgcagctgcagtcgcccctggagcagagccttccctgggcgcagtcctggccgcagcgagctacctccagatccccgacctggtggcactgtgcaagaaaaggctcaaaaggcatggtaaatattgtcacctgcggggtgggggaggaggtgggggtggctatgctccctacggccgtccaggtcgtggcctacgggcagccacaccagtaattcaggcttgctacccctcccctgttggccctcctcccccaccggcagctgagcccccttcaggcccagaagctgccgtgaatacccactgcgcagagctgtacgcctccggccctgggcctgctgctgctctctgcgccagtgaaaggcggtgctctccactgtgtgggttggatctatccaagaagagtccccctggttccgccgcaccagagaggccgctcgccgagcgcgaactgccacccaggcccgattctccaccctccgctggacccgcagcctacaaggagccacccctcgcactgccctccctgccgcctctgccttttcagaagttggaggaagcagcccctcccagtgacccgttccgaggtggatcgggatcccccggacctgaacccccaggaaggccggatggtccctcccttctctaccggtggatgaagcatgagcctggactgggtagttacggagatgagctgggtcgcgaaagagggtccccaagtgaacgttgtgaggagaggggcggtgatgcggcagtgagcccgggaggtccacctctgggcctggctcctccaccacgatatcctggctcgctcgacggcccaggtgccggtggagacggagatgattacaagtcttctagtgaagagaccggttcctcagaggacccgagtcctcccggagggcatttagagggatatccatgcccacatctggcctacggggaaccagaatccttcggcgacaacctgtatgtgtgcatcccatgcggcaagggctttccctcctcggagcagttgaatgcgcatgtcgaggcgcatgtggaggaggaagaagccctgtatgggagggcagaggctgcggaggtggctgctggcgcagccggtctcgggccaccctttggcggaggaggcgataaagttgctggggctcctgggggtctgggggagctgctgcgtccctaccgatgcgctagctgcgataagtcttacaaggaccccgctacgctccgtcagcacgagaagactcactggctgacgcgcccttatccgtgtactatttgcggcaagaaatttacccagaggggtacaatgacgagacacatgagatcccacctggggttgaagccattcgcatgtgacgcttgtggcatgaggttcacacgacagtatagactcactgagcacatgcgcatccactccggcgagaagccttacgaatgccaggtgtgcggaggcaaattcgcccagcaaagaaacctgatatcccacatgaaaatgcacgccgttggcggtgccgcaggcgctgccggagccctggccggtttgggcggtttgcccggagtccccggtcccgatggcaagggcaagctcgattttcccgagggagttttcgccgtggccagacttaccgcagaacaactatccttaaaacaacaggataaagccgctgccgctgaactgctcgcccaaacaacacattttctccacgacccaaaagtggcacttgagagtttgtacccgcttgctaaattcacagctgagttggggttgtcgccagacaaggccgctgaagtcctttcccagggcgcacatctggctgcaggaccagacgggaggactatcgataggttctccccaacatag

SEQ ID NO: 28976 - DNA, 2208 bp, synthetic construct
  misc_feature 1..2208: note = Description of Artificial Sequence: Synthetic coding sequence
  source 1..2208: mol_type = other DNA
atggagggcgctggcggagcaaacgataagaagaaaatttcatccgaacgacggaaagaaaagtcccgcgacgcagcgaggagccggaggtcaaaggagtcggaagtcttctatgaactggctcaccagctgcccctgcctcataacgtgagcagccatcttgacaaagctagcgtgatgcgattaaccatttcctatttacgcgtacgaaaactgttagacgccggagatctggacatcgaagacgacatgaaagcccagatgaattgtttttacctgaaagccctcgacggattcgtgatggttctgacagacgatggggatatgatttatatttctgacaacgtcaacaaatatatgggcctcacacagttcgagctgactggtcattctgtgttcgactttacacatccctgcgatcatgaggaaatgcgcgagatgctcacccaccgcaatggtctggtgaaaaaaggtaaagaacagaatacccagaggtcattctttctgagaatgaagtgcactttaacctcacgtggtcgtaccatgaacatcaagagtgctacctggaaggtgctccattgcaccggacacattcacgtgtacgatacaaactccaatcagccacaatgcggttataaaaagccacccatgacttgccttgtccttatttgcgagccaataccacacccatccaacatcgagattcctctcgattcgaaaacgtttctgtcacgacacagtctggacatgaaatttagctactgtgacgagcgcatcaccgaactcatgggatatgaacccgaagagctgttggggcgaagcatctacgaatattatcatgcactggactcagatcaccttactaagactcatcatgacatgttcactaaaggacaggtgacaacagggcagtatagaatgctggccaagcgtggtggatacgtgtgggtagagacacaagcaaccgtcatctacaacaccaaaaattctcagcctcaatgcatagtgtgtgtaaactatgtggtttcaggtattattcaacatgacctgatctttagcctgcagcagacagagtgcgtcctgaagccggtcgagtctagcgatatgaagatgacacaactgttcacgaaggtggagagcgaggacacttccagcttgtttgataagctaaagaaagaaccagacgccctcacactcctggcccctgccgcaggcgatacaattatcagcctggattttggatcaaatgatactgaaacggatgaccagcagctggaggaggtccccctgtataatgacgtgatgttaccttcaccaaacgagaagctgcaaaacatcaatctcgcaatgtcgccacttcctacagcagaaacgccaaagcccctgcgcagtagtgcagatccggctcttaatcaggaggtggcactgaagcttgaaccaaatcctgaaagcctggagctcagtttcaccatgccgcagatacaagaccaaactccttccccttctgacgggagcacaagacaaagctccccagagccaaactcaccaagcgagtactgtttctatgtagactccgatatggtgaatgaatttaagctggagctggtggagaagctctttgcagaggataccgaggccaagaaccccttctctacacaggatacggacctggatctggagatgctggccccttatatacccatggatgatgattttcagttgcgctcgtttgatcaattgtcaccccttgaatctagctccgcttcacccgagagcgcttccccacagagcacagtcaccgtgtttcagcagacacaaatccaagagccaactgctaatgccacaacaactactgctaccaccgatgaactgaagactgtgactaaagaccgcatggaggatatcaaaatcctgattgcgtctccttcacccacacatattcataaagaaacaacatccgcaacgtcctcaccatatcgggatacgcagtccagaacggcatccccgaaccgcgcagggaagggcgtgatcgagcagacagagaaatctcatcctcgctcccccaatgtgttgtccgtcgctttgtcccaacggaccaccgttccagaagaggagctgaaccctaagattctggcactgcagaacgcacaacggaagcgcaagatggagcatgatggtagcctgtttcaagccgtgggaatcatttag

SEQ ID NO: 28977 - DNA, 2481 bp, synthetic construct
  misc_feature 1..2481: note = Description of Artificial Sequence: Synthetic coding sequence
  source 1..2481: mol_type = other DNA
atggagggtgcaggcggagccaatgataagaaaaagataagctctgagcgaagaaaggaaaaaagtcgagacgcggctcgcagtaggagaagtaaggagtcagaggtgttctacgaattggcccatcagctacccctgccacacaacgtgtctagtcacctggataaagcttccgtgatgcgattaacgataagctatctcagggtgcggaagctgcttgacgctggcgatcttgacattgaagatgacatgaaagcccagatgaattgtttttacctgaaagccttggacgggtttgttatggtactgacagacgacggcgacatgatctatatctctgataacgtaaataaatacatgggcctgacgcagttcgaactaacgggacatagtgttttcgattttactcacccttgcgatcacgaagaaatgcgcgaaatgctgacacacaggaacggtttagttaaaaaagggaaggaacagaacacacaacgttccttcttcctgcggatgaaatgcacacttacgtcacgaggacggacgatgaatatcaagtcagcgacttggaaagttctgcattgcaccgggcacatacacgtgtacgataccaacagtaaccagccacagtgcggatacaaaaagcctcccatgacttgcttagtcctcatttgcgaaccaattcctcatcccagtaatattgagatccccctcgactccaagacttttttgagtaggcacagtctagatatgaaatttagttactgtgacgagcgcatcacagaactgatgggatacgagccagaggaacttcttgggaggagtatctacgaatactaccatgccctggacagcgatcatctcaccaaaacacaccacgacatgtttacaaagggtcaggtcacaaccggacagtacagaatgctagctaaacgagggggttatgtgtgggtggagactcaggcaacggtgatctacaacacaaagaattctcagccccagtgtatagtctgtgtcaattacgttgtctcgggtatcattcaacacgacctgatcttcagcttgcagcagaccgaatgcgtgctaaagcctgtcgaaagctccgacatgaaaatgacccagctctttacaaaggtcgagagcgaggacacaagcagtctttttgataaactgaagaaggagcctgatgcactaactctcctcgcacctgccgcaggcgataccattatctcactcgacttcggtagcaacgatactgagactgacgaccagcagctggaggaggtccccctatacaatgatgtcatgctcccatctccgaatgagaaattacaaaacattaatctcgccatgtctcccttgcctacagcggaaacccccaagcctttgcggagttctgccgacccagctctgaaccaagaggtggctttaaagctcgagccgaaccctgagtcgctggaactttccttcacaatgcctcagatccaagaccaaacacccagtccttccgacggaagtacaagacagtcttcccccgagccaaatagcccgtccgagtactgtttctatgtggattctgacatggtgaacgaattcaagctcgagctggtggaaaagctttttgcagaagacactgaagccaaaaaccccttctccacacaggacacggaccttgacctggagatgctcgcaccctacataccaatggatgatgactttcagttgagatcattcgaccagttgtcgcccctcgagtcctccagcgccagcccagaaagtgcgtcgcctcagagtacagtgaccgtctttcagcagacccagattcaggagccgacagccaacgccactactacaactgctactaccgacgagctaaaaactgtcaccaaagatcgaatggaagatatcaaaatcctgatcgcctccccatcccctacccatattcacaaggagacgacttccgccacttcaagcccttacagagatactcaaagccgcacagcgtcccctaatcgagccggtaagggtgttatagaacaaactgaaaagagtcatccaaggagccctaacgttctgagcgttgctctctctcagaggacaactgttcctgaggaagagttgaacccaaaaatcttggctctccaaaatgcacagaggaagcgcaaaatggagcacgacggctctctgtttcaggcagtggggatcggcacactacttcaacaacctgatgaccacgcagccactacatctctctcatggaaaagggtcaagggctgtaagtcctctgaacagaatggaatggaacagaaaacgatcatcttaatcccctctgatctggcttgtcggctactgggccagagcatggacgaatccgggttaccccaactgacgtcctacgactgcgaagtgaatgccccaatccagggctcccgaaatcttctgcagggcgaagagctgctgcgagccttggatcaggtgaattag

SEQ ID NO: 28978 - DNA, 2304 bp, synthetic construct
  misc_feature 1..2304: note = Description of Artificial Sequence: Synthetic coding sequence
  source 1..2304: mol_type = other DNA
atgaggctcaccatatcttacctccgagtgcgcaaacttctggatgccggtgacttagacatcgaagacgacatgaaagcgcaaatgaattgcttttacctgaaagctctggatggcttcgtcatggtgttgaccgatgatggcgacatgatttatattagcgacaatgttaataagtatatgggcctgactcagtttgagctgaccggacactcagtgttcgacttcactcatccgtgtgatcacgaagagatgcgcgaaatgctgacgcataggaacgggctcgttaagaaaggtaaagaacaaaatacgcagaggagtttttttctacggatgaaatgcaccctcacgtccagagggagaacaatgaatattaagtcggcgacatggaaggtcctgcactgcacagggcacattcatgtctacgataccaactccaatcagcctcagtgcggatataaaaaaccacccatgacgtgcctggtgctgatctgcgagccaattccccacccctcaaatatcgagattccactcgactctaaaaccttcctatcgaggcactcacttgacatgaagttctcatactgcgatgaaaggataacagagctcatgggctacgagccagaagaactattgggaaggagcatttatgagtactaccatgcactcgacagcgaccatttgaccaaaacgcaccacgacatgtttacaaagggccaggtcacaactggacagtaccggatgctggcaaaacgaggcggatatgtttgggtcgaaacccaagctaccgtgatctacaacactaagaatagtcaaccccagtgtattgtttgcgtaaactacgtagtgtctggcattatccagcacgacctgatcttctccttacagcagacagaatgtgttctgaagccagtggaatcttcagacatgaagatgactcagctttttacaaaagtagagagtgaagacacaagcagcctatttgacaaactgaagaaggagccggatgcacttacactgttggccccagcggcaggggatactattattagccttgactttggttccaacgacaccgaaactgatgatcagcaactggaagaggtcccgctgtataatgatgtcatgcttccctcaccaaatgagaagttgcagaacattaatctggctatgagtccattgcctactgcagagacccccaagcccttgcggagctctgctgaccctgcccttaaccaagaagtcgcattaaaattggagccaaatcctgagagtctcgagctgtctttcaccatgcctcaaattcaggaccaaactccatctccatctgacggctccacacgccagtcatcaccagagcctaactctccctccgaatattgtttttacgtggattctgacatggtaaatgaattcaagctggaacttgtggaaaagctcttcgccgaggataccgaagcaaaaaatcccttctcaacccaggacactgacctggatctcgagatgttagccccttatatccccatggatgacgactttcagctgaggagctttgaccagctgagcccacttgaaagcagcagcgcttcccctgagtctgcttcacctcaatcaaccgtgaccgtcttccagcaaacccagatccaggaacctactgctaatgctactactacaacagccacaactgacgagttgaagacagtcactaaggacaggatggaagacataaaaattttgatcgctagcccaagtcccacccatatccacaaagaaaccacttccgcaacgtccagcccttatagagacacccaatcaaggaccgcctcccctaacagggccggtaagggggtaatcgaacaaaccgagaaaagccacccacgctccccgaacgttctgtctgtcgctctgagtcagcgcacaacagtgcctgaggaggagcttaacccaaaaatcctggcccttcagaatgctcagagaaagagaaagatggaacacgacgggtccctctttcaggcggtcggtattggcacgttgctgcagcagcctgatgatcacgccgctacgacttctctgtcctggaagcgggttaagggctgtaaaagttccgaacagaacggcatggagcagaagacaataattctgatacctagcgatttagcctgtcggctgctgggccagtccatggacgagagcggactgccccaactgacttcctacgactgtgaggttaatgctcctattcagggctctcgcaatctgctgcaaggtgaggaactcctgagggcgctagatcaggtaaattag

SEQ ID NO: 28979 - DNA, 2484 bp, synthetic construct
  misc_feature 1..2484: note = Description of Artificial Sequence: Synthetic coding sequence
  source 1..2484: mol_type = other DNA
atggagggagccggaggtgcgaacgataagaagaataggatttccagtgagagacgaaaagagaagtcccgcgatgctgccagatctcgaaggtcaaaagagtcagaagtgttctatgagctcgcccaccaactccctctgccgcataatgtaagttctcacctggataaagccagcgtgatgcggttaacgataagctacttgcgcgttcgcaagctgctggacgcgggagacctggatatcgaggatgatatgaaggcacagatgaattgtttttaccttaaagcactggatggattcgtaatggtcctaaccgacgatggcgatatgatatatatctctgacaacgttaacaaatacatgggattaacccagtttgagctaaccgggcattccgtgtttgatttcactcatccctgcgatcacgaggaaatgagagagatgttgacgcatagaaatggcttggtgaagaagggaaaggagcaaaacactcaaagatctttctttctccgtatgaaatgtaccttgactagtcgcggacgtaccatgaatatcaagagcgccacttggaaagtgctccactgcaccggacacattcacgtctacgacaccaactccaatcagccccagtgcggctataagaaacctcccatgacctgcctcgttcttatttgtgagcctattcctcacccctcgaatatcgagatcccactggactctaagacctttcttagccgtcacagccttgatatgaagttctcctattgcgatgaacgtatcacagaactcatgggatatgaaccagaagaactgctcggccgtagtatttacgagtactaccatgcgcttgatagcgatcacctcactaaaacccaccatgatatgtttaccaagggacaggtcaccactggccagtatagaatgttggcgaagcgcggaggctatgtgtgggttgagacccaagcaaccgtcatctacaacacaaagaattctcagccacagtgcatcgtttgcgtcaattatgtcgtgtctggtattatccaacacgatttaatcttctcactgcaacagacagagtgtgtactgaaacccgttgagtcatcggatatgaaaatgacccagctattcactaaggtcgagagcgaagatactagtagcctctttgataagttgaagaaggaacctgatgcactgaccttgctggcccctgcagctggcgatacaattatttccctggattttggaagcaatgatactgagacagatgaccaacaactcgaggaggtgccattgtacaacgacgttatgctgccttcgccaaatgagaagctgcagaacattaacctggcgatgtcacctttaccaaccgctgagaccccaaaaccattgaggagcagcgctgatccggcactcaatcaagaggtggctctgaagttggaacctaacccagaatcactcgagctatcctttaccatgccccagattcaagaccagacacctagcccatccgatggcagcaccaggcagtcttccccggaacccaactctccaagtgagtattgcttctacgtggacagcgacatggtcaacgagtttaaattggaattggtggagaaactatttgccgaagacacagaggcaaaaaaccccttctcaacacaggacacagatctagatctcgagatgctcgctccttatatccctatggacgatgattttcagttgagatccttcgatcagcttagtcccctagaatctagtagcgccagccccgaatctgcttctccccaatccacagtaacagtgttccaacagacccaaatccaggaaccaacagcaaatgcaaccaccactactgcaaccactgacgagttgaagactgtgacaaaggatcgaatggaagacattaaaatactgatcgcctctccaagtccaacacacatccacaaggaaacaacatcggcaacctcatctccgtacagggacacccaatccagaacggctagcccaaatcgcgctggcaaaggtgtcattgagcagacagaaaaatcacaccccagatcgccaaacgtgctgtcggttgccctctctcagagaacgaccgttccagaggaggaactgaaccctaagatcttagctttgcagaatgcccagaggaagcggaaaatggaacacgacgggtcgttgttccaggccgtgggcattggtaccctgctgcagcagccagacgatcatgcggctaccactagtctgagttggaaacgcgtgaagggatgtaagagtagcgaacagaacggtatggagcaaaaaactatcatacttattccgtccgatttggcttgccgcctgctgggacagtccatggacgaaagtgggcttcctcagctcacaagctacgactgcgaagtgaatgctcccatccaggggagccgaaacttgctgcagggggaagaattgttacgggctctcgatcaagtcaattag

SEQ ID NO: 28980 - DNA, 2553 bp, synthetic construct
  misc_feature 1..2553: note = Description of Artificial Sequence: Synthetic coding sequence
  source 1..2553: mol_type = other DNA
atgagctcacaatgtaggtccctggagaataagtttgtgtttctcaaggaaggccttgggaactctaaacctgaagagctcgaagaaattagaattgagaacggccgtatatcctcggaaaggcgaaaggaaaagagcagagacgctgctcgaagtagaagaagcaaagaatcagaagtgttctatgagcttgcccatcagttaccgttgccccacaatgtctctagccaccttgataaggctagcgtgatgaggctaacaatttcttatttacgcgtgcgcaagctgctggatgcaggagacctggacattgaagacgacatgaaggcccaaatgaactgcttctacctgaaagccctcgacgggttcgtaatggtcctaacagacgacggagacatgatctatatctccgataacgtgaataagtacatggggttaacccagttcgagctcaccgggcattccgtctttgattttacccacccatgcgatcacgaagagatgcgtgaaatgcttacccatcggaacggcctcgtgaagaagggcaaggaacaaaatactcagcgaagcttctttctgcgcatgaaatgcaccctgacatcgaggggacgcacgatgaatatcaaatcggctacctggaaggtcctgcattgtacaggccacatccacgtctacgataccaactctaatcagcctcagtgtgggtacaagaagccccctatgacttgtctcgtcctgatttgcgaacccattcctcaccccagtaacatcgagatccccctagactccaaaaccttcctttcacgccactcgttggacatgaagtttagctactgtgacgaacggatcaccgaattgatggggtatgaaccagaggagctgctcgggcgatccatctacgagtactatcacgcactggattctgatcacctcactaaaacacatcatgacatgttcactaaggggcaggtaaccacaggccagtacagaatgcttgctaaaagaggagggtacgtgtgggttgaaacacaagcaacagtgatttataacaccaaaaacagccagccacagtgcatagtctgcgtcaactacgtggtgagcggtatcatacagcacgatctgatttttagcttgcagcagaccgaatgcgttctgaaacccgtggagtctagcgacatgaagatgacccagctgtttaccaaagtggaatccgaggatacctccagtcttttcgacaaactcaagaaggagcctgatgccctaacattactggcgcctgcagccggtgataccattattagtttggactttggcagtaatgataccgaaacggatgatcaacagctggaagaagtaccactgtataacgacgtgatgctgccatctcctaatgagaagctccagaacattaacctcgccatgtcgcctctgccaactgctgagacacctaagcctctgcgaagttcggcggatccggctctcaatcaggaagtggcactgaaactcgagcctaatccagaatccctggaattgtcattcactatgcctcaaatccaagatcagacaccttcaccctcggacgggtcaaccagacagagctcacctgagcccaactcgccatccgagtattgcttctatgttgacagcgacatggttaatgagttcaaactggaactggttgaaaaactgttcgctgaagacaccgaggccaagaaccctttctcaacgcaagacactgacctcgatctcgagatgttggcgccatacattcccatggacgacgattttcagctcaggagttttgaccaactgagccccctggagtccagtagcgcctcgccagaaagtgccagtccccagtctaccgtcacagtgttccagcagacacaaatccaggagccaactgccaatgccacaacaaccactgctacaaccgacgagctaaaaaccgtcacaaaggatcggatggaagatattaagatacttattgcatcccccagtccaactcacattcacaaggaaacaactagcgccacttcgagcccatacagagatacccagtctcggacagcaagccccaaccgcgcagggaagggcgtgatcgaacagaccgaaaaaagccaccctcggtctcctaacgtcctgtcagttgctttgtcgcagcgtacgactgtgcccgaagaagagttaaatcccaagatattggccctgcagaatgcccagcgcaagagaaagatggaacatgacggaagtctcttccaggcagtgggcattggcaccctcctccagcagccagatgatcacgccgcaacaacatcccttagctggaaacgggttaaaggttgtaaaagtagcgagcagaatggcatggaacagaagacaataattcttatcccaagcgaccttgcttgccggttacttggccagtcgatggacgagagcgggcttccccagttaacatcctacgactgcgaggtgaatgctccgattcagggttcccggaatctgctgcagggcgaagaactcctccgcgcattggatcaagtgaattag

SEQ ID NO: 28981 - DNA, 1734 bp, synthetic construct
  misc_feature 1..1734: note = Description of Artificial Sequence: Synthetic coding sequence
  source 1..1734: mol_type = other DNA
atgaaattttcttattgtgacgaaaggattacggaactgatgggatacgaacctgaagagcttttgggcagatcaatctacgagtactaccacgcgctggatagtgatcacctcaccaagacgcaccacgacatgtttaccaagggacaagtaacgactggtcagtaccgcatgctagcaaaacgcggaggatatgtctgggttgagacccaggcaacggtgatttacaacactaagaatagtcagccccagtgcatagtgtgcgtgaattacgtcgtgtctggtataatccagcacgacttaattttcagcctccaacaaactgaatgcgttttgaaaccagtggagtcttccgatatgaaaatgacacaactttttacgaaggtggagtccgaggatacttcatcactcttcgataagttgaagaaagagccagatgccctcacactgctggccccagccgcaggggatacaatcataagtttggattttggcagtaacgacactgaaacagacgatcagcagctggaggaggttcccctgtacaacgacgtgatgcttccgagtcctaacgagaagctccaaaatatcaacctcgcgatgtctcctttgccgaccgcagagactcctaagcctctgaggtcttcggccgacccagccttgaatcaggaggtggccctcaagctggagcctaacccagagtccttggagctgagttttaccatgccccaaatccaggaccaaaccccctctcctagcgacggttcgacaagacaaagcagtcccgagccaaacagccccagcgagtactgcttctatgtcgattccgatatggttaacgaattcaaactggagttagtggagaagctgttcgcagaggatactgaagccaaaaaccccttttcaactcaggacacggacttggatctggagatgcttgctccttacatccccatggatgacgatttccagctgagaagttttgaccaactgagcccgctggagtcctccagtgcgtcgcccgagtccgccagtccccagtcgaccgtcactgtattccaacagacacagattcaggaacctacggctaatgccaccacgacgaccgcaacaaccgacgagctaaagaccgtgacaaaggataggatggaggatatcaaaatcttgatcgccagtcctagccccacacacattcacaaagagacaacaagtgctacttcctccccgtatcgggacacccagagtcggaccgcaagccccaatagagccggtaagggagtaatcgagcagacagaaaagtcacatcccaggtctcctaacgtcttgtcagtggctctgtcccagcggacaacggtgcctgaagaggagttgaatccaaaaatcttggcactgcagaatgcgcagagaaaacgtaagatggaacacgatggttccctcttccaagctgtgggcatagggactctgctccagcagccggacgatcatgctgctactacatccctatcttggaaaagggtcaaaggctgtaagagtagcgagcagaatggtatggaacagaagactattattctcatcccaagcgacctggcttgtcggctcctgggacaaagcatggacgagagcggccttccacagttgacatcgtacgattgcgaggtaaatgctcctattcagggtagtagaaatctgttgcagggggaggaactgctacgggctttggaccaagtcaactag

SEQ ID NO: 28982 - DNA, 2304 bp, synthetic construct
  misc_feature 1..2304: note = Description of Artificial Sequence: Synthetic coding sequence
  source 1..2304: mol_type = other DNA
atgcgcttaacaatcagttacctgcgcgtccgcaaactgctggatgccggagacctggatattgaagatgacatgaaggcgcagatgaattgtttctatttgaaagccctggatggctttgttatggtcttaaccgacgatggggacatgatctatatttctgacaacgtgaacaaatatatgggactcactcaatttgagctgaccggccacagtgtattcgacttcactcatccgtgcgatcacgaggagatgcgggaaatgctcacacacaggaatgggctggtgaagaaagggaaggagcaaaatacgcaacgctcattttttctgagaatgaaatgcacacttacctcacgagggagaaccatgaatatcaagagcgccacatggaaggtattacattgcaccggacatatacacgtatatgatacgaattccaatcagccccagtgtgggtacaaaaaaccgcctatgacttgtctggttctgatttgtgagcctatcccccacccctcgaacatagagattccactggacagcaagacatttctgtcacgacattctctagacatgaaatttagttactgtgatgaaaggatcacggagctgatggggtacgaaccggaggagctgttaggccgttcgatttatgagtattaccacgcgctggacagcgatcacctgaccaagactcatcatgacatgtttaccaagggtcaggtgaccacaggacagtatagaatgctcgccaaacggggagggtacgtgtgggtcgagacacaggcaactgtcatttacaacactaaaaacagccagccacagtgcattgtctgtgtgaactatgtggtaagtggaatcattcagcacgacttaatcttctcccttcaacagacggagtgcgtgctgaaaccagtggaaagcagcgacatgaaaatgacacagctattcacgaaggtagagagcgaagataccagtagcctcttcgataaactcaagaaggaacctgatgcccttacactgctcgccccagccgcaggagataccatcatcagtctggattttggctccaacgatacggagacagatgatcagcagctggaagaggtgcctctctacaacgacgttatgctgcccagtccaaacgagaaactgcagaatatcaacttggcaatgtcccctttgcccactgctgagaccccaaaaccgcttcggtctagtgccgaccctgccctgaaccaggaggtcgctcttaaactggagccaaaccccgagtctttagagctaagtttcaccatgcctcagatacaggatcagactccttcaccaagcgacggctccactaggcagtcgtcacccgaacccaacagcccaagcgaatattgcttctacgtcgactcagacatggtcaatgaattcaaactggagctggtcgagaagctgttcgccgaggataccgaggctaagaacccgttttctacccaagacacagacttggacttggagatgctggcaccttatatccccatggacgacgactttcagttgcgttcgtttgaccagctatctcccctcgagagctcctctgcatctcccgaatcagcatctccccagagcaccgtaaccgtgttccagcagacccagattcaggagcctacagcgaatgcgacaaccaccactgcaacaaccgatgagcttaagacagtgactaaagatcgcatggaagatattaagatcctgattgcgagtccatcccctacacatatccacaaagagactacttccgctacctctagtccctaccgggacacacagagccgaactgcctctcccaacagagccggtaagggggtcatcgagcagacagagaagtcccatcctcgcagtcctaatgtgctttcagtggcgctgtcacaacgtactaccgttcccgaagaggagttgaaccctaaaatcctggctctacagaatgcacagcgtaagcgcaagatggaacacgatggatcgctcttccaggccgttgggatcgggacgctcctgcagcaacccgacgatcacgcggcaaccactagcttgagttggaagagagtgaagggctgcaaatccagcgaacagaacggcatggagcagaaaacgatcattctgataccctccgacctcgcctgcagattgttgggacagagtatggatgagagcggtcttccccagcttaccagttatgactgcgaagtgaacgcacccatccaggggagccgtaaccttctgcaaggagaagagctgctccgcgctctggatcaagtgaattag

SEQ ID NO: 28983 - DNA, 1296 bp, synthetic construct
  misc_feature 1..1296: note = Description of Artificial Sequence: Synthetic coding sequence
  source 1..1296: mol_type = other DNA
atggaggacattcagactaatgccgaactgaaatccactcaggaacaatctgtccccgctgagtctgcagccgtgcttaatgattactccctgacaaagagtcatgaaatggaaaacgtggatagcggagaaggaccagcaaatgaggacgaggacatcggagatgattctatgaaggtgaaagatgagtattctgagagggacgagaatgtgctgaagtccgaacctatgggcaacgctgaagaaccagagatcccgtactcctactcgcgcgagtataacgagtatgagaatatcaagctggaaagacacgtggtgagcttcgacagtagccggccaacctccggtaaaatgaactgcgatgtgtgtggattgtcatgcatcagttttaacgtcctcatggtccacaaaaggtcccacaccggtgagcggccatttcagtgcaaccaatgcggcgcatcttttacacagaagggtaatctcctccgtcacataaaactccacacgggtgagaaaccatttaagtgtcatctgtgtaattacgcatgtcagaggagagatgccctaaccggacatttgaggacacactctggcgagaaaagacactgttttgacgtcaattataacagtagctatatgtatgagaaggaaagcgagttgattcagacgcgcatgatggaccaggcaatcaacaatgctatctcctatctgggagccgaggcgttacggcctcttgtgcagacccccccagcacccacctcggaaatggtgcccgttatctcctccatgtaccccattgcgctgacccgggctgaaatgtccaatggcgcaccacaggagctggaaaaaaagtccatacacctgcctgaaaaatctgtcccatcggaacgaggtctgtctcctaacaattccggccacgattccaccgatacggatagcaaccacgaggagaggcaaaatcacatatatcaacaaaatcacatggtcctgagcagagccagaaacggcatgccgctccttaaggaggtccccagaagttacgagttgctcaaaccaccaccgatctgtcctagagattcagtaaaggtgatcaacaaagagggcgaggtaatggatgtgtataggtgtgaccactgcagggtgctcttcttggactatgtgatgttcacgattcatatgggatgtcatggctttcgcgacccatttgaatgcaacatgtgtggctatcgctcacacgaccgatacgagttctcctctcatattgcacgcggagaacacagagctcttctgaagtag

SEQ ID NO: 28984 - DNA, 1245 bp, synthetic construct
  misc_feature 1..1245: note = Description of Artificial Sequence: Synthetic coding sequence
  source 1..1245: mol_type = other DNA
atggaagacatccaaacaaacgccgaacttaagtctacccaggagcaaagcgtgcctgctgagtcagccgctgtgttgaatgactactcccttaccaaatcccacgagatggaaaacgtggattctggagagggacccgcaaatgaggatgaagacataggtgacgacagcatgaaggtaaaggacgagtactccgaaagggacgagaacgtgctcaaaagcgaacctatgggcaacgctgaggaacccgagattccctacagttactcacgagaatacaacgaatacgaaaacataaaactcgagagacacgttgtgtcattcgactccagccggcctacgtcaggaaagatgaattgcgacgtgtgtggattgagctgcatcagcttcaatgtgctgatggtgcataaaagatcgcataccgccagtgcagaagccagacacattaaagccgagatgggatccgagcgggctctggtgttagaccggcttgcttccaacgtggcaaagagaaaatcttcaatgcctcaaaaattcatcggtgagaaacgacactgttttgacgttaattacaattcgagctacatgtatgagaaggaatccgagctcattcaaactcggatgatggatcaagcaatcaataatgctatctcttatttaggcgctgaagccttacggccactggtgcagactccgcctgcccctacaagtgaaatggtacccgtcattagttctatgtaccctatagcactcacaagggcagaaatgtccaacggagccccacaggaattggagaaaaaaagcatccacctgcctgaaaaatctgtcccctccgaaagaggtctctctccgaacaacagcgggcacgatagcaccgacacagactccaatcacgaggagaggcagaatcacatctatcagcagaatcacatggtgttgtcccgagcccgtaatgggatgcccctgctgaaggaggtgcccaggtcctatgaacttctgaaaccaccaccaatttgccccagagactccgtcaaagtaataaacaaagagggggaggtgatggacgtgtaccgatgtgatcactgcagggtgctgtttctagactacgttatgttcactatacatatgggctgccacggctttcgcgatcctttcgagtgcaacatgtgtggatatcgctcccacgatcgatacgagttttcttcgcacatcgctcggggtgaacatagggcattgcttaagtag

SEQ ID NO: 28985 - DNA, 1413 bp, synthetic construct
  misc_feature 1..1413: note = Description of Artificial Sequence: Synthetic coding sequence
  source 1..1413: mol_type = other DNA
atggaggatatacagaccaatgcagaactgaagagcacacaggaacagagcgttccggctgagtctgcggcagttctgaatgactatagcctgacgaagtcacacgaaatggaaaatgtagattccggggaagggccagctaacgaagatgaggatatcggcgatgatagtatgaaggtgaaggacgaatactctgagcgggatgagaacgtcctgaaaagcgagcccatgggcaacgcagaagagcctgaaatcccatacagttacagcagggagtataatgaatacgagaatattaagctggaaagacacgtggtctccttcgactcctctcggcctacctcaggcaaaatgaactgcgacgtgtgtggactctcctgtatctcgttcaacgtcctaatggttcataagcgatcacataccggggaacgccctttccaatgcaaccaatgcggtgcttcattcacccagaaggggaatctactgcgacatatcaaattacacaccggggagaagccatttaagtgccatctttgtaattatgcatgccagaggcgagacgcgttaactgggcacctgagaacacactcagttgagaagccctacaaatgcgaattctgcgggcgttcctacaagcagagatcctctctcgaggaacataaggaacggtgccgaactttcctgcaatcaacagacccaggcgacactggcgagaaacgccattgcttcgacgtgaactacaattcctcttacatgtacgagaaagaaagcgagctgatccagactaggatgatggaccaggccattaataacgcaattagctacttgggggctgaagctctaagacctttagtacagactccgcctgcccctacctcagagatggttccggtgatctctagcatgtatcctatcgccctcacacgggctgagatgtccaacggtgccccacaggaactcgaaaagaaaagtatccacttgccagagaagagcgtgccatccgagcggggtcttagccccaataacagcgggcacgactcaaccgatactgatagtaaccatgaggaacggcagaatcatatctaccaacagaaccacatggtgctgagtcgcgctcggaatggaatgcctctcctgaaagaggttcctcgctcctacgaattactgaaacctcccccaatttgtccaagggactctgttaaggttatcaacaaggaaggcgaagtgatggatgtctaccggtgcgaccattgtcgtgtgcttttccttgactacgtaatgttcactatccacatggggtgtcacgggtttagggacccatttgaatgcaacatgtgtggctaccggtcccacgatagatatgagttttcgagtcatatcgctcgaggcgagcaccgggctctccttaagtag

SEQ ID NO: 28986 - DNA, 1413 bp, synthetic construct
  misc_feature 1..1413: note = Description of Artificial Sequence: Synthetic coding sequence
  source 1..1413: mol_type = other DNA
atggaggacattcagactaatgctgaactcaagtccacgcaagaacagtctgtacccgctgaaagcgccgcagtcttaaacgattacagtctaacgaaatcacatgaaatggaaaatgtcgactcgggcgagggaccagcaaatgaggatgaggacatcggcgacgattcgatgaaggtgaaggacgaatattccgaacgcgacgagaacgtgttgaaatctgaaccgatgggcaacgccgaagaacccgaaatcccttattcttatagtcgcgagtataatgaatacgaaaacatcaaactcgagcgacacgtcgtgagtttcgactccagcaggcccacatccggcaaaatgaactgcgatgtctgcggtctatcctgtatctctttcaacgtgctgatggtgcacaagagatcacacaccggggagcgtcccttccagtgtaaccaatgtggcgctagcttcacgcagaagggaaacctgctgcgtcacatcaaattgcacactggtgagaaacctttcaaatgccacttatgcaactatgcttgtcagcgaagagacgctctgactggccacctgaggacccacagtgccagcgccgaagcccgtcacataaaggctgaaatgggtagtgaacgtgcactggtcctagatagattagcgtctaatgtggctaaaagaaaatcgagtatgccccagaagtttattggggagaagcggcactgttttgacgtcaattacaattcctcctatatgtatgagaaagagagcgaacttatccagactcggatgatggatcaggccattaacaatgccatctcgtacctgggcgcagaggcattgcggccactggtgcagacaccacctgcccctacctctgaaatggtgccagtcattagcagcatgtaccccatcgctctgacacgagctgagatgagcaacggcgctcctcaggaacttgagaaaaaatcaatacacctacctgagaaaagcgttccaagcgagcgcggactctctccaaataacagcgggcacgacagtaccgacacagactcaaatcatgaggagcgccagaatcatatttatcagcaaaaccacatggtcttgagccgcgctagaaatggcatgccgcttctcaaggaagtcccacggtcctatgaattactgaagccacccccaatttgcccaagggactctgtgaaagtgatcaataaggaaggcgaggtcatggacgtttacagatgtgatcactgccgggtgctttttttggactacgtgatgtttaccatacacatggggtgtcatggcttcagggatccgttcgagtgtaacatgtgtggataccgttcacatgatcggtacgagtttagcagtcacattgcacggggtgagcaccgggcattgttgaaatag

SEQ ID NO: 28987 - DNA, 1101 bp, synthetic construct
  misc_feature 1..1101: note = Description of Artificial Sequence: Synthetic coding sequence
  source 1..1101: mol_type = other DNA
atggaagacatccagacaaatgccgaacttaagagcactcaggagcaatccgtaccggctgagtcagcagcagtcttgaatgactacagtctcaccaaaagtcatgagatggagaacgtcgatagcggagaaggtcctgcgaatgaagacgaggacataggcgttgagaagccttataagtgtgagttctgcggccgatcctacaagcagcgcagttcccttgaggagcataaggagcgctgtagaacttttctgcagagcacggacccaggcgatactgcttcggccgaggccagacacataaaagccgaaatgggcagcgagagggccctggtcctcgatagactggcaagtaatgtcgcaaagcgcaaaagtagcatgccccaaaaatttatcggtgagaaaagacactgtttcgatgtgaactacaattctagttacatgtatgaaaaggagtccgagttgatccagactagaatgatggatcaggccataaacaatgcaattagttatctaggagccgaggcgctccgcccactggtccagaccccaccggctcctaccagcgagatggtccccgtgatctcctctatgtatcccatcgctctgacacgcgctgagatgagcaatggtgccccacaggagttagaaaagaagtccattcacttgcctgaaaagagtgtgccaagcgagagggggctgagcccaaataactccggtcacgactccactgatacagatagtaaccacgaggagcgccagaaccacatatatcaacaaaaccatatggtgctatcacgcgctaggaatggcatgcccttactgaaagaagtgcccagaagctacgagctgctgaagcctccacctatttgccctcgtgactctgtcaaggtgattaacaaagagggagaagttatggatgtctacaggtgtgaccattgccgcgtgctttttctagattatgtgatgtttaccatccacatgggctgtcacggcttccgggaccccttcgaatgcaacatgtgtggatatcggagccacgaccggtatgagttttcttcacatattgccaggggagaacaccgcgctctgttgaaatag

SEQ ID NO: 28988 - DNA, 1128 bp, synthetic construct
  misc_feature 1..1128: note = Description of Artificial Sequence: Synthetic coding sequence
  source 1..1128: mol_type = other DNA
atggaagacatccagactaacgctgagttgaaaagtacacaagaacagagtgtgccggcagagagcgccgcagtgctgaacgattacagcttgacaaagagccacgaaatggaaaacgtggactccggcgaaggcccagccaacgaggatgaggatataggcgacgattctatgaaagtcaaagacgaatacagtgagcgcgacgagaacgtcctcaagtcggagcccatggggaacgcagaggagcccgagattccttattcttatagccgagagtataacgagtacgaaaatatcaaattagagcggcacgtcgtgagcttcgacagcagtaggccaacctcaggaaagatgaattgtgatgtctgcggtctgtcctgtattagtttcaacgttctgatggttcacaaacggagtcataccggcgagaagagacactgcttcgacgtgaattacaatagtagttacatgtacgagaaagagtccgaactcatacagaccagaatgatggaccaggcaattaacaatgctatcagctatcttggcgctgaggcactaagaccactggtccagactccccctgccccaacatctgaaatggtgcccgtcattagttccatgtacccaattgcacttacccgggctgagatgtccaacggggctcctcaggagctggaaaaaaaaagcatccacctcccggaaaaatccgttccctctgaacgcggactctctcctaataatagtggtcacgacagcactgacacggactccaatcacgaggaacgtcagaaccatatttaccaacagaaccacatggtgctctccagggcaagaaacggaatgccacttcttaaagaagtccccagaagctacgaactgctgaagccgccaccgatttgccctagggatagcgtgaaggtcattaataaggaaggagaggtaatggacgtatacaggtgcgatcattgcagggtgctttttctcgattacgtgatgtttacaatacacatggggtgtcacggcttccgcgatccattcgaatgtaacatgtgcggttacagatctcacgataggtacgaattcagttcccacattgctcgcggagaacatcgcgcacttcttaagtag

SEQ ID NO: 28989 - DNA, 867 bp, synthetic construct
  misc_feature 1..867: note = Description of Artificial Sequence: Synthetic coding sequence
  source 1..867: mol_type = other DNA
atggaggacattcagaccaatgccgagttaaaaagtacacaagaacagtctgtgcccgcagaatctgctgctgttttaaacgactactctctgaccaaaagccatgagatggagaacgtggacagcggagaagggccagcaaacgaagacgaagacattggtggcgaaaagaggcactgcttcgacgtgaattacaactccagttatatgtacgagaaagaatctgagctcatccagacaaggatgatggaccaggccataaacaatgccatctcttacttgggcgcagaggctcttaggcccttggttcagaccccgcctgcccctacttctgaaatggtcccagtgatttctagcatgtatccaattgccctgacaagggccgaaatgtccaatggcgcaccccaagaattagaaaagaagagtattcatctgcctgagaagagcgtgcccagcgagcgaggactctctccgaacaactcgggccacgatagtaccgacaccgactccaaccacgaggaacgacagaatcatatttaccagcagaatcatatggttctgagtcgggcacggaacggaatgcccctcctgaaggaagtccccagaagctacgagctcctgaagcctcctccaatctgtcctcgagatagtgtaaaggttatcaataaagagggagaggtcatggacgtttatcgctgcgatcactgccgggttctatttctcgactacgtaatgttcaccatacatatgggctgtcatgggttccgggatcctttcgagtgtaacatgtgcgggtacagatcccacgataggtacgagttttcctcacatatcgcgcgaggcgagcaccgagccctgctcaaatag

SEQ ID NO: 28990 - DNA, 1269 bp, synthetic construct
  misc_feature 1..1269: note = Description of Artificial Sequence: Synthetic coding sequence
  source 1..1269: mol_type = other DNA
atggaggatatccagacgaatgccgaactgaagagcacacaagagcagagtgtgccagctgaatccgccgctgtgttgaacgattattctttgacaaaaagccacgagatggaaaacgtggactcaggcgagggacctgctaatgaagatgaggatatagggggagagcgtcccttccagtgtaaccaatgcggcgctagcttcacacagaaagggaatctgctgaggcatattaagctccacacgggggagaaaccttttaaatgtcacctgtgtaattacgcatgtcaacgacgcgacgcactgaccggtcacctcaggactcacagcgtggaaaagccctacaaatgcgagttctgtggcagatcatacaagcaaagatctagtctcgaggaacacaaagagcgctgtagaactttcttgcagtcgaccgacccgggtgatacagcctcagctgaagccagacacataaaagctgagatgggctcagagcgtgctctggttcttgatcggctggctagcaacgtggcgaagcgcaaatccagtatgccgcagaaatttattggggaaaaaaggcactgtttcgacgttaactacaacagcagctacatgtatgaaaaggagtcggaattaatccagacccggatgatggaccaggctatcaacaatgccatcagttacttgggggctgaagctctgcggcctttggttcagactcccccagcgccaacctccgagatggtgcccgtgatatcctcgatgtaccccattgctctgacgcgagcagagatgagtaacggggctccccaggagctggaaaaaaaaagcatccatttacccgaaaaaagcgtgccatcggaaagaggattaagcccaaacaactcaggacacgatagcaccgacaccgatagtaaccatgaggagaggcagaatcatatttaccagcagaaccacatggtgttgtcccgcgctagaaatgggatgccccttctcaaggaagtacctcggtcttacgaattattaaaaccaccccctatttgtccacgagatagcgttaaggtaatcaataaagagggagaggtcatggacgtgtatcggtgtgatcactgtagggttctgttcctggactatgtgatgtttacgattcacatgggctgtcacggcttccgggacccttttgagtgcaacatgtgtgggtatcgcagtcatgacaggtacgagttttcatcacatatagctagaggggaacacagagccctactgaagtag

SEQ ID NO: 28991 - DNA, 984 bp, synthetic construct
  misc_feature 1..984: note = Description of Artificial Sequence: Synthetic coding sequence
  source 1..984: mol_type = other DNA
atggaagatatacagacaaacgcagaactaaaatcaacacaagagcagtccgtgcccgctgaatccgcagccgttctgaatgattattccctgactaagtctcacgagatggagaacgtcgattccggggagggtccggctaacgaagacgaggatataggggcttccgccgaggctagacacattaaagccgaaatggggagcgagcgcgctctggtcttggaccgcttggctagcaatgttgccaagagaaagtctagcatgccgcagaagtttattggagaaaagcggcattgctttgacgttaattataacagctcatacatgtacgagaaagagtcagaactcatacagacaagaatgatggaccaagcaattaataatgcaatcagttatctaggagccgaggctttacggccattggttcagaccccccctgcacccacttcagagatggttcccgtgataagctcgatgtatccaatcgctctgacccgggcagagatgtcaaatggcgctccccaggaactggagaagaagtccattcacctccccgaaaaatctgtgccgagtgagcgcggactgagtcccaacaattcaggccacgattccactgataccgatagtaaccatgaggagcggcagaaccatatttatcaacagaatcatatggtgctatctagggcacgcaatgggatgcccctgctgaaggaggtaccccgtagttacgagttactgaaacctcctcctatctgcccacgagattccgttaaagtgatcaataaggagggagaagtaatggatgtgtaccggtgcgaccactgcagggtcctgttcctggattacgtaatgtttacgattcacatgggctgccacggttttcgtgaccctttcgaatgtaacatgtgcgggtaccgctcccatgatcgttacgagtttagcagccacattgccaggggagaacacagggctctcctgaaatag

SEQ ID NO: 28992 - DNA, 1392 bp, synthetic construct
  misc_feature 1..1392: note = Description of Artificial Sequence: Synthetic coding sequence
  source 1..1392: mol_type = other DNA
taacaggaacagagtgtgcctgcagatgactccatgaaagtcaaggatgaatattctgagcgggacgaaaatgtgctcaagtctgagcctatgggaaacgcagaggaaccagaaataccttactcctactcacgagagtataacgaatacgagaacattaagctggaaaggcatgtggtgtcatttgatagctcaaggcccacctctgggaagatgaactgtgatgtttgtgggcttagttgcatatcttttaacgtcttgatggtgcacaaacggagccataccggcgagagacctttccagtgcaatcagtgtggggcaagcttcacgcagaagggaaacctgctgcgccatataaagttgcatacaggcgagaagccgtttaaatgtcatctgtgtaattacgcgtgtcaacggcgtgatgcgctcacagggcatctcaggacccattcggttgagaagccatataagtgtgaattttgtggcagaagctacaagcaacggtcgagcctcgaggagcataaggagcgatgccgcactttccttcagagtacggacccaggagacaccgcatccgcggaggcaagacatattaaagcggagatggggagtgaaagggctcttgtcctggacaggctggcaagcaacgtggccaaacggaagagctccatgccccaaaaatttattggagagaaacgacactgctttgatgtgaattacaatagctcgtacatgtatgagaaggaaagcgagctcatccagacgagaatgatggatcaggcgataaataatgccatatcctatttgggagccgaggctcttcgaccactggtacaaaccccccctgcccctacatccgagatggtgcctgttataagcagtatgtacccaattgccctgactcgggctgagatgagtaatggagctccccaggagcttgaaaaaaagtcaattcatctgccggagaaatcagttccatctgaaagggggctgagtccaaataattccggccacgactctactgatactgacagcaaccacgaggaacgacagaatcatatttaccaacagaatcacatggtcttgtccagagcccgaaatggaatgccccttttgaaagaggtaccacggtcttatgagctgctgaagcctccccctatctgtccacgtgatagcgtgaaggtgattaataaggagggagaggtaatggacgtctatcgctgtgaccactgccgggttctctttctcgactacgtgatgtttacgatacatatgggctgccatggatttagggaccctttcgagtgcaacatgtgcggctaccgttctcatgatcgctatgaattctccagccacattgctaggggtgaacacagagctctgctgaagtag

SEQ ID NO: 28993 - DNA, 1275 bp, synthetic construct
  misc_feature 1..1275: note = Description of Artificial Sequence: Synthetic coding sequence
  source 1..1275: mol_type = other DNA
tgacaggagcaaagcgtaccagccgatgacagtatgaaggtgaaagacgagtatagcgagcgggatgaaaacgtgctaaaatccgaaccaatgggaaacgccgaggagccagagatcccctatagctatagtcgtgagtacaacgagtatgagaacataaagctggaaaggcacgtggtttcattcgactccagcaggcctacctctggaaagatgaattgcgacgtctgcggcctctcgtgtatcagtttcaacgtcctgatggtacataaaagatctcacaccggcgaacgtcctttccagtgtaatcagtgtggagcgtcattcacacaaaagggaaatctcctccgccacattaaacttcacactggcgagaaaccattcaagtgccatctgtgtaattatgcctgccagcgcagagatgccctgaccggccacctgcgcacccactcagcttccgccgaggcacgacatatcaaggctgaaatgggatcagagcgagcgctggtcctggaccgactcgcctctaacgtggctaagaggaaatcatcgatgcctcagaaattcattggcgaaaaaaggcactgcttcgatgtgaattataactccagttacatgtacgaaaaggaatccgagcttattcagacacgcatgatggaccaagcaattaacaatgcaatatcttatttgggggcagaggcacttcgcccactagtgcagacaccaccggcacctaccagcgaaatggttcctgtaatcagctcaatgtatcctattgcccttacccgggcagagatgtccaatggtgccccacaggaactggagaaaaagtccatccatcttccagaaaaatcagtgccatctgaacgaggtctctcccccaataattccggacatgacagtacagacacggattctaaccacgaagagaggcagaatcacatttatcagcagaatcatatggtgctgtcccgggcaagaaatggcatgcctctccttaaggaagtacctcggagctatgaacttctgaagcccccacctatttgtcccagagattcagtcaaggtaatcaataaggagggagaggtgatggacgtctaccgctgcgaccattgccgcgtcctgtttctggattacgtaatgttcacaattcacatgggctgccacggcttccgcgacccgttcgaatgcaacatgtgcggctacagaagtcacgaccggtacgagttttccagtcatatcgcaagaggggaacatagagccctcttaaagtag

SEQ ID NO: 28994 - DNA, 1362 bp, synthetic construct
  misc_feature 1..1362: note = Description of Artificial Sequence: Synthetic coding sequence
  source 1..1362: mol_type = other DNA
atggaagatatacagaccaacgcagagctgaaaagcacccaagagcagtccgtgccagctgagagcgcagcagtgctgaacgattatagcctgacaaaaagtcacgaaatggagaacgtggactctggggagggtcccgcaaacgaagacgaagacataggggatgacagcatgaaagtgaaagatgagtacagtgaacgggatgagaatgttcttaagtctgagcctatggggaatgccgaagagcctgagatcccttactcctactcaagggagtacaatgagtacgaaaacattaagctggagcgccatgtggtgtcctttgactcctcccgccctactagcggcaagatgaattgtgacgtctgcgggctatcttgtatcagctttaacgttttgatggtccacaaaaggtcccacactgtggaaaagccttataagtgcgaattttgtggacgctcatacaagcagcggtcttccttagaagaacacaaggagcgctgtaggaccttcctgcaatcaactgatcccggagacaccgcttctgccgaagcccgtcacattaaagctgaaatgggttcagagagagccctcgtcctggacagattggcatccaatgtcgcgaaacgtaaaagctccatgcctcagaagttcatcggggagaagcgccactgttttgatgtgaactataattcgagctatatgtacgagaaagagagtgagttgatccagacccgaatgatggaccaggctatcaataacgctataagttaccttggggctgaggccttgaggcccttagttcagacgccgcctgccccaacctcggaaatggtccctgtgatctctagcatgtatccgatcgcactgacacgcgcagaaatgtcaaatggcgcacctcaggagctggaaaagaagagcatccacctgccggaaaaaagtgtgccatcagagcgcggattgagtccaaataacagcgggcatgattctacagacacagatagcaaccacgaagagcgtcagaatcacatataccagcagaatcatatggtattatctcgcgcaaggaacggcatgccgctcctgaaggaggttcctcggtcatatgagctgcttaagcctcccccaatttgccccagggatagcgtcaaagtgattaacaaggaaggggaggtcatggacgtgtaccgctgcgaccactgccgggtcctgtttctagactacgtcatgtttacgattcatatgggttgccacggatttagagatccattcgagtgcaacatgtgtgggtacagatcccacgatcggtatgagttctctagccatatagctaggggagagcaccgcgctctactgaaatag

SEQ ID NO: 28995 - DNA, 1530 bp, synthetic construct
  misc_feature 1..1530: note = Description of Artificial Sequence: Synthetic coding sequence
  source 1..1530: mol_type = other DNA
atggaagacatccagactaatgccgagttaaagagcacccaagagcaaagtgtgcccgcagagtctgctgccgtccttaatgactactcattgacaaagagccatgaaatggagaacgtggatagtggggagggtcccgctaatgaagacgaggatataggcgacgattccatgaaggtcaaagatgaatactccgagagggatgaaaacgtgcttaaaagcgaacctatgggcaacgctgaagaaccagagattccttactcatattctagggagtataatgagtacgagaacatcaaattggaaagacatgtggtcagctttgatagctctcgaccaacctcaggaaagatgaactgtgatgtgtgtggcctgtcctgcattagttttaatgtactgatggtccacaagcgaagccacacaggggaacgcccttttcagtgtaaccagtgtggtgctagttttacgcagaaggggaacctccttcggcatattaaattacacaccggagaaaaacccttcaagtgccacctctgcaactatgcatgtcagcgtcgggacgccttgactggacatctccgaacacactcagttgaaaagccatacaagtgtgagttttgtggacgttcgtacaagcagcgaagctctctggaggagcacaaagagagatgtcgtacttttctccagtccacagaccctggcgatactgcaagcgccgaggcccgacacattaaggctgagatggggtccgagcgggcactggtcctggataggcttgccagcaatgtggcaaaaaggaagtccagcatgccacagaagttcataggggagaagaggcactgttttgacgttaactacaactcaagttatatgtacgaaaaggaatccgaactgatccagaccaggatgatggatcaggctattaacaatgctatctcctaccttggcgctgaagctctcagaccactggtgcagacacctcccgcacccaccagcgagatggtgccggttatttcatcaatgtatcccatagcgctgacaagagccgaaatgtccaatggcgcaccccaagaactggaaaaaaaatccatacacctgcctgaaaagagcgtgccatcagaacggggtctgtcacctaacaattctggccatgactccactgataccgactcaaatcacgaggagcggcaaaaccacatttatcagcaaaatcacatggtgttaagtcgggcacgtaacggaatgcctttgctgaaggaagtgccccgtagctacgagctcctcaaacccccacccatctgtcctcgcgactcagtgaaggtcattaataaagagggggaggtgatggacgtgtacaggtgtgatcattgtcgggtcttattccttgattatgtcatgtttacaattcatatggggtgccacgggttcagagatcctttcgaatgcaacatgtgcgggtacagaagtcacgacagatacgagttttctagtcacatcgctaggggcgagcaccgtgcgctcttaaagtag

SEQ ID NO: 28996 - DNA, 1428 bp, synthetic construct
  misc_feature 1..1428: note = Description of Artificial Sequence: Synthetic coding sequence
  source 1..1428: mol_type = other DNA
atggaggacatacagactaacgccgaattgaagagcacacaggaacagtcagtgccggctgatgacagtatgaaagttaaggatgaatattcagaacgagacgagaacgtgctgaaatctgaaccaatgggtaacgcagaagaacccgagatcccgtactcttacagccgggagtataacgagtacgagaatattaagctggagcggcacgtggtcagcttcgacagctccaggcccaccagcggcaaaatgaattgtgacgtctgcggactgagctgcatcagtttcaacgtgttgatggtgcacaagaggagccatacaggagagaggccctttcagtgtaaccagtgtggggcttcatttacccagaaggggaacctcctgaggcacataaagctccacaccggggaaaagccttttaaatgccatctgtgtaactacgcctgtcaacggagggatgccctgaccggccatttgcgtacccactctgtggagaagccgtataagtgtgaattctgtggcagatcatacaaacaacgctctagtcttgaggaacataaagagcgatgtcgaacatttctgcagagtactgaccctggagacaccgcatccgcagaagctcgccatatcaaagccgagatggggagcgagcgagcccttgtgcttgaccgtctcgcttctaacgtggctaaaaggaaatccagtatgccacagaaattcataggagaaaagagacattgcttcgacgtgaactacaattcttcttatatgtacgagaaggaaagcgagctcatccaaacccgcatgatggaccaggcaatcaacaacgcaatttcctatctaggagcggaagcactgaggcctctagtgcagactcctcctgcacccacctcagagatggtgccagtaatttcaagtatgtacccgattgccttgactagggcggaaatgtcaaacggcgctccacaagaactagagaagaaaagcatccatctgcccgaaaagtccgtcccttccgaaagaggcctgtccccgaacaactctggccacgatagtaccgatactgacagtaatcacgaggagcgccagaatcacatatatcagcaaaaccacatggtcctcagcagggctcgaaacggtatgcccctgctgaaggaagtgcctcgctcctatgaactcctcaagcctccacccatctgtcccagggactcagtcaaggtgataaacaaagagggggaggttatggatgtctaccgctgcgaccactgtcgagtgctattcctggattatgtgatgtttacgatccacatgggatgccacggattcagggacccattcgaatgcaacatgtgcgggtatcgttctcacgatcgatacgagttctctagtcatatcgccaggggcgagcaccgggctctgctaaagtag

SEQ ID NO: 28997 - DNA, 450 bp, synthetic construct
  misc_feature 1..450: note = Description of Artificial Sequence: Synthetic coding sequence
  source 1..450: mol_type = other DNA
atgaaagtggcctccggttccactgctacagcagccgctggacccagctgtgcgcttaaagctggcaagactgccagtggcgcaggcgaggtagtgaggtgcctgtcagaacagtccgttgccatctcacgctgcgctggcggtgctggcgctcgtctcccagctctcctggacgaacaacaggtcaatgtactgctttatgatatgaacggatgttatagccgcttaaaggaactggtgcctacgctaccacaaaaccgaaaggtatccaaggtcgagatcctgcagcacgtgattgactatatccgcgatcttcagttggaattgaattccgaatcggaggttgggacccctggcggaaggggtctgccggtcagggccccactgtcgacgcttaacggggagattagtgccctaacagcggaagttaggagccgtagcgaccactag

SEQ ID NO: 28998 - DNA, 468 bp, synthetic construct
  misc_feature 1..468: note = Description of Artificial Sequence: Synthetic coding sequence
  source 1..468: mol_type = other DNA
atgaaggtcgccagcgggagtaccgcaacggccgctgcaggcccatcatgtgccctgaaggcagggaagactgcctcaggggcaggcgaagtggttcggtgtctgtccgagcagtcagtcgctatttcccgctgcgctggaggcgcaggggcaagacttcctgccctactcgatgaacaacaagtgaacgtcctgttatatgacatgaatggctgctactcaagactgaaagagttggtgcctacattaccacaaaaccgtaaggtgtcaaaagtagaaattctccagcatgttatcgactacatacgcgatctccagttagagttgaattctgagagtgaggtcgggacccccggtgggagggggctgcccgtgagggcccctctgtcaaccttaaacggcgagatcagcgctctgaccgcagaggctgcctgcgtgccagcagatgacaggatcctttgtaggtag

SEQ ID NO: 28999 - DNA, 738 bp, synthetic construct
  misc_feature 1..738: note = Description of Artificial Sequence: Synthetic coding sequence
  source 1..738: mol_type = other DNA
atggcggcaggtatgtatctggagcactacctggatagcatcgaaaatctgcccttcgagctgcagcgcaattttcaactgatgcgggatctggatcaaaggaccgaggatctcaaggctgaaatagacaagctggctacagagtacatgagctccgccagaagtttgagctcggaagagaagctcgcgctcctgaagcaaatccaggaagcttacggtaaatgtaaagaattcggtgatgataaggtgcagttggccatgcagacctacgagatggttgacaaacacatcagacggctagataccgacctcgcacgttttgaggccgatctgaaggagaagcaaatcgagagtagtgactacgacagttcctcctcaaaaggacggacccagaaagagaagaaggccgctagagctcgtagtaaaggcaagaactccgacgaggaagcccctaaaaccgcccagaagaagttgaaactggtgcggactagcccagagtatggaatgccttcagttacatttgggtcggtacatccctctgacgtgctggacatgcccgtagacccgaatgagccaacctattgcttatgtcaccaagtgtcttacggtgagatgatcggttgtgacaaccctgattgttctatcgaatggttccatttcgcctgcgtcggattgaccaccaaaccccgagggaaatggttttgtcccagatgctcccaggaacgcaagaaaaagtag

SEQ ID NO: 29000 - DNA, 840 bp, synthetic construct
  misc_feature 1..840: note = Description of Artificial Sequence: Synthetic coding sequence
  source 1..840: mol_type = other DNA
atgctttctccagctaatggagaacagctccacctggtgaactacgtggaggattatctggattcaatcgagagtctcccttttgacctgcaaaggaatgtgtcattaatgcgtgagatcgatgcaaaataccaggagatccttaaggagctggacgagtgctacgagcggttttctagggagaccgatggggcacagaaacgcagaatgctccattgcgttcagcgcgctctcatccgaagtcaggagcttggtgatgaaaaaatccaaatcgtgagtcaaatggtggagctggtggagaataggaccaggcaggtggatagtcatgtggaactgtttgaggcgcagcaggagctgggggacacggcaggcaattcagggaaagccggagctgacagaccaaagggtgaagccgctgcccaagcagacaaacctaatagtaaaagatcaaggaggcaacgaaataatgaaaatagagaaaatgcttcctcaaatcatgatcacgatgacggagcgagcggaaccccgaaagaaaaaaaggctaaaacctcgaaaaagaagaagaggtctaaggcaaaagccgagcgagaagcatcccccgcagacctccccattgatcctaacgaacctacctattgtctgtgtaatcaggtctcatatggagaaatgataggatgtgacaacgatgagtgtcctattgagtggtttcatttctcttgcgtggggctgaatcacaaacccaaaggcaaatggtactgtcctaaatgccgaggggagaacgaaaagaccatggacaaggccctggaaaaaagcaagaaggagcgcgcatataaccggtag

SEQ ID NO: 29001 - DNA, 708 bp, synthetic construct
  misc_feature 1..708: note = Description of Artificial Sequence: Synthetic coding sequence
  source 1..708: mol_type = other DNA
atggagatattgaaagaactcgatgaatgctacgaaaggttctcccgggaaacagacggcgctcagaaacgcaggatgttgcactgtgttcaaagggcattgattcgtagtcaagaactcggagatgagaaaattcaaatcgtaagccagatggtggagctcgttgagaaccgtacacgccaagttgatagccacgtagagctgttcgaggctcaacaagagttaggtgacacggcgggaaacagcggtaaggccggtgcagaccgcccaaagggggaagcggcagcccaggcggacaagcccaattcaaaacgtagtcgtaggcagaggaataacgagaacagagagaacgcttctagcaatcatgaccatgacgatggcgcttctggcacaccaaaggagaaaaaagcaaaaacatctaaaaagaagaagcgttctaaggccaaggcggagcgcgaggcaagtcccgctgacctgccgattgaccccaacgaacctacctattgcttatgcaaccaagtgagctatggagaaatgataggatgcgacaatgatgagtgtccgatagaatggtttcacttctcttgcgtcggccttaaccacaagcccaaggggaaatggtactgtcctaaatgccgcggtgaaaatgaaaaaacaatggataaagccttggaaaaaagcaagaaagaaagagcatataaccggtag

SEQ ID NO: 29002 - DNA, 1269 bp, synthetic construct
  misc_feature 1..1269: note = Description of Artificial Sequence: Synthetic coding sequence
  source 1..1269: mol_type = other DNA
atgagcttcgtggagtgcccctaccactcgcccgctgagaggttggtggccgaagctgacgaaggaggtccttcagctatcaccggaatgggactttgtttccggtgtctgctgttttccttctccggaagatctggggtggagggaggccgtgttgatctaaatgtgtttggttcactgggattgcagccttggatcggaagctcccgatgctggggaggaccttgctcatccgcacttcgatgtggctggttctcaagctggccaccaccatccaagagtgccattcctataggaggcggatccaggggcgctggacgggtgtccagatggcccccaccccactggctcgaggcatggagggtctcacccctgcccctctcgcccttaagccctgctactttcggccgagggttcatcgccgtcgccgtgattccgggtctgtgggccagggggcgtggctgcagttctgaccggttacccagacctgccggtccagcccgtaggcagtttcaagccgctagcctgctcactcgtggatggggcagagcctggccctggaaacagattctgaaagaactggatgagtgttatgagcgtttcagccgggaaacagatggagctcaaaagcgacgcatgctccattgcgtccagcgtgctctgatcaggtcccaggagctcggcgatgaaaaaatccaaattgtgagccagatggtggagttggttgagaaccgtacccgacaggttgattcgcacgtagagctgtttgaagcccagcaagagctgggggatacggccggaaactccggcaaagctggcgctgaccgacctaaaggagaagcggctgcacaggcggacaagccaaactccaaacggagccgcagacaaaggaacaacgaaaacagggaaaatgcgtccagtaatcacgaccacgatgacggcgctagcggtacccctaaagagaaaaaggccaaaacctcaaagaagaagaaaagaagtaaggctaaggcggagcgcgaagcatcacccgctgatctgccgattgaccctaatgagcccacgtactgtttgtgtaatcaggtttcttacggtgagatgatcgggtgtgataacgatgaatgtcccattgagtggtttcatttcagctgtgtgggactgaaccacaagcccaagggcaagtggtactgtcctaagtgtcgtggggaaaatgagaagaccatggacaaggcgttagagaagtctaaaaaagaacgagcttacaatagatag

SEQ ID NO: 29003 - DNA, 633 bp, synthetic construct
  misc_feature 1..633: note = Description of Artificial Sequence: Synthetic coding sequence
  source 1..633: mol_type = other DNA
atgttacactgcgtccagcgcgcattgatcagaagccaggagctaggggacgagaagatacagatagtgtcccagatggtggagctggtggaaaatcggaccaggcaagttgatagccatgttgaactgttcgaggcccagcaggaactgggcgatactgccggtaattcagggaaggctggggctgaccgccctaagggagaagctgccgctcaggctgataagcccaactctaagcgctctagaagacagaggaataatgagaatcgcgaaaatgcttcatctaatcacgaccacgatgatggggcaagcggaacacctaaggaaaagaaggctaaaactagtaagaaaaagaaaagaagtaaagccaaagctgaacgtgaagcctccccggcagacctacctatcgatcctaacgaaccaacttactgtctgtgtaaccaggtctcctatggtgaaatgatcggatgcgacaatgacgagtgtcccatcgaatggtttcatttctcttgtgtgggcctgaatcataaaccaaagggcaagtggtactgcccgaagtgcaggggtgagaatgaaaaaacaatggacaaagctctcgagaagtcaaaaaaagagcgggcatacaaccgttag

SEQ ID NO: 29004 - DNA, 747 bp, synthetic construct
  misc_feature 1..747: note = Description of Artificial Sequence: Synthetic coding sequence
  source 1..747: mol_type = other DNA
atggctgcgggaatgtatctggagcattaccttgattccatagagaatcttccctttgagttacagcgcaatttccagttgatgcgggacttggatcagagaacggaggatttgaaggcggaaatagacaaactggcgactgaatatatgagttctgcccgtagcttatcctccgaggaaaagctggcattgttgaagcagatacaagaagcatacggcaaatgcaaagagtttggagacgataaggtccagttggctatgcaaacgtatgaaatggtagacaaacacatacgtcgcctcgacactgacctcgcacgatttgaggccgatctgaaggagaaacagatcgagtctagtgactacgactctagttcctccaagggcaaaaagtctcgaacccagaaggagaagaaagccgctcgggctagatccaaaggcaagaacagtgacgaggaggcgcctaagacagcccagaagaaactcaagctagtcagaacctcccccgagtacggcatgccctctgtgacattcgggtcagtgcatccatccgacgtcctcgacatgccagtggacccaaacgaaccaacttactgcctgtgtcaccaggtttcttatggcgagatgataggatgcgacaatcctgactgttcaatagagtggtttcatttcgcgtgcgtgggtctaactacgaaacccagaggcaaatggttttgccccaggtgctcccaggagagaaagaaaaagtag

SEQ ID NO: 29005 - DNA, 750 bp, synthetic construct
  misc_feature 1..750: note = Description of Artificial Sequence: Synthetic coding sequence
  source 1..750: mol_type = other DNA
atggctgctggcatgtacttagagcattacttggacagcatcgagaatctaccttttgagctgcagaggaatttccagctgatgagggacctggatcagcggacagaggacttgaaggcagagatcgacaagttggctacagagtacatgagctctgcaaggagtctgtcctcggaagagaaactggcgcttctcaaacaaatccaagaggcctacggtaaatgcaaagaatttggggacgacaaggtacagctggcgatgcagacctacgaaatggttgataagcacattaggcggctcgatacagatttagcaagatttgaggctgacctgaaggagaagcagattgagagcagtgactacgactccagttcatcaaaaggcaagaagaaggggagaacgcaaaaggagaagaaagcagctagggcaaggtccaaaggtaagaatagtgatgaagaagctcccaagactgcccagaagaaactgaaactggttaggacaagcccagaatatggaatgccgtccgttacatttggatctgttcacccaagtgatgtactggatatgcccgtggatccaaacgaaccgacatactgtctgtgtcaccaggtgtcttacggcgagatgatcgggtgtgacaaccccgattgctctattgagtggttccacttcgcgtgcgtagggctaaccactaaaccacggggaaagtggttttgccctaggtgctctcaggagcgaaagaagaagtag

SEQ ID NO: 29006 - DNA, 741 bp, synthetic construct
  misc_feature 1..741: note = Description of Artificial Sequence: Synthetic coding sequence
  source 1..741: mol_type = other DNA
atggccgctggcatgtatttggaacattacctggactctatcgagaacctgcctttcgagctacagcgcaattttcagttaatgagagacctggaccagaggacagaagacctgaaggccgaaatcgataagttggccacggaatatatgagttccgcaaggtcgctttcttctgaagagaaactcgccttactcaaacagatacaagaagcctatgggaagtgcaaggaattcggagacgacaaagtccagttagcgatgcagacgtatgaaatggtggacaaacacatacgacggctagacaccgacttggctaggttcgaagccgacttgaaggagaagcagatagaaagttcagactatgactcctctagctcaaaggaagggcgtacacaaaaagagaaaaaagcagcgagagctcggagtaaagggaagaactctgacgaggaggctccgaaaaccgcacagaagaagttaaaacttgtgcggaccagccctgaatacgggatgccatctgtgacctttggatctgtgcacccttctgatgtcctggatatgcctgtggaccccaatgaacctacatattgcctttgtcatcaggtttcctatggggagatgattgggtgtgacaatcccgattgtagcattgagtggttccattttgcctgcgtaggtctcacgactaagccgaggggaaagtggttttgtcctagatgcagtcaggagcgcaagaagaaatag

SEQ ID NO: 29007 - DNA, 540 bp, synthetic construct
  misc_feature 1..540: note = Description of Artificial Sequence: Synthetic coding sequence
  source 1..540: mol_type = other DNA
atggccgcaggcatgtatttggaacattatctagatagcatcgaaaatttaccgtttgaactacagcgcaattttcagctgatgcgggacctcgaccagcggacagaggacctgaaagccgaaatagacaaattggctactgagtacatgagctcggcgagaagtttgtcctccgaggagaagttagcattactgaagcagatccaggaagcgtacggcaagtgtaaagagtttggcgacgacaaagtgcagctggcaatgcagacatacgagatggtggacaaacacattcgacggctggacactgacctggcacgatttgaggcggatttaaaagaaaaacagatcgaatcttccgactatgacagttcctcttccaagggaaaaaagaaaggtaggacccagaaagaaaagaaagccgcacgcgcacgcagcaaggggaaaaacagcgacgaggaggcgcctaaaacggcccagaagaaattgaaactggtacgcactgtacctctgtctggaagcattctgccggtgtggggatag

SEQ ID NO: 29008 - DNA, 678 bp, synthetic construct
  misc_feature 1..678: note = Description of Artificial Sequence: Synthetic coding sequence
  source 1..678: mol_type = other DNA
atggcggcaggaatgtatctggaacattacctggataatctcaaagctgagatcgataagttagcaactgagtacatgtcctccgcacgttccctgagttcagaggagaaactggcgttactcaagcagattcaagaagcgtatggtaagtgtaaagagttcggggatgataaagtccagctagctatgcagacctacgaaatggtcgataagcatattagaaggctcgatactgatctggcgagattcgaagcagatcttaaggaaaaacaaattgagtcctccgattatgatagctcgtcaagcaaaggtaaaaaaaaaggccgtacccaaaaggaaaaaaaggcagctcgggctcgaagcaaaggaaaaaattccgacgaggaggctcccaaaaccgcacagaaaaagctgaagctagtgaggacgtccccagaatacggtatgccctcggtcacgtttggcagcgtgcaccccagcgacgtcctggacatgcctgtggatcctaacgagcccacgtactgcctctgccatcaagtctcctatggggagatgatcggatgcgacaatcccgactgtagtatcgagtggtttcacttcgcatgcgtgggactgaccacaaagccacgtggaaagtggttttgcccaagatgctcccaggagcgtaagaagaagtag

SEQ ID NO: 29009 - DNA, 3729 bp, synthetic construct
  misc_feature 1..3729: note = Description of Artificial Sequence: Synthetic coding sequence
  source 1..3729: mol_type = other DNA
atggcgtcgccccctgagtctgacggcttctctgacgttcgcaaagtcgggtacttgaggaagccaaagtccatgcataagcggttcttcgttctgcgcgctgcctctgaagccggtggtcccgctcgactggagtattatgagaatgaaaagaaatggcgccataaatctagtgcccctaagaggagtatacccttagaaagttgctttaacatcaataaacgggcagacagcaagaacaaacacctggtagctctttatacgcgcgacgaacacttcgctattgcggctgattctgaggccgagcaggactcctggtaccaggcacttctccagctgcacaatcgggctaagggccatcacgacggagcggcagcgctgggggctggagggggaggaggctcatgcagcggatcatcagggctcggcgaagcgggagaagacttgagctatggcgatgtcccgcctggccctgcctttaaggaggtctggcaggttatcctgaaacccaagggattaggccagaccaagaatctcatcggtatctataggttgtgcctgacctcgaagacaattagttttgtgaagctcaactctgaggcagctgccgtggtgctgcagcttatgaatatcaggagatgcgggcacagcgaaaacttcttttttattgaggtcggcaggagtgcagtgaccgggccaggtgaattttggatgcaggtggacgactctgtggtggctcagaacatgcatgagaccattttagaggctatgcgagccatgtcagatgagttcagacccagatccaagagccagtcctcttccaactgctcaaacccgatttccgtaccattaagacgtcaccacttaaacaaccccccaccatcccaagtaggcctaacaagaagatctagaactgagtctattacagccaccagtcccgcttccatggtggggggaaagcctggctccttccgcgtgagggccagcagcgatggagaggggaccatgagtcgacccgcttcagtggatggcagtcccgtgtccccatctaccaacaggacccacgcgcatcggcataggggcagcgcacggctgcacccgccactgaaccactctaggtctattcctatgccggctagtagatgttctccctcagcaacctcaccggtttcactcagttcttcatccaccagcggacatgggtccacatccgactgcctgttcccacgcagatcctcggccagtgtcagcggaagtcctagcgacggtgggttcatttcttcagacgagtacggttcgtctccttgcgatttccggtcgagttttcgatcagttacaccagacagtttgggacacaccccccctgctcgcggtgaagaagagctcagtaattacatctgcatgggaggcaagggaccctccactttgaccgcgccaaatgggcattatatactgagtcgtggcggaaatgggcaccggtgtacccctggaactggactaggaaccagccctgctctggcaggtgatgaggcagcctcagccgcagacctcgacaataggtttcgcaaacgcacccatagcgccggaacctcccccaccatcacccaccaaaaaaccccatctcagtcgagtgttgccagcatagaagaatataccgagatgatgcccgcatatccgcctgggggaggatccggagggcgtttgcctggccacagacatagcgcattcgtccccaccagaagctaccctgaggaaggcctcgaaatgcatcctctggaacgcagagggggacaccataggccggatagctctaccctgcacaccgacgatggatatatgcccatgagtcccggagtagcacccgtcccttctggtaggaaaggttccggtgactatatgccgatgagcccgaagtctgtgagcgcccctcagcagataattaatcccattcgcagacacccgcagcgtgtcgatcccaacggatacatgatgatgtctcccagtgggggatgttcgccagatattggcggtggcccatcctcatcttctagtagtagtaatgcagttccatctggcacctcctatggcaagctctggaccaatggagtgggtggacaccactctcatgtcctgcctcacccgaagccccctgtcgaatcatcaggagggaaactgctcccgtgcacgggggactatatgaacatgtccccagtgggcgactcaaacactagctctccctcagactgctattacgggccagaagatccacagcacaaacctgtgttgtcctactacagtttgcccaggtccttcaaacacacccagaggcccggagaacccgaggagggagctcgtcatcaacatctgaggctatccacctcttccgggagactcctctacgctgccaccgcagatgactcctcatctagcacctcatcagactctcttgggggaggctattgcggcgcacggctggaaccttctcttccacacccacatcatcaggtgctccagccccacctgcctaggaaggtggataccgctgcgcagaccaatagtcgcctggccagacccactcggctgagcctaggcgatcctaaggcgagcacgttgcctcgggctagggagcaacaacagcagcagcagcctctgctacatccacccgaaccaaagtctcctggagaatatgtgaacattgaatttggatccgatcagtccgggtatctgagcggacccgtcgcttttcactcttcaccgagcgtgcgctgcccgtcccagctgcagccagctcccagagaagaagaaacaggtacggaagagtacatgaagatggacctcggtcctggacgtagagccgcatggcaggagtccacaggtgtggagatgggtaggcttgggcctgccccacccggagcggcatctatctgtaggcccacaagagccgtcccctctagcagaggcgactatatgactatgcagatgtcttgccctcgccagagttacgtggacacatctcccgctgccccagtctcctacgcggacatgcgaacgggcatcgccgctgaagaggtctccttaccacgcgctacgatggccgctgctagttcttccagcgccgcaagcgccagtcctaccggtccccagggagccgctgaactggccgcacactcaagtttactgggtggaccacaaggaccaggcggaatgtctgccttcaccagggtgaacctgtcgccaaatcgtaatcaaagcgctaaagtaattcgagcggatccccagggttgtagacggagacattctagcgaaacattcagctccacgccatccgccactagggtcgggaataccgttccgttcggcgcaggcgctgccgtagggggtggaggcggatcctcgtccagcagtgaggatgttaaacgtcactcctccgcgtctttcgaaaatgtgtggttaaggcccggtgagctgggcggagctcctaaggagcctgcaaaactctgtggtgcggctggcggtctggagaacggactgaactacatcgacctggatttagtgaaggattttaagcagtgtcctcaagaatgtacacccgaaccccagcctcccccaccacctccacctcaccagcctctggggtctggcgaaagctcttcaacacgcaggtcctctgaggacttaagcgcatatgccagcatctcttttcagaaacagccagaggatcgccagtag

SEQ ID NO: 29010 - DNA, 588 bp, synthetic construct
  misc_feature 1..588: note = Description of Artificial Sequence: Synthetic coding sequence
  source 1..588: mol_type = other DNA
atgggtaaaatctcaagtctgcctactcagttattcaaatgctgcttttgtgactttcttaaagttaagatgcatacaatgtcttctagccacctgttttacctggcgctgtgtctccttacgttcactagctctgctaccgcgggacctgagactctgtgcggagccgagctggtagacgcattgcaattcgtctgcggggatcggggattctacttcaacaaaccaacaggttatggaagttctagtcgcagagccccacaaaccggaattgtggacgaatgctgctttcggagctgcgatctcaggagactggagatgtattgtgcacctctgaaacctgccaagagcgccaggagtgtcagggcacaacgacataccgatatgccgaagacccagaagtaccagcccccatctacaaataagaatactaagtctcagcgaagaaagggctggcctaaaacacacccgggaggggaacagaaggaaggaacagaggcgtccctgcagatccgcggtaagaagaaggagcagcgacgggaaatcggatctaggaatgccgaatgccgcggtaagaaaggaaaatag

SEQ ID NO: 29011 - DNA, 462 bp, synthetic construct
  misc_feature 1..462: note = Description of Artificial Sequence: Synthetic coding sequence
  source 1..462: mol_type = other DNA
atgggaaaaatatcctctctccctacacagctgttcaagtgctgcttctgtgactttcttaaagtgaagatgcatactatgtcctcttctcatctgttttatctcgcactgtgtctgctaaccttcacgtcttcagccactgccggtccagaaactctgtgcggtgctgagctggtggatgccctccagttcgtgtgtggagaccgcggattttattttaacaagccaactggctacggatcgagctctcggcgagccccacagacagggatagtggacgagtgttgttttcgatcctgcgacctgcggagactggaaatgtattgtgccccactgaagccagccaaaagcgctaggagtgtccgggctcagcgacacacagacatgccgaagacccagaaggaggttcacctgaaaaacgcatctcgaggcagcgccggtaataagaactaccgaatgtag

SEQ ID NO: 29012 - DNA, 477 bp, synthetic construct
  misc_feature 1..477: note = Description of Artificial Sequence: Synthetic coding sequence
  source 1..477: mol_type = other DNA
atgggtaaaatttcttccctacctacccagctgttcaagtgctgcttttgtgactttcttaaagtgaaaatgcacactatgtcatcttctcacctcttttacttggccttgtgtctgcttacattcacaagctctgccactgcaggcccagaaaccctttgcggtgctgaactggtggacgccttgcagtttgtctgtggtgaccgcggtttttactttaacaagcccacaggctacggaagctccagccgcagagcaccacagacagggatagttgatgagtgttgctttcggagttgcgaccttcgaagacttgaaatgtactgcgccccactgaagcccgctaaaagcgccagatccgtcagggcgcagcggcatacagatatgcctaagacgcagaaatatcagcccccttccacaaataagaacaccaagagtcagcgaaggaaaggaagcaccttcgaggaacgcaagtag

SEQ ID NO: 29013 - DNA, 420 bp, synthetic construct
  misc_feature 1..420: note = Description of Artificial Sequence: Synthetic coding sequence
  source 1..420: mol_type = other DNA
ctaaaagtgaaaatgcatactatgtcgtcctcacatctgttttatctggccctctgtttgcttacttttacctcgtctgctactgcaggcccagagacgctgtgcggcgcagaactggtcgacgcacttcaatttgtatgtggtgaccggggtttctattttaataagcccacagggtatggaagtagtagtagacgggcacctcagacaggcattgtggatgagtgttgcttccgatcatgcgacttgaggcggctagaaatgtactgtgcacccctcaaaccagccaaatcggcaaggagcgttagggcccaaagacatacggatatgcccaaaacgcaaaagtatcaaccgccaagtactaacaagaataccaagtctcagcgacggaaggggagcactttcgaggaacggaagtag

SEQ ID NO: 29014 - DNA, 414 bp, synthetic construct
  misc_feature 1..414: note = Description of Artificial Sequence: Synthetic coding sequence
  source 1..414: mol_type = other DNA
atgattacccccacagtgaagatgcacacaatgagttcgtcgcacttattctacttggctctctgcttacttactttcacctctagcgccaccgcgggtcctgagacgctgtgcggcgcagagctcgttgatgctcttcagtttgtttgtggggaccggggattttattttaacaaacctaccggatatggcagcagttctcggagagccccacagacaggcatcgtggatgagtgctgcttccgtagctgcgacctgcgcaggctagaaatgtactgtgcaccgttgaaacccgctaagagcgcacgcagcgttcgcgctcaacggcacacagatatgccaaaaacacagaaggaagtacacctgaaaaatgcgagcagaggtagtgcgggaaacaagaactaccggatgtag

SEQ ID NO: 29015 - DNA, 477 bp, synthetic construct
  misc_feature 1..477: note = Description of Artificial Sequence: Synthetic coding sequence
  source 1..477: mol_type = other DNA
atgggaaagatttcttccctgccgacccagctgtttaagtgttgcttttgcgactttttaaaagtgaagatgcatacaatgagcagcagccacctgttttaccttgccttatgtttgctcacatttacgtcttccgctaccgccggtcccgagactctctgcggggcagaattggttgatgcactccagttcgtttgtggtgatcgtggattttactttaataaaccaacagggtacggatccagctctcggagagcaccacaaacaggtattgttgacgagtgttgcttccgttcttgcgacctccgcaggctagagatgtattgcgctcccttgaaacctgctaagtctgctcggtctgtccgcgctcaaaggcataccgacatgcctaaaacccagaagtatcagcccccttccaccaacaaaaacacgaaatctcagcggcgaaaaggttcaactttcgaagaaaggaaatag

SEQ ID NO: 29016 - DNA, 4103 bp, synthetic construct
  misc_feature 1..4103: note = Description of Artificial Sequence: Synthetic coding sequence
  source 1..4103: mol_type = other DNA
atgaaaagcggcagcggaggcggttctcccacaagcctctgggggttattatttctgtcggccgctctgtctctctggccaaccagcggtgaaatatgtgggcctggtatcgacattaggaatgattaccaacagcttaaaagactcgaaaactgtacagtaatagaaggatacttacatattctgttgattagcaaggctgaggactacagaagctaccgttttccaaagctgacggtgatcaccgaatacctactccttttccgagtggcaggacttgagtccctgggggatctgttccccaaccttactgttattagagggtggaaactgttttacaattacgccctcgtgattttcgaaatgacaaacctgaaagatatcggcctgtacaacttaagaaatatcactcgcggtgccataaggattgaaaaaaacgcagatctctgttacctgagcactgtcgattggagcctaatcctcgacgccgtgtccaataattacatcgtgggtaacaagccgccaaaggagtgcggggacctgtgtccaggaacaatggaagaaaagcccatgtgcgagaagactaccatcaataatgaatataattatcgttgctggaccacaaaccggtgccagaagatgtgtcctagcacttgcggcaaaagggcgtgcactgagaacaatgaatgctgccaccctgaatgcctgggcagctgctcagcaccagataacgatacagcttgtgtcgcttgcagacactactattacgccggtgtgtgcgttcccgcttgtccccctaacacctaccggttcgaaggatggaggtgcgtggacagggacttttgtgctaacatccttagtgctgaatcctcagactccgaaggatttgtgatccacgatggagagtgtatgcaggaatgtccaagcggcttcatccgcaatggttcccagtctatgtactgtataccttgcgagggcccatgcccgaaggtatgcgaggaagaaaaaaaaacgaaaactattgactcggtgacatccgcccagatgctgcagggttgcaccatcttcaaaggcaacctgttgatcaacatccggagaggcaacaatatcgcttccgagttagaaaactttatgggcctcatcgaagtcgtcactgggtacgtcaagattagacactcccacgccctggtcagcctcagttttttgaaaaatctgagactcatccttggcgaggaacaattagagggtaattattctttctatgtcctggataatcaaaacctacaacagctgtgggactgggaccacagaaacctcaccattaaagccggaaagatgtattttgccttcaacccgaagctctgcgtctcagaaatctaccgcatggaggaagttacaggaacaaagggcagacagtccaaaggcgacataaatacgagaaataatggcgaaagggcatcttgcgaatcggacgttctccactttacaagcaccaccacaagtaagaacaggatcataattacctggcacaggtatcggccaccagattatagggatcttatttccttcactgtttactacaaggaagcacccttcaagaatgtgactgaatatgacggccaggatgcatgtgggtccaattcatggaacatggtggacgtagatctgccgcctaataaggacgttgagcctgggatcctgttgcacggcctgaaaccgtggacccagtacgcagtgtacgtgaaagccgttaccctgaccatggtggaaaatgaccatataagaggcgcaaagtctgaaatcctctacatcagaaccaatgcctcagtccccagcattcccctggatgtgctctccgcttcaaacagctcgtcacaactgatcgtgaagtggaatccgccaagtctcccaaacggaaacctctcctactacatcgtccgctggcagagacagcctcaagatggatatctgtacaggcataactactgctctaaagataaaatccctattagaaaatacgccgacggcactattgacattgaagaggtgacggagaatcccaagacagaggtctgcggaggtgaaaaggggccatgctgcgcctgcccaaaaacagaggcagaaaagcaggccgagaaagaagaagctgaataccggaaggtctttgaaaattttttacacaattctattttcgttccgcgtcccgagcggaagcggagagatgtgatgcaggtggccaacaccactatgtccagtcggtctagaaacaccactgccgctgacacatacaacatcaccgaccccgaggagctggagactgaataccccttttttgaatctagagtggataataaagaacgtaccgtgatatctaatctgagaccattcactctttatcggatcgatattcattcctgtaaccacgaagcggaaaagttggggtgctccgcatccaatttcgtgtttgcacgaacaatgcccgcagaaggggctgatgatattccaggtcccgttacctgggagccaagaccggagaattcaatattcttaaaatggcccgagcctgagaaccccaacggtctgatcctaatgtatgagatcaaatacggaagtcaggtcgaggatcagagggagtgcgtgagtcgccaggagtatcggaaatacgggggagctaaactgaataggctcaaccctggcaactacacggctaggatacaggccacaagcctttcaggcaatgggagttggactgatcccgtctttttttatgtgcaggcaaaaacaggatatgaaaattttattcacctcatcatagcgctgccagtagcggtgttgcttattgttggcggtctagtcatcatgctgtacgtctttcatagaaagaggaacaatagccggctgggaaatggcgtcctatatgcctcagttaatcctgagtactttagcgcagctgatgtgtacgtgcccgacgagtgggaagtggcaagggagaaaatcacaatgtccagagagttgggacagggatcattcggcatggtgtatgagggggtggccaagggtgttgtgaaagacgaacctgagaccagagtggccattaaaacagtgaatgaggctgcctctatgcgggaacggattgaattcctgaacgaggcctctgtgatgaaggagttcaactgccaccacgttgttcgccttctcggtgttgttagccaggggcagcctacactcgtaatcatggagctgatgacacgcggagaccttaaaagctaccttcggtcacttcgccctgaaatggaaaataatccagttctggcgcctccttctcttagtaagatgatacagatggccggagagatcgccgatgggatggcatacctcaatgctaataaatttgtccaccgggatctcgctgcgaggaattgcatggtggcagaggattttaccgtgaaaattggcgatttcggtatgacgagagatatctatgaaactgactattacagaaagggcggtaaggggctcctgccagtcagatggatgtcaccagagagcttgaaagatggagtttttactacatatagtgatgtatggagttttggcgtggtactgtgggaaattgcgaccctcgccgagcagccatatcagggactgtctaatgaacaagtgctgcggtttgttatggaggggggtctgcttgataagccagacaattgtccagatatgctattcgaactgatgcgcatgtgctggcagtataaccctaagatgcggccatcatttttagaaatcatttcgagtattaaggaagagatggaacccggattcagagaggtgagcttctattattccgaagagaacaaacttcccgagccagaagagctcgatcttgaacctgaaaatatggagagtgtgcctttggatccatctgcctcctcctcgtccttacccctgcctgaccgacattccggtcacaaggccgagaatggccctggacccggagtgcttgtcctgcgcgctagcttcgacgaaagacagccctatgctcatatgaatggaggcagaaaaaatgaacgggcactgcctctgccccagtccagcacgtgtta

SEQ ID NO: 29017 - DNA, 543 bp, synthetic construct
  misc_feature 1..543: note = Description of Artificial Sequence: Synthetic coding sequence
  source 1..543: mol_type = other DNA
atggggatcccaatgggcaagagtatgttagtactgctgaccttcctggcttttgcctcctgctgtatagcggcttacagaccaagtgagaccctttgtggcggtgagctcgtggacaccttacagttcgtgtgtggcgaccggggtttttacttctcgaggccagcaagcagagtatctcgacgctccaggggtatcgttgaggagtgctgcttcagatcctgcgatctggctctgctggagacctattgcgccactccagcaaagtccgaacgagacgtgtctacgccacctactgttttgcctgacaactttccacgctacccagttgggaaattttttcaatatgatacatggaagcagtccacacaacgactgcgtcgaggcctgcctgcactgctcagagccaggcggggacacgtgctggcaaaggagctggaagcatttcgcgaggcaaagaggcaccgcccattgattgccctgcccacacaggacccggcacacgggggtgctccgccagaaatggcgagcaaccggaaatag

SEQ ID NO: 29018 - DNA, 543 bp, synthetic construct
  misc_feature 1..543: note = Description of Artificial Sequence: Synthetic coding sequence
  source 1..543: mol_type = other DNA
atgggcattccaatggggaagtccatgctggtcttactcacgttcctggcttttgcctcttgctgcattgcagcttacagacccagtgagaccctatgcggcggtgaactggtcgacaccttgcagtttgtgtgcggggacagaggcttttattttagtaggccagcctctcgggtcagccgccgtagtagaggaatcgtcgaagaatgctgcttcaggagttgcgacctggctttgttggaaacctactgtgctacccccgcaaaaagcgaaagagatgtgagcaccccccctacggttttgcccgataacttccctcgctatccggttggcaagtttttccagtacgacacttggaaacagtccacacagcgtctgcgacggggactgccggctctgctgagggctaggcggggacacgttcttgccaaagagctggaggcattccgggaagccaagcggcacaggccccttattgccctgcctacacaggatccagctcacgggggtgcgccaccagagatggccagcaaccgtaagtag

SEQ ID NO: 29019 - DNA, 552 bp, synthetic construct
  misc_feature 1..552: note = Description of Artificial Sequence: Synthetic coding sequence
  source 1..552: mol_type = other DNA
atgggcattccaatggggaagagtatgcttgtcttactcacctttctggccttcgccagttgctgtattgctgcgtacagaccaagcgaaaccctgtgcggaggggaactagtcgatacgctgcagtttgtatgcggcgatcggggattctacttccggctccccggacgcccagcatcgcgagttagccgcaggagtagggggatcgttgaggaatgttgcttccgctcttgtgacttagcactgctagaaacctactgcgccactcctgccaagtccgaacgggatgtgtccacaccccctacagtactgccagataacttcccacgctaccctgtagggaaattttttcagtacgacacctggaagcagtctacccagcgtctccgaagggggctacctgctctgttaagagcacgacgcggacatgtgctggctaaggagctggaggccttcagggaggcaaagcggcatcgccctctcattgctctcccgacccaggatccagctcacgggggagcccctcccgaaatggctagcaatcgcaagtag

SEQ ID NO: 29020 - DNA, 552 bp, synthetic construct
  misc_feature 1..552: note = Description of Artificial Sequence: Synthetic coding sequence
  source 1..552: mol_type = other DNA
atgggtatccccatggggaaaagtatgctggtgttgctaaccttccttgcattcgcgtcttgctgcatcgccgcataccgccctagcgagactctttgtggtggtgagttggtcgacactctgcaatttgtgtgtggggatagagggttttactttcggctcccgggacggccagcttccagagtttcacggagaagtagaggtatcgtcgaagagtgctgcttccggtcttgtgacctggctttgttagagacgtattgtgccacccccgcaaagagcgagagggacgtcagcacgccaccaacagtgctccctgataattttccgaggtaccccgttggcaaattcttccagtatgatacttggaagcaatcaactcagagactccgccgtggactgccagccctactccgagcacggcgtggtcacgtgctcgccaaggagctggaggcctttagggaggcaaagcgacataggccgctgatcgccctccctacacaggatcccgcacacgggggagcccctcccgaaatggcctcgaatcgaaagtag

SEQ ID NO: 29021 - DNA, 543 bp, synthetic construct
  misc_feature 1..543: note = Description of Artificial Sequence: Synthetic coding sequence
  source 1..543: mol_type = other DNA
atgggcatcccaatgggcaaatccatgctggtgttgcttacatttctagcattcgcttcttgctgtatcgctgcctacaggccgtctgaaactttatgtggcggtgagctggtggacaccctgcagtttgtctgcggggataggggcttctactttagtaggcccgcttcacgcgtgagtagaagaagtcgcggtatcgtcgaggagtgctgctttagaagctgcgacttagccttgctggagacttactgcgctacaccagccaaatctgaaagagacgtctccaccccacctaccgttctccctgacaatttcccacgctatcccgtggggaagtttttccagtatgatacttggaaacagtctacccaaaggttgagacgtggacttcccgcacttctccgcgctcgcaggggccacgttctggcaaaagaacttgaagcatttcgtgaggctaagcggcaccgaccactcattgcccttccgacacaggatccagcccatggcggagctcctccggagatggcgagtaatcgcaagtag

SEQ ID NO: 29022 - DNA, 552 bp, synthetic construct
  misc_feature 1..552: note = Description of Artificial Sequence: Synthetic coding sequence
  source 1..552: mol_type = other DNA
atgggcatccctatgggtaaaagtatgttagtgctgcttacttttctggcgtttgccagctgctgcattgccgcttaccgaccaagcgagacactgtgtggaggggaactcgtcgatacactacaattcgtgtgcggggaccgagggttttactttaggttacctggacgaccagcttcacgagtgtccaggaggtcccggggtatagtcgaggagtgctgttttaggtcttgcgacttggcactcctggagacatattgcgcaacccccgcaaagtcagaacgggatgtgtccacacccccaacagtgttgcctgataacttcccccgatatcccgtcggaaagttcttccagtatgatacgtggaagcagtctacacagcgactgcgcagggggctgcctgcactgctgagggcccgtcgcggtcatgtactcgccaaggaacttgaagccttcagagaggctaaaagacatagacctctgatcgccctgccaactcaggaccccgcacatggcggtgctccccctgagatggcctctaatcgaaagtag

SEQ ID NO: 29023 - DNA, 543 bp, synthetic construct
  misc_feature 1..543: note = Description of Artificial Sequence: Synthetic coding sequence
  source 1..543: mol_type = other DNA
atgggtatccctatgggaaagtcaatgctggtcttgctgactttcctggcctttgcctcttgttgcatcgccgcataccgaccatcggaaacgctctgtgggggagaactggtggatacactgcaatttgtgtgcggggacaggggattttacttttcaagacccgcttcaagagtcagcaggcgcagcaggggcatcgtcgaggaatgttgtttccgttcttgcgacctggcattattggaaacttattgcgcaacaccagctaagtccgaaagagatgtaagcacacccccaacagttctccccgacaactttccgcgttatcccgtaggcaaattttttcaatatgacacttggaagcagtccacacagcgactgcgacggggacttccggctctcttacgggctagacggggtcacgtgcttgccaaagaactggaagctttccgagaggctaagcggcaccgtccacttatcgcactgccaacccaggaccctgctcatggtggagcaccacctgagatggcatccaatagaaaatag

SEQ ID NO: 29024 - DNA, 552 bp, synthetic construct
  misc_feature 1..552: note = Description of Artificial Sequence: Synthetic coding sequence
  source 1..552: mol_type = other DNA
atggggatcccgatgggaaaaagcatgctcgtgttacttacattcctcgcctttgcttcttgttgtatagccgcatacaggcccagtgagacactttgtggcggtgagcttgtggacacattgcagttcgtatgcggggaccgagggttttacttccggttacctgggaggcctgcctctcgcgtgtcccggagatctcggggaattgttgaggaatgttgctttaggtcttgcgatctcgccctcttggaaacctattgcgccacgcccgctaaatcagagagagacgtgagtactcctccaacagtactgcctgacaatttccctaggtatccagtcgggaagtttttccaatacgacacctggaaacaatctactcagagactgagaagaggccttcccgcacttttgagggcgaggcgcggacacgtgctagcaaaagaactagaagccttccgtgaagctaagcgccatagacccttgattgctctccccacacaagatcctgctcatggcggagcccctcctgagatggcttctaaccgaaaatag

SEQ ID NO: 29025 - DNA, 543 bp, synthetic construct
  misc_feature 1..543: note = Description of Artificial Sequence: Synthetic coding sequence
  source 1..543: mol_type = other DNA
atgggcatacctatgggaaagtccatgctggtactcctcacctttctggcatttgcgagctgttgcatcgcggcatatcggccatcggagacattgtgtggcggagagctggtggacacactccagttcgtgtgtggagatcgcggattttatttcagccgtcccgctagccgagtgtcaagaaggagccggggaatcgtggaggagtgttgttttaggtcgtgcgatctggccctgctggaaacatactgtgccacccctgccaagagtgagagggacgtgtctacccctccaacggttttgccagacaatttcccccgatatccagttgggaagtttttccaatatgacacctggaagcaaagtactcaacgcttacgacgaggactgccagccctccttcgggcaagacgcggtcatgtcctcgcgaaagagttggaggcctttagggaggcaaagcgacacagacccttaatagccctgccgacacaggatcccgcacacgggggagcaccccctgaaatggcctctaacagaaagtag

SEQ ID NO: 29026 - DNA, 543 bp, synthetic construct
  misc_feature 1..543: note = Description of Artificial Sequence: Synthetic coding sequence
  source 1..543: mol_type = other DNA
atgggcattcccatgggcaagagtatgctggtactcctgacttttctggctttcgctagttgctgtattgctgcataccgacccagtgagaccctctgtggtggggaactcgtagataccctgcagtttgtgtgtggtgatagaggattttattttagccgacccgcttcccgggtctcgcgtaggtcccgtgggatcgtggaagaatgctgcttccgctcttgtgacctggccctgctcgagacctattgtgcgacaccagcgaaatctgagcgggatgtgagcactccccctacagtgttgcccgataatttccctcgctacccagtcggtaagttctttcagtacgatacctggaaacagtcaacccagcgcctgagacgcggtcttccagccttgttaagggccaggaggggccacgttttagcaaaggagctcgaagctttcagagaggccaaacgccataggcctctgattgctctgccaacccaggatcccgctcacggtggagcgccacctgaaatggcatctaacagaaaatag

SEQ ID NO: 29027 - DNA, 711 bp, synthetic construct
  misc_feature 1..711: note = Description of Artificial Sequence: Synthetic coding sequence
  source 1..711: mol_type = other DNA
atggtctccccagatcctcagatcatagtagtagcaccggaaaccgagctggcatcaatgcaagtccagcgtacagaggatggtgtgacaatcattcaaatcttttgggtaggacggaaaggcgaactcctgcgaaggactccagtatcctccgcaatgcaaacacccatggggattcccatgggaaaaagcatgctggtcctgttgactttcttggcatttgccagctgttgtatcgctgcctataggccatccgagacactttgcggcggtgaattggttgacactctgcaattcgtgtgtggagaccgcggtttttacttcagccgcccagcttcccgtgtgagccgcaggtctcgaggtattgttgaggagtgttgcttcagatcttgtgacctagcgctgttagagacatattgcgcaacccccgcaaaaagcgagcgcgatgtctccacaccccctacggtgctgcccgataacttccctcgttacccagtgggaaaattttttcagtatgacacatggaaacaatcaacacagcgcttgcgacgcggtctgcctgctctactgcgagcacggaggggtcacgttctcgcaaaggagctggaagccttcagagaggctaaaagacaccggcctcttatagcactccccacccaggaccccgctcacggcggagctccccctgagatggcctctaaccgcaaatag

SEQ ID NO: 29028 - DNA, 876 bp, synthetic construct
  misc_feature 1..876: note = Description of Artificial Sequence: Synthetic coding sequence
  source 1..876: mol_type = other DNA
atgcaacgagccagaccgacattgtgggctgccgctctgacgctgttggtcctgctccgcggaccaccggtggctagggctggcgcatcctcagcgggtttgggtcccgtggtccgctgcgagccctgcgacgcgagggctctagcgcagtgcgctcctcccccagcagtctgcgccgagctggtgagagagcccggttgtggatgctgcttaacttgcgccctgtcagagggacagccatgtggcatttataccgaacggtgtggctctggacttcgctgtcagccgtccccagacgaagccagacctctccaagctcttctggacggtaggggcttgtgcgtgaacgctagcgccgtttcgcgactgcgggcatacctactcccggcaccaccagcaccaggaaatgcctccgaatccgaagaggaccggtctgcgggatccgtggagtctccctcagtcagcagcacccaccgagtctccgaccccaaattccatcctctgcattcaaagatcattattattaagaagggccacgccaaggatagtcagagatataaggtggactacgaatcacagagcacggacactcaaaactttagctcagagtcaaaaagggagacagagtacggtccatgccgaagagaaatggaggacactcttaatcacctaaagtttctgaatgtgctgagccccagaggcgttcacattcccaactgcgacaaaaaaggcttctataagaaaaagcagtgcagacccagcaagggtagaaagcgtggtttctgttggtgcgtggacaagtatggacaacctttaccaggctatacaacaaagggtaaagaagatgtccactgctactctatgcaatccaaatag

SEQ ID NO: 29029 - DNA, 894 bp, synthetic construct
  misc_feature 1..894: note = Description of Artificial Sequence: Synthetic coding sequence
  source 1..894: mol_type = other DNA
atgcagagggctagaccgacgctgtgggctgccgcactgacccttctggtactgttaagaggccctccggtagcacgtgccggagccagcagcgcaggtctcggacccgttgtccgatgcgagccatgtgatgcacgggctctggcccaatgcgctcccccacccgctgtgtgcgctgagctggtgagagagccaggatgcgggtgctgcctgacatgcgccctctcagaagggcagccgtgtggcatctacacagaacgatgcggatccggactcagatgccagccttcgcctgacgaagcacgtcctctacaggctctcttggacggtcgcggtctgtgtgtgaacgctagcgctgtgagccgcttgcgcgcatatctactccccgcacctcccgctcccggagaaccgcctgcaccaggaaacgcttcagagagcgaagaggaccgcagtgccggtagtgtggagagcccttcagtgtcttccactcatagggtgagcgacccgaagtttcaccctctccactccaagatcattattattaagaaggggcacgctaaagacagccaacgttacaaagttgactatgaaagccagtctacagacactcagaacttttcatctgaaagcaaacgagaaacggaatacggaccctgccgaagggaaatggaggatactctgaaccatctcaaattcttgaacgtgctgtcccccagaggcgtgcacattccgaattgcgacaagaaagggttctacaaaaaaaaacagtgccgtccttccaaaggcaggaagaggggattctgctggtgcgtcgataagtatgggcagcccctccccggatacaccaccaaaggcaaggaggatgtgcactgctactcgatgcagagtaagtag

SEQ ID NO: 29030 - DNA, 585 bp, synthetic construct
  misc_feature 1..585: note = Description of Artificial Sequence: Synthetic coding sequence
  source 1..585: mol_type = other DNA
atgcaaagggcgcgacccctccaagccctcctggatggacggggactttgtgtgaatgcatcagccgtgagccgattgagagcctacctcctgcctgctccgccagcccctgggaacgcatcagagtccgaagaagacagatccgcagggagtgtagaatctcctagcgtctcaagtactcaccgggtatcagatcccaagttccatcctcttcactctaagatcatcattattaagaagggacacgcgaaagactcacaacgttacaaggtggactatgagtcacaaagtaccgacacccagaacttctcctccgaatccaagcgcgagacagagtacgggccttgccgcagagagatggaagataccttgaaccaccttaaattcctcaatgtgctgtctccaaggggtgttcatattcccaactgcgacaagaaaggattttacaagaagaaacaatgtaggccgagcaaaggtaggaagcggggtttctgttggtgcgtggataagtatggacagcccctccctggttacaccacaaagggtaaagaagacgtgcattgctacagcatgcaatctaagtag

SEQ ID NO: 29031 - DNA, 462 bp, synthetic construct
  misc_feature 1..462: note = Description of Artificial Sequence: Synthetic coding sequence
  source 1..462: mol_type = other DNA
tagagcgaagaagatcgtagcgcgggatctgtcgagagcccctctgtgtcgagcacccatcgggtaagtgatcctaagttccatccccttcattccaaaattatcatcattaagaagggacacgctaaagactcacagcggtataaggtggactacgagtcacagtctaccgatacccagaatttcagctcagaaagtaaaagggaaaccgaatatggaccctgcaggagagagatggaggacaccctcaaccacctgaaattcctgaacgtcctatcccccagaggtgtgcatatccctaactgtgataaaaaaggtttttacaagaaaaagcagtgtcgtccgagtaaaggacggaaaagaggtttttgctggtgcgtagacaagtatggacagcccttgccgggatataccactaagggtaaagaagacgtacactgttatagcatgcagtccaaatag

SEQ ID NO: 29032 - DNA, 432 bp, synthetic construct
  misc_feature 1..432: note = Description of Artificial Sequence: Synthetic coding sequence
  source 1..432: mol_type = other DNA
taggagtcacctagtgtgagcagtactcatcgagtgtcagatcccaagttccaccctctgcactcaaaaatcataattataaagaaggggcatgccaaggattcacaacggtataaagtggattatgaatcccagtctaccgacacacagaacttctccagcgagtccaaaagagagacagaatacggtccctgtcgcagagagatggaggataccttaaatcaccttaaatttctgaacgtgctgtcgcccaggggagttcatatccctaactgcgacaagaaaggcttctacaaaaagaagcaatgtaggccatcaaaggggagaaagcggggattctgttggtgtgtggataagtatggccaaccccttccaggctacacaacaaaaggcaaagaggacgttcactgctactcgatgcagtctaagtag

SEQ ID NO: 29033 - DNA, 792 bp, synthetic construct
  misc_feature 1..792: note = Description of Artificial Sequence: Synthetic coding sequence
  source 1..792: mol_type = other DNA
atgcagcgcgcaagaccaaccctgtgggctgcctgtgagccatgcgacgccagagctctagcccagtgcgcgcctcctcctgccgtgtgtgctgaactagtgcgcgaacctgggtgtggctgctgccttacctgtgccttgtctgaggggcagccatgtggaatctacaccgagcgatgtggatccggcctgcgatgtcagccttccccggatgaggcaagaccactacaggccctgctggatggcagaggcctgtgtgtgaacgctagcgctgtgagccgcctaagggcttatctcctgccagcacctccggctcctggcaatgcctcagaaagcgaggaagatcgcagcgctggaagcgttgaatcgccatccgttagcagtactcatagagtcagcgaccctaaattccaccctttgcactctaagatcataatcattaaaaagggacacgcaaaagactcccagaggtacaaggttgattacgagtctcagtctactgacacccagaacttttcctctgagtcaaaaagggaaacggaatacggaccatgtaggcgcgagatggaggacaccctgaaccatctgaagtttctgaatgttttaagccccagaggggtgcacatccccaactgtgataagaaaggtttctataaaaagaagcagtgccgcccaagcaagggtcggaagagggggttttgttggtgcgttgacaaatatgggcagccacttcccggatacacaaccaagggaaaggaggatgtgcactgctattcaatgcagtctaagtag

SEQ ID NO: 29034 - DNA, 834 bp, synthetic construct
  misc_feature 1..834: note = Description of Artificial Sequence: Synthetic coding sequence
  source 1..834: mol_type = other DNA
atgcgcgcactgaggctcggggcagaagatcagcctctgcccgcatggattccacagctgcgggcagtttattgccggccaattccagccaggcccgcttgtcaagctgcttgtccgggatgtagaaggcacgcagctggtgccacacacgcacttggcaggtgtgctgattccgccggagccgctccacgggctgccggaggtgcaggctggcgggagctagggggattgggaagtaggggagcacttcgggctgtaagacatctccaccgtgccctcctggacgggcgtggcctttgtgtgaacgcgagcgccgtctctagactgcgggcttatctgttgccggcacctccagcaccaggcaacgcttcagagagcgaagaggaccgttcagcagggtctgtggaatctccttccgtgtcctcgacccacagagtgtccgatcccaagtttcaccccctgcactctaagataattatcatcaaaaaaggacatgccaaggactcccagagatataaggtggattacgaatcccaaagcacagatacgcagaacttttcctccgagagtaaacgggagacagaatatggcccttgtaggcgggaaatggaggacacactgaatcacctgaaattcctgaatgttctgagccctcggggtgtccatattccaaattgcgacaagaaaggtttttacaagaaaaagcaatgccgaccctctaaaggcagaaagcgagggttttgttggtgtgtcgacaaatatgggcagccgctgcccggttacaccacgaaaggtaaggaagacgttcactgttattccatgcagtccaaatag

SEQ ID NO: 29035 - DNA, 570 bp, synthetic construct
  misc_feature 1..570: note = Description of Artificial Sequence: Synthetic coding sequence
  source 1..570: mol_type = other DNA
atgcagagggctcgccctacactctgggccgcagcccttacgctcctcgatggacggggtctttgcgcttacttgctccctgcaccacctgctcctgggaatgccagtgagagtgaggaggacagatcagccggttctgttgagagcccttctgtcagtagtactcaccgggttagcgatcccaagtttcatcccctccattcaaagatcatcataattaagaaggggcacgctaaagactctcagagatataaagtggactacgaatcgcagtctacagatactcagaattttagcagcgaatccaagagggaaaccgaatatggaccctgccgaagagaaatggaagacactctgaaccaccttaagttccttaacgtgctatcacctagaggcgtgcatatcccaaactgtgacaagaaaggtttctataaaaagaagcagtgcagaccctcaaaaggtagaaagcggggtttttgctggtgtgtggataagtacggccagcccctgcccggatatacaactaaggggaaagaagacgtgcattgctactctatgcaatctaagtag

SEQ ID NO: 29036 - DNA, 807 bp, synthetic construct
  misc_feature 1..807: note = Description of Artificial Sequence: Synthetic coding sequence
  source 1..807: mol_type = other DNA
atgcagcgcgctcgacccacactatgggcagcggcactgactttactggttctgttacgtggtccccctgtggcacgggcaggtgcgtcttccgccggtctcgggcctgtggtgaggcgggaacctgggtgcgggtgctgcctgacatgtgctctatccgagggccagccctgcggaatttatactgagaggtgcggttccggcctgcggtgtcagccgtcgccagacgaggcacgcccactacaggcgctgcttgatggccgagggctctgtgttaacgctagtgccgtgtctcgactaagagcctacttattgcctgcccctcctgcccctgggaatgcctccgaatcggaagaagatcggagtgcaggctctgtagagtcaccctcagttagctctacgcacagagttagcgacccaaagtttcaccctctgcacagcaagattatcatcatcaagaaggggcacgctaaggatagtcagagatataaggtcgactacgaatcccagtcaaccgacacacagaactttagctcagagtcgaagagagagactgagtatggcccatgccgcagagaaatggaggataccctgaatcacttgaagttcctgaacgtgcttagccccagaggtgtgcacattcccaactgtgacaagaaaggcttttacaagaagaaacagtgtaggccctccaagggaagaaagcgtggattctgttggtgtgtcgataagtacggtcagcccctgccgggttatactaccaaaggcaaagaggacgtgcactgctattcgatgcagagcaagtag

SEQ ID NO: 29037 - DNA, 978 bp, synthetic construct
  misc_feature 1..978: note = Description of Artificial Sequence: Synthetic coding sequence
  source 1..978: mol_type = other DNA
atgcttccccgtgtgggttgtcctgcgctgcctctcccaccacctccgctcctgcccctcctgctgctattgttgggagcctcaggcggaggcggaggagcgagggcagaggtcctgttccggtgtcccccatgcaccccagagcggctggcggcatgtggaccacctcctgtcgctccccctgccgcagtggccgcagtagctgggggtgctcgaatgccttgcgcagagctggtcagggagcctgggtgtgggtgctgttccgtttgcgctaggttagagggggaggcttgcggtgtatatactcccagatgcggtcagggactaaggtgctaccctcatcccggttcggagttgccgctgcaagctctcgttatgggagagggaacatgtgagaagcggagagatgctgagtatggggcaagccccgaacaggtggccgacaatggcgatgatcactccgaagggggtctagttgagaaccacgtggacagcaccatgaacatgctgggcggtggcggtagtgccggtcggaaacccctcaaaagcggcatgaaagaattagcagtgtttagggagaaggtcacagaacagcatcggcagatgggcaaaggcggtaagcaccacctgggactggaagagcccaaaaagcttaggccgcctccggctaggactccttgccagcaagagctggatcaagtcctcgaacgaatatcaactatgagactgcccgacgagagaggcccactggaacacctgtacagcctgcacattcccaattgtgataaacatggtctgtataatctcaaacagtgtaagatgtccctgaatggacagcggggtgagtgctggtgcgtgaacccaaataccggaaagctcatacaaggcgctcccacaatccgcggtgatcccgaatgccacctgttttacaatgagcaacaagaagctaggggcgtgcacactcagagaatgcaatag

SEQ ID NO: 29038 - DNA, 3099 bp, synthetic construct
  misc_feature 1..3099: note = Description of Artificial Sequence: Synthetic coding sequence
  source 1..3099: mol_type = other DNA
atggcgtgggaagccagaagagagcccggacccagacgagctgcagtgcgcgaaacagtcatgctcctcctgtgcctgggggttccgactggcaggccatataacgtggatactgagtcagccctgctttatcagggcccacacaatacgctgttcggttactcagttgttctgcattctcatggggctaataggtggctgctggtgggggcacccacggccaactggctggcaaatgcaagtgtcatcaacccgggtgctatttaccgatgccgaataggcaaaaacccagggcagacctgcgagcaactgcaacttggatctccaaatggagaaccctgtggtaagacttgcctggaagagagagacaaccagtggcttggcgttaccctttcacggcagccaggcgaaaatgggtcaatagtgacctgtggccacagatggaaaaacattttttatataaagaatgaaaataagcttcccaccggtgggtgctatggcgtgcccccagatctcagaacggagctgagcaaaagaatagcaccctgctaccaggattatgtgaaaaagtttggggaaaactttgccagctgccaggctggaattagtagtttttacaccaaagacctgatcgtaatgggcgcaccaggtagtagctactggaccggcagcttgtttgtctacaacatcactacgaacaaatacaaggctttccttgataagcagaatcaggtgaaattcggaagctaccttggctatagcgtcggcgcaggccatttcagatcccagcataccacggaagtcgttggcggagcacctcagcacgagcagatcgggaaggcctatattttctccatagacgaaaaggaactgaacattttgcacgaaatgaaaggtaaaaagctgggcagctacttcggcgcaagcgtgtgtgctgttgacctaaatgccgacggtttctcggatttgctggtaggcgctcccatgcagtctacaattcgtgaggaagggagggtgtttgtatatatcaattctggttctggggctgttatgaatgctatggaaactaacctcgtgggctctgataaatacgccgctcggttcggcgaatcaattgttaatctcggtgacattgacaacgatggcttcgaggacgttgccattggcgctcctcaggaagacgatctgcagggggctatctatatctacaacggacgcgcagacggaatttccagtacattcagccagcgcatcgagggattacagatatccaaatccctgtctatgtttggccagagcatctcgggacagatcgacgctgacaacaacgggtatgtggatgttgcagtgggggcttttaggtctgacagtgccgtgttactcagaacaagaccagtggtcatcgtggatgcatctctttcccaccctgagagtgtcaacaggacaaagttcgactgtgtggagaatgggtggccgtcagtatgtattgatcttacattgtgtttctcatacaaaggaaaagaggtgcccggatatattgtgcttttctataatatgtctcttgacgtcaataggaaggcagagtctcctcctagattctatttctcttccaacggtacctctgacgtgatcacaggttctatccaggtctcatctagggaggctaactgtcggacacaccaggcttttatgcgcaaggacgtgagggacatcctcacaccaatccagatcgaggccgcttaccacttaggccctcacgtgatttccaagaggagcacagaggagttccctcctttgcagcccatactacaacagaagaaagagaaggatataatgaaaaagactattaacttcgctaggttttgcgctcacgagaactgtagcgctgacctgcaggtgagtgcgaaaattggttttttgaagccacatgagaataagacttacctcgccgtgggcagtatgaagacactgatgttgaacgtctctttgttcaatgcaggagatgacgcttacgaaacaacgctacatgtgaagttaccagttggattatattttatcaaaatcctcgaactggaggaaaagcagatcaactgcgaggttacggacaatagtggtgtcgtgcagctggactgctctattgggtatatctatgtcgaccacctgtctcgcattgatattagttttctcctggatgtgtcttccctatccagggctgaggaggacctcagcattactgtgcacgccacctgcgaaaatgaggaagagatggataatcttaaacattctcgcgtcacagtggcgataccgcttaagtatgaggtgaagttgaccgtgcatggattcgtcaatcccacctcatttgtgtacggatccaatgacgagaatgagcccgaaacttgcatggtagagaaaatgaacctcaccttccacgtcataaacacaggcaacagtatggcgcctaacgtctctgtggagattatggtcccaaactcattctctccacaaaccgataaactgttcaatattttggacgtccagacgactacgggggaatgccatttcgagaactaccagagggtatgcgctttagagcagcagaaatcggccatgcagaccctgaagggcatcgtgaggtttctgtctaaaacggataaacgcttactctactgtatcaaggcggatccccattgtctcaattttctgtgcaattttggcaaaatggaatctggaaaggaagcgagtgtccacatccaattagaaggcaggccgagtatccttgaaatggacgagacttctgcccttaaattcgagatccgcgcaacaggcttccctgagcctaatcctcgggtgatcgaactgaataaagacgaaaacgtggcgcacgtgctgctcgaaggcttacaccatcaaaggccaaagcggtatttcacgatagtgataatatcctcctctttactccttggactgatcgtactgctgctgatcagttatgttatgtggaaggctgggttcttcaaacggcaatataagagcattctgcaggaagagaatcggcgagattcatggtcatatattaactctaagtcaaacgacgattag

SEQ ID NO: 29039 - DNA, 1854 bp, synthetic construct
  misc_feature 1..1854: note = Description of Artificial Sequence: Synthetic coding sequence
  source 1..1854: mol_type = other DNA
atggcttgggaggctaggcgggagcccggtcccaggagagccgcagtgcgagagacggtgatgctgctcctgtgtttaggtgtccccactggccgtccctacaatgtggacactgagtccgccctcctgtaccagggacctcataacaccctatttggctactctgtggtgttgcactcccatggtgcaaaccgttggttgctggtgggagcacccaccgctaactggttggctaatgcttccgttatcaatcctggagccatctaccggtgtcggattgggaaaaatcctggacagacctgtgagcagttgcagcttggatcaccaaatggggagccgtgcgggaagacatgcctcgaggaacgagacaaccagtggctcggcgtaacactgtcacgtcagccgggagaaaacggctccatcgttacctgcggccataggtggaagaacattttttacattaagaacgagaataagctgcctactgggggttgctacggagtaccccctgaccttcgcacagaactgtccaagcggatagctccgtgctatcaagactatgtcaagaagtttggcgaaaactttgccagctgccaggccggtatctcatccttctacacaaaagatctgatcgttatgggggcacctgggagcagctactggacaggaagcctcttcgtctataacattaccacaaataagtacaaggcctttctcgataagcaaaaccaggtgaaattcggaagttacctcggctacagtgtgggtgccggacatttcaggtctcaacacacaacagaggtggtaggtggggctccacagcacgaacagatcgggaaggcttatattttctccatcgacgaaaaggaactgaatatcctgcacgagatgaagggtaagaaactggggtcatatttcggtgctagcgtgtgcgctgttgacctcaatgctgatggcttcagcgatctgcttgtgggcgctccaatgcaatctaccatcagggaggagggcagggtgtttgtctatattaactctgggagtggtgcagtgatgaatgctatggagacaaacctggtgggaagtgacaaatacgccgctcgttttggcgaaagtattgtgaatctgggggacatcgataatgatggcttcgaggacgtggccataggcgctccacaggaagacgacctgcaaggtgctatttatatttacaacggcagagcagacggaatctccagcactttttctcagcgtatagaagggctgcagatttccaagtcactctctatgtttggccagtccatctcgggtcagatcgacgccgacaataacggctacgtggacgtagccgtgggtgccttcaggagtgattccgcagttttgctaaggaccaggcccgtggttatcgtggatgcttcactgtcgcaccctgaatccgtaaacagaaccaagttcgattgtgtcgagaatggttggccctcagtttgtattgacctgactttgtgcttcagttacaagggcaaggaagtgcccggatatattgtgctgttttataacatgagtctggatgtgaaccggaaggcagaaagcccccctagattctacttctcgtctaacggtaccagtgacgtgatcacaggaagcatccaggtgtcctccagagaggccaactgtcgcacccatcaagctttcatgaggaaagacgtgcgtgatattttaacgccgatccagatagaggctgcttatcatttgggtccccatgtcatcagcaaaagaagcacagaagaattcccgcctctgcagccaattctgcagcaaaagaaggagaaggatatcatgaaaaaaacaaaaaaatag

SEQ ID NO: 29040 - DNA, 3150 bp, synthetic construct
  misc_feature 1..3150: note = Description of Artificial Sequence: Synthetic coding sequence
  source 1..3150: mol_type = other DNA
atgggttctcgaacccccgaatcacctctgcatgccgtacagctcaggtgggggcctaggcgaagaccgccattactccccttgctcctcttgctgctgccccctccacccagagtgggcggattcaatctcgatgcagaggccccagcagttctgtccgggccacccggttcgttcttcgggttctcggtagagttttaccgtccgggtacagacggcgtgtctgtgctagttggagcaccaaaagccaacacctcgcagcctggtgtgctgcagggcggagccgtgtacctctgcccatggggcgcttcaccaacccagtgtaccccaatagagtttgatagcaaaggcagccgcctgctcgaatcatctctcagtagctcagaaggcgaagaacccgtggagtacaaaagtctgcagtggttcggggcaacggtcagggcacatggcagttccattttagcttgcgcccctttgtacagctggcgtaccgagaaggaacccttgtcagatccggtgggcacgtgctacctctcaactgacaattttacgcggattttggaatatgccccatgtcggagtgactttagttgggccgcaggccagggctattgccaaggcggattcagcgccgagtttaccaagacgggacgcgtggtgttaggtggacccggatcatacttctggcagggtcagatcctatctgcaacacaagagcagatcgctgagagctattatccagagtatcttatcaatctcgtccagggtcaactccagactagacaagctagttcaatttatgacgattcttacctaggctacagcgtggctgtgggggagttctccggcgacgacacggaagacttcgtagccggtgtccccaaaggaaacctcacctacggatatgtgacaatcctgaacggaagtgatattcgatctctgtacaacttctcaggggagcagatggcatcttattttggctacgcggtggctgccactgacgttaatggagatgggctcgacgaccttctcgttggtgcccctctactcatggatcgcacccccgacggtagacctcaggaggtgggacgggtctacgtctatctgcaacatccggctggcattgaaccgacccccactttgaccctcacaggccacgatgagttcggccgttttggcagcagcctcacaccactgggcgacctggaccaggatgggtataatgacgtggccatcggtgccccattcggcggagagacgcagcagggtgtggtgttcgtctttcctggcggtccaggaggtcttggatcgaaaccatcacaagttctccaaccactgtgggccgctagtcacacacctgacttctttggtagcgcacttcgcggtggaagggacctggatggaaatggctaccccgaccttatcgttgggtcttttggagtcgataaagcggtcgtgtatcggggaagaccaattgtgtccgcctccgcaagcctgacgatctttccagccatgtttaatcctgaagaacggtcatgctccctcgagggaaatccagtggcctgcataaaccttagtttctgtcttaatgcctcgggaaagcacgtggctgacagcatcggctttaccgtggagttacaactcgactggcagaaacagaagggcggagtgcgcagggcgctgttcctagcttctcggcaggcgacgctgacacaaacactcttgattcagaacggagccagagaggattgcagagagatgaaaatatacttgagaaacgagtctgagtttagagataagctatctcccatacatatcgccctcaactttagcttggatccgcaggccccagttgacagccacggcctgcgtcccgctcttcattatcagagcaaatcccgcatcgaggataaggcgcagatactgctggactgcggggaggataatatctgtgtgccggacttgcagcttgaggtctttggagagcagaaccatgtctatctgggcgataaaaatgcactcaacctcacttttcacgcacagaacgtgggggagggtggggcttacgaagccgagctgcgcgtcaccgctccccctgaagctgagtatagcggcctcgtgcgtcaccctggtaactttagtagcctgtcctgcgattatttcgccgtgaaccagtcgaggctgctcgtgtgcgatttgggcaatcccatgaaagccggagccagtctttggggaggtttgcgctttaccgtgccccatctgcgcgacactaagaaaaccatacaatttgactttcaaatcctcagtaaaaatctcaataactcccaaagtgatgttgtcagcttccggctttccgtggaggctcaggcacaggtgaccctgaacggcgtaagcaagcctgaggctgtgctgttccctgtgagcgactggcacccacgtgatcagccccagaaagaggaggatttaggtccagccgtgcaccacgtgtatgaactgatcaaccaagggccttcatccatttcacagggagtgttggagctgtcctgtccacaggccttggagggacaacagctcttgtacgttacgcgggttactggactgaactgtacaaccaaccacccgattaaccctaagggcctggagttggatcccgagggcagtctccatcaccagcagaaaagggaggctcccagtcgcagctccgcctcttctggtcctcagatactcaagtgtccagaggccgagtgcttccgattgcggtgtgagctgggacccctgcaccagcaggagagccagagcctccagctgcactttcgcgtgtgggccaagacattccttcagcgggaacatcagccgttttcactgcagtgcgaagccgtatataaggcacttaaaatgccataccggattctcccaaggcagctcccacaaaaagagcggcaggtggccaccgctgtgcagtggaccaaggcggaaggcagctacggagtaccgctttggatcatcattctcgcaattctctttggcctgctgctattgggcctcctgatctatatcctgtataaactcgggtttttcaaaaggtccctgccatacgggaccgccatggaaaaggcccaactcaagccgcctgctacgtctgacgcctag

SEQ ID NO: 29041 - DNA, 3393 bp, synthetic construct
  misc_feature 1..3393: note = Description of Artificial Sequence: Synthetic coding sequence
  source 1..3393: mol_type = other DNA
atggctgccgctggacagttatgtctgctgtatctgagtgccggattgctctccagactgggcgcagcgtttaacttggacacgcgggaggataacgtgatcagaaagtatggcgaccccggaagtctattcgggttttcgctcgccatgcactggcaattacagcctgaggacaagcggctattactggtgggcgcacctcgggcagaggccctgcctctacagcgcgctaaccgtacagggggactttattcatgtgacatcactgccagaggtccatgtaccaggatcgagtttgataatgatgccgatccaacatccgagtccaaggaggatcagtggatgggagttactgtgcagagccaggggccaggtgggaaggtagtgacctgtgcccacagatacgaaaagagacaacacgtgaacaccaaacaggagtcgagagacattttcgggaggtgctatgttctatcccaaaacttaagaattgaggatgacatggacggaggagactggtccttttgtgacgggagactgcggggacacgagaaatttggctcatgccagcagggcgttgctgccactttcaccaaagactttcactacattgtttttggggcaccagggacttacaattggaaggggattgttagagtggagcaaaagaacaacacattcttcgacatgaacatttttgaagatggcccttacgaagtcgggggtgaaacagagcatgacgaatctctagttcccgttccagcaaatagttaccttggcctactgtttcttacaagcgtttcctacaccgacccagatcagttcgtgtataagacacgcccacctagagagcaaccagacacatttccagatgtgatgatgaacagctatctgggtttcagcctcgattccggaaagggcatcgtcagtaaggacgagatcactttcgttagcggagcacctagagccaaccatagcggtgcggtggtgttgctgaaacgggacatgaaatcagctcacttgcttccagaacatatcttcgatggcgagggtctggcatcgtcatttggatacgacgttgcagtcgtggacttaaacaaggacggctggcaagacatagtaatcggggcaccacagtacttcgatcgagatggggaagtgggcggtgccgtgtacgtgtatatgaatcagcaagggagatggaataacgtcaaaccgattagactaaatggcacaaaagactctatgtttggaatagccgtgaagaacattggagatatcaatcaagacggatacccagacattgctgttggcgcaccttacgacgatctgggcaaggtgtttatttatcatgggagcgcaaatgggataaatactaagcccacacaggtcctgaaagggatctcaccctatttcggttatagcattgcagggaatatggatttagaccgtaactcttatccagatgtggccgtagggtccctgagcgattctgttacaatctttaggagcagacccgtcatcaatattcaaaaaacaatcactgtgacaccaaaccgcatcgacttacgtcagaagaccgcttgcggcgcaccaagcggcatctgcctccaagtcaaaagctgcttcgaatatacagctaaccccgcagggtataatccatctatctccatcgttgggacactggaggctgaaaaagagaggcgtaagtccggactgtcttccagagtccagtttcgtaatcaggggtccgaaccgaaatacacccaggagctgactctgaaacgtcagaagcagaaagtctgcatggaggaaaccctgtggctacaggacaatatccgcgataaactgagaccgattccaatcactgcctccgttgagatccaggagcccagttctcggagaagggtcaattccctccctgaagtgttgcctattctgaactctgacgaacccaaaactgcccatatagatgtccactttctcaaagaaggttgtggtgacgacaacgtctgcaatagtaatctgaaactggagtataagttttgcaccagggagggaaaccaggacaagttttcctaccttccaatccagaagggtgtgcctgagttagtgttgaaagaccagaaagatattgcgttggaaatcactgtaacaaatagtccgtccaatcctaggaacccgacaaaagatggcgacgatgcccatgaagcgaaactcatcgccacattcccagacactctcacatattcagcttacagggaacttagggccttccctgagaaacaactgagttgtgtggccaatcagaatgggagtcaagccgattgtgagctcggcaaccctttcaagaggaatagtaatgtcaccttttatctggtcctgtctactacggaagtgacatttgatacgcccgatctcgacatcaatctgaagctcgaaacaacttcaaatcaggataacctcgcccctatcacagctaaagcgaaggtggtcatcgagctacttctatctgttagcggcgttgccaagccatcccaggtgtatttcggaggcactgtggtgggagaacaagctatgaagtctgaggacgaggttggctcactgatagaatacgagtttcgcgtgatcaatctcgggaaacctctgaccaacttgggtactgctacactgaatatacagtggccgaaggaaatctccaacgggaagtggctgctctatctggtgaaggtggagagcaagggcctggagaaagttacgtgtgagccccagaaggaaattaattccttaaatctgacagagtcccacaatagtaggaagaagagggagataaccgagaaacagatcgatgacaatcgaaaattctccctgtttgccgagagaaaataccagaccctgaactgtagcgtaaacgtaaactgtgtcaatattaggtgcccgttgcggggactggacagtaaggccagcctcatcctgcggtcgcgcctgtggaacagcacattccttgaggagtattcaaaactcaactacctcgacatactcatgcgtgctttcattgacgtgacagcagccgcagagaatatcaggctgcccaacgccggaacacaggtgcgggtaaccgtttttccaagcaaaactgtagctcagtactctggtgtcccatggtggatcatcctcgtggctattcttgccggaatactgatgctggccctgttagtgttcatactgtggaagtgcggcttcttcaagaggtccagatacgatgactctgttcctagataccacgcagttcgcatacggaaagaggagcgagagatcaaagacgagaagtatattgataatctggagaagaaacagtggattaccaaatggaatgagaacgaatcatatagttag

SEQ ID NO: 29042 - DNA, 3222 bp, synthetic construct
  misc_feature 1..3222: note = Description of Artificial Sequence: Synthetic coding sequence
  source 1..3222: mol_type = other DNA
atggccgcagcaggccagctatgtttattatatttgtcagcagggctactctccaggctgggcgcagccttcaacctggacactcgggaggacaatgttatccggaagtacggtgacccaggctctctgttcgggtttagtcttgccatgcattggcagctgcagcctgaagacaaaaggttgcttcttgtgggagctcctcgagctgaagcactgcccctacagcgcgctaacaggactggcggattatactcttgcgatataacagccagggggccttgtacaaggattgagtttgataatgacgccgatcctacaagtgagtcaaaggaggatcagtggatgggcgttaccgtacaaagccagggacctgggggtaaggttgtgacctgcgctcataggtacgagaagcgccagcacgtgaacaccaagcaggaatccagagacatctttggcagatgctacgtgctgtctcagaatctccgaattgaggatgacatggacggtggagactggtctttttgcgacggcaggctacgcggtcatgaaaaatttgggagctgtcagcagggggtcgccgctacattcaccaaagactttcattatattgtgttcggtgcacccggtacatataactggaaaggtattgtccgcgtggaacagaaaaataacactttctttgacatgaacatctttgaggatgggccatatgaggttggtggagagaccgaacatgatgaatccctcgtaccggtgccagcaaactcctatctggggttcagtctcgatagcggcaaaggaattgtctccaaggacgaaattaccttcgtgtcgggggctcctcgagccaatcatagtggggctgtggtgctgctcaagagggatatgaagtcggcacatttgctgcccgagcacatctttgacggggaggggctggcctcttccttcggatacgacgtcgctgtcgtggatcttaataaagacggttggcaggacatcgttattggcgctccacaatactttgatcgcgatggcgaggtagggggagcggtttacgtctatatgaaccaacagggacgttggaacaatgtcaagcctatccgactgaatgggacgaaagattctatgtttggcatagccgtcaaaaatattggagatataaatcaggacggctatccggacatcgctgttggtgctccttacgacgatctaggcaaggtcttcatctaccacggctccgcaaacggtattaacacgaaacctacccaggtcctgaagggcatctctccttatttcggttactcaattgccggaaacatggatttggaccgcaacagctaccctgacgtggcagtcggctccttatcagatagcgtgactatttttcgcagcaggcccgtgatcaatatccagaaaaccatcacggtgaccccaaatcgtatcgaccttcgacaaaagacagcatgcggggctccttcagggatttgtttacaggtgaagtcttgcttcgagtacaccgcgaatcctgctggctacaacccttctatatctatagtgggaacactggaggcagagaaggaacgtagaaaaagcgggctgagctcgcgggtgcagttccgaaaccaggggtcagaacccaagtatactcaagaactcacactcaagcgccagaaacagaaggtatgcatggaggaaaccctatggctgcaggacaatattagagacaaactgcggcctatccctattaccgccagcgtggaaattcaagagccaagttcaaggagacgcgttaacagccttcctgaagtcctgccaattctgaactctgacgagcccaaaactgcgcacatcgacgtccacttcctgaaggagggttgcggggatgacaatgtttgtaattcgaacttaaagctggagtacaaattttgtacgcgcgaagggaaccaggataaattttcctatctgcccattcaaaagggggtgcctgaacttgtccttaaggatcagaaagacatagcacttgagattactgtgacaaatagtcctagtaacccacgcaaccccacgaaagacggcgacgatgcacacgaagctaagctaatcgccaccttccctgacactctgacttactccgcctacagagaactccgggcttttcctgagaaacagctgagctgcgtggctaatcagaacggatctcaggccgactgtgagctgggaaatccgttcaagcggaactctaacgtgaccttttacttggttctcagcacgaccgaagttacctttgatactccagacctggatattaatctgaagttggaaactaccagtaatcaggataatctcgctccaatcacagcaaaggctaaggtagtgattgaattgctactgtcagtctccggagtcgctaagccatctcaagtgtactttggtggcaccgtggtaggcgagcaagccatgaaaagcgaggacgaagtagggtctctcattgagtacgaatttcgtgttattaacttggggaaacctctgaccaaccttgggacagccaccctgaacatacaatggccaaaagagatttctaatggaaagtggctgttgtatttggttaaggtcgaaagcaaaggattagaaaaggttacctgtgaaccacaaaaggagatcaattctctaaatttgactgagagccataactctaggaagaaacgcgagattacagaaaagcaaattgacgacaaccgcaaattcagcctgtttgccgagaggaaataccagaccctgaattgttcagtcaatgtcaattgcgtgaatatcaggtgtccattgagaggcttggactcgaaggctagcctcattctgagatctagactttggaacagcacttttctcgaagaatacagcaagctcaactaccttgacatattgatgcgtgccttcattgacgtgactgccgcagccgaaaacatccgcttgcctaacgcagggactcaggtgcgtgtgacagtctttccctccaagactgtggcacagtactcaggtgttccgtggtggataatactcgtggcgatcttggcaggcatcctcatgttagcccttttagttttcatcttgtggaagtgcggtttctttaaacgcaataaaaaggatcactacgacgccacttatcacaaggcggagattcacgcgcaacctagcgacaaggagagactgacctcggacgcttag

SEQ ID NO: 29043 - DNA, 3207 bp, synthetic construct
  misc_feature 1..3207: note = Description of Artificial Sequence: Synthetic coding sequence
  source 1..3207: mol_type = other DNA
atggccgcagccggacagttgtgcctgctttacctgagcgcgggacttctttctcggctcggagccgctttcaacctggacactagagaggataacgtgatcagaaagtacggagatcccggaagcttattcggattctcacttgccatgcactggcaattacagccggaagataagcgactgctgttggtaggcgcacccagagcagaggctttaccgctccagagggctaataggacaggcggactgtatagctgcgatatcacagcgaggggtccatgtacgagaatcgaatttgataatgatgcagatcctacttctgaatccaaggaggatcagtggatgggggtgaccgtgcagagccagggtcccggaggaaaagtagtcacttgcgcacaccgctatgagaagaggcagcatgttaatacgaaacaggagtcccgagacatcttcggcagatgctatgtgctgtctcagaatcttcggatcgaggatgatatggacggaggtgactggtcgttttgcgacggcagactgcggggacatgagaaattcggctcctgccagcaaggagtggcagccacatttaccaaagacttccactatatagtgttcggcgcaccgggtacttataattggaaggggcttttgttccttacgtccgtctcttacaccgatcccgaccagttcgtttacaaaacgcgaccgcctcgagaacagcccgacacattcccagacgttatgatgaactcatacctcggattttcgctggacagcggaaaaggaatcgtttctaaggacgagataaccttcgtttccggagcacctcgagctaatcactccggtgccgtggtgctcctgaagagagacatgaagtcagcgcatcttctccctgaacacatcttcgatggtgagggactcgcgtcaagtttcggctatgacgtcgctgtagtcgatctgaataaggatggatggcaggacatcgtgattggtgctcctcagtatttcgaccgggacggtgaggtgggcggtgccgtctacgtgtacatgaaccagcagggtcgttggaacaacgtgaaaccaattcgtctgaacggcaccaaggactctatgtttggaatcgccgttaagaatatcggggatatcaaccaggacggctaccctgacatcgctgtgggcgctccctacgacgacctggggaaagttttcatttatcacggcagcgccaatgggattaataccaagcctactcaggtcctgaaggggatctccccttatttcggctacagcatcgccggtaacatggacctggaccgcaatagttaccctgatgtggctgtcggttccctgagtgactccgtgacaatttttaggtcccgacctgttatcaacattcaaaaaactatcaccgtcacaccaaatcgcattgacctgcggcagaagactgcctgcggggcaccgagtggcatatgtcttcaggtaaagtcatgtttcgaatacacggctaatcccgcaggatataaccctagcatctccatagtgggaaccctcgaagccgaaaaagaaagaaggaagtccggcctgagcagccgcgtccagttccgcaatcagggctctgaacccaaatacacccaagaattaactctgaaaaggcagaagcagaaggtgtgcatggaagaaacactttggctgcaggacaacattcgggacaagctgaggccaatcccaattaccgccagcgtggagatccaggagcctagcagcagacgcagagttaacagtcttccagaagtgctgcccattctgaattcagacgagccgaaaactgcgcatatcgatgtgcacttcctgaaggaaggatgcggtgacgacaacgtgtgcaactccaacttgaaacttgagtacaaattctgtacccgagagggaaatcaggataagttttcataccttccaatccagaaaggggtcccagaacttgttctgaaagatcagaaagacatcgcactggagatcaccgtcacaaacagcccttccaacccaagaaacccgaccaaggacggggatgatgcccatgaggcaaaactgatcgccactttcccagacactttgacgtattcagcatatagggaactgagagcttttcctgaaaagcagctgagttgtgtggccaaccagaatggtagccaagccgactgcgaactgggaaaccccttcaagagaaattcgaatgtgacgttttatctcgtgctaagcaccacggaagtcacgtttgatacacccgatctggacattaaccttaaacttgaaacaacatccaaccaggacaacctcgcccctatcactgctaaggcaaaggtcgtgatcgaactcctgctgtccgtgtctggagttgccaaaccaagccaggtgtactttggaggcacggtcgtgggtgagcaggctatgaaaagcgaggatgaggtgggatctctaatcgaatatgagttcagggtgatcaatttaggaaaacccctgaccaacctggggacagctaccctcaatatccagtggcctaaggaaataagcaacggaaaatggttactgtatctggtcaaagtagaatcaaaaggattggagaaagtgacatgcgaaccgcagaaagaaatcaatagcctgaacctcacagagtcccataatagccgcaagaagcgggaaatcacggaaaagcagattgacgacaaccgcaagttcagtctgtttgcagaaaggaaataccagaccctgaactgtagcgtcaacgtgaactgtgtcaacatcaggtgccccttacgcggattagactcaaaggctagccttattctgagaagcagactctggaactccacatttttagaggaatactcaaaactgaactacctggatatcttaatgcgggcattcatagatgtgaccgctgccgcagagaacattaggctcccaaatgctggcactcaggttagagtgactgtgttcccttccaaaacagtggcccaatacagcggggtgccctggtggatcattttggttgccatactggctggcatactcatgttagccctgttggtgtttatcttgtggaagtgtgggttctttaagcggaacaaaaaagatcattatgacgcaacataccataaagctgaaattcacgcccagccttcagacaaggaacggcttacgtcggacgcctag

SEQ ID NO: 29044 - DNA, 3339 bp, synthetic construct
  misc_feature 1..3339: note = Description of Artificial Sequence: Synthetic coding sequence
  source 1..3339: mol_type = other DNA
atggcggcagcaggacagctctgtctcctctacttgagtgccggacttctgagtcgtctgggcgcagcgttcaacctcgacacacgagaggataatgtcattcggaagtacggcgatccgggatccctattcggcttctctctcgcaatgcattggcaactgcagcccgaagacaaaaggctgctactggttggagcgccaagagcggaggccttaccactgcagagagctaatcggacaggaggactgtatagctgcgatatcaccgcaaggggcccttgtacaagaatcgaatttgacaatgatgccgatccaacctcggaaagcaaggaagaccagtggatgggcgtgacggtgcagtctcaggggcctgggggaaaggtggtaacgtgcgctcatagatacgaaaagaggcagcatgtcaacactaaacaagaatccagagacatttttggaagatgctatgtcctgtctcagaacctgcggattgaggacgacatggacggaggggattggtctttttgcgatggacgccttagaggtcacgagaaatttggatcgtgccaacagggggtcgctgcaacgttcaccaaggacttccattatattgttttcggggctcctggcacctataactggaaggggatagtcagggtggaacagaagaacaacacctttttcgacatgaatatcttcgaggacggtccttacgaggtggggggagagacagagcatgatgaatcactggtgccagtgccggctaattcctatctcggactactgtttcttacctcagtgtcctacactgatccagaccagttcgtgtataagactcgccctcctcgggagcagcctgacacctttcccgacgtcatgatgaattcttacctcggcttctcactcgactccggaaagggcatcgtgtcaaaagacgagatcacttttgtatccggagcgccaagagctaatcattctggagcagtagttttgttaaagcgagacatgaaatccgcccacctgctcccagaacacatcttcgatggagaaggcctagcttcaagttttggatatgacgtggccgtggtggacttgaacaaggacgggtggcaagacatagtaattggcgctccacagtatttcgaccgggatggcgaagtcgggggagctgtgtatgtttacatgaaccagcagggacggtggaacaacgtgaaacccatccggttaaatggtacaaaggatagcatgttcggcattgccgtgaagaatattggggacattaatcaggacgggtaccctgacatcgccgtgggggctccctacgacgatttagggaaggtgtttatctatcatgggtccgctaatggaattaatacaaaaccgactcaggtgcttaaagggatttcgccatatttcggctactccattgcaggtaatatggacctggatagaaactcttatccggacgtcgccgtcggcagtctgtctgatagcgtcaccattttccgcagtaggcccgtgatcaatatccagaagactatcacagtgacacctaatagaatcgacctcaggcagaagactgcctgcggcgcaccaagcggcatttgtttgcaggtgaagagttgctttgagtacacagcaaatcccgcaggatacaacccttctatttcaatcgttggcacactcgaggctgagaaagaacggagaaaaagtggactatctagccgagtgcagtttcggaaccagggctctgaaccaaaatatacccaagagctgaccttgaagagacagaagcagaaggtgtgtatggaagagactctatggttgcaggacaacatccgggataagttgaggccaattccaatcacagcatcggtggaaatccaggagcccagcagtaggaggagggtcaatagtttacctgaagtgcttccaatacttaattctgatgagcctaaaacagctcatatcgacgtccattttctgaaggaggggtgcggcgatgacaacgtttgtaattcgaacttgaagctggagtataagttctgcacacgtgagggtaaccaagataagtttagctatttacctattcaaaaaggagtaccggagctggtgttgaaggatcagaaagacattgccctcgagataaccgtgacaaattcacccagcaatccacggaacccaactaaggacggagacgatgcgcacgaggccaaactgattgctacttttcctgacactttaacctatagtgcctaccgggaattgagggcctttcccgagaagcagctgagttgtgtcgctaaccagaacggctctcaggccgactgcgaactcgggaatccctttaagcgaaatagcaacgtaacattttacctggtgctgtcaaccactgaggtgacctttgacacacccgatctggatatcaacctgaaactggagactaccagtaatcaggataatctggcccctatcactgctaaggctaaggtggttatagaactacttctgagtgtgtccggtgtggctaagccaagccaggtgtacttcggaggaactgtggtgggagaacaggctatgaagtccgaagacgaagtggggtctctaattgagtacgagttcagagtcattaaccttgggaagccactaacaaatctcggaacagcgacccttaacattcagtggcctaaggaaatatccaacggaaagtggctcctgtacttagtgaaagtagaaagtaaagggctagagaaggtgacttgcgagccgcaaaaagagattaactctctgaacctaacagagtcccataatagcaggaagaagcgagagattaccgagaaacaaatcgacgataaccgcaagttctcacttttcgccgaaaggaagtatcagacactgaactgtagcgttaacgtgaactgtgttaacatccggtgtccgctaaggggccttgacagcaaggcatcattgattctgagaagccggctgtggaactcaaccttcttagaagagtacagtaaactgaattacctggacattctgatgcgggctttcattgacgtgacggcagcagcggaaaatatcaggttaccaaacgctggaacccaggtcagagtgacagtgttcccttcaaaaaccgtggctcagtatagcggtgttccttggtggatcatcctcgtggcaattctcgctggaattttaatgttggccttactagtgttcattttgtggaaatgtggtttctttaagcgcaacaagaaggaccactacgacgctacttatcacaaggcggagatacatgcccagccatctgataaggaacgtctaacaagcgatgcctag

SEQ ID NO: 29045 - DNA, 3276 bp, synthetic construct
  misc_feature 1..3276: note = Description of Artificial Sequence: Synthetic coding sequence
  source 1..3276: mol_type = other DNA
atggccgcagctggccaattgtgcttgctgtatttgtcagctggactgctgtcccgattaggtgccgctttcaacctcgacacgagagaggacaatgtaatcaggaagtatggtgatcccggttcccttttcggcttcagcctggccatgcattggcagctccagcctgaagataaacgcttactgctggtgggagcacctcgggcagaagctttgcctctgcagcgagccaatcgtacggggggactctactcttgtgatattacagcacgtggtccgtgtacccggattgaattcgacaacgatgcagatcctactagcgaaagcaaagaggaccagtggatgggtgtgaccgtccagtcacagggtcctggtgggaaggtggtcacttgcgcgcacagatacgagaagagacaacacgtcaatactaagcaggagagcagagacatcttcggtcgatgctatgtcctgagtcaaaatttgcgcatcgaagacgacatggatgggggagactggtcattctgcgacgggaggctgcggggacatgagaaattcgggtcctgtcagcagggcgtagctgccactttcactaaggactttcactatatcgtgtttggcgcaccaggcacctataactggaagggcatcgtgagagtggaacaaaaaaataacacgttttttgatatgaacattttcgaggacggaccttacgaagtcggcggagagaccgagcacgatgagagcttggtcccagtccctgccaatagttatctgggctttagcctggattccggtaaaggcattgtctctaaagatgagatcaccttcgtgtctggcgctcctcgcgctaatcattcaggcgctgtggtcctgctcaaaagagatatgaaatccgcccacctactacctgaacacatctttgatggagagggtctcgcctcctcattcggatacgatgtggctgtggtggaccttaacaaagacgggtggcaagacatagtgataggtgcgccacagtatttcgaccgggatggtgaagtgggtggcgctgtttatgtgtacatgaaccagcaggggagatggaacaatgttaaaccgatcaggctgaatggaacaaaggattccatgtttggcatcgcggttaagaatatcggcgacataaaccaagatggatatcctgacatcgcagtcggggctccttacgatgatctgggcaaggtctttatctaccatggcagcgctaatggcattaacacaaagcccacccaggtgctgaagggtatctccccatattttggctacagcatcgctggaaatatggaccttgacaggaacagttacccggatgtcgcagtcggctccttgtctgatagtgtgacaatattcaggagccggcctgtcatcaacatccagaaaactattacagtgacacctaatcgcattgacttgcgtcagaagacagcctgtggggctccctccgggatttgtctgcaagtgaaatcttgttttgagtacaccgcaaacccggcaggctacaacccatcaatcagcatcgtggggaccctagaggccgaaaaggaacgcagaaagagcggactctcatcacgcgtgcagttccgaaaccagggcagtgaacctaagtatacacaggaactcacattgaagcgacagaaacagaaggtctgcatggaggagaccctgtggttgcaggacaatataagggacaaactgcggccaattcctattaccgcttccgtcgagattcaggagccatcatccagacggagggtaaacagtttacccgaagtgctccctatactgaatagcgatgagccgaagaccgctcatattgacgtgcactttctgaaagaagggtgcggcgatgacaacgtctgcaactccaatcttaagctcgagtataaattttgtactagggagggtaatcaggataagttttcgtatctgccaattcagaagggagtgcctgagctcgtcctcaaagaccagaaggatatcgctctcgagatcaccgtgaccaattcgccaagcaatccgcgtaatcccacaaaggacggcgacgatgcacacgaagccaaactaatcgccacatttcccgatactctgacgtactccgcctatagagaattgagagcgtttcctgagaagcaactgtcttgtgttgcgaatcagaacggctcacaggcagactgcgagctcggaaaccccttcaagcgcaatagcaacgttacattctatttagtgctgtctactacggaggttacgttcgacacacccgacctagatattaacctcaaacttgaaacaacttccaaccaggataacctggctcccattacagctaaggctaaagtggtgatcgagcttttgctgtccgtcagcggcgttgcgaagccatctcaggtttattttggcggtacagtggtcggggagcaggccatgaaatcggaggatgaagtcggatcgctgattgagtacgaatttcgcgtaatcaaccttggcaaaccgctgaccaaccttggtaccgccaccttaaatatacaatggcccaaggaaatctcgaacggaaagtggcttctgtacctcgtgaaagttgagtccaagggcctcgaaaaggtgacgtgcgaaccccaaaaggaaatcaattctctgaacctgactgagtcccacaatagtcgcaagaagcgcgaaataacggaaaaacagatcgatgacaatcgcaagttcagtctctttgcggagagaaaatatcagactctcaattgctcggtcaacgtgaattgtgtgaatatcaggtgccccctcagaggtctggacagcaaagcttccctgatcttgagatctcgcctgtggaactcaacattcttggaggaatactccaagctgaattatttggacatcctgatgcgcgcatttatcgatgtcactgcggctgctgagaacatccggctgcctaatgccggtacccaggtgagagtgactgtctttccgtcaaagacagtggcccagtatagcggagtcccctggtggattatcctggtcgcaatcctcgcgggaatacttatgctggcactccttgtctttatactgtggaaatgtggctttttcaagcggtcccgctatgacgattcagtgccacgataccacgccgtccggattcgtaaagaggaacgcgagatcaaagatgagaagtatatagacaatttggagaagaaacagtggattactaagtggaacgaaaatgagagttattcttag

SEQ ID NO: 29046 - DNA, 2865 bp, synthetic construct
  misc_feature 1..2865: note = Description of Artificial Sequence: Synthetic coding sequence
  source 1..2865: mol_type = other DNA
atgggggtgaccgtccagtcacagggacctggaggcaaggtggtcacatgcgcccatagatatgaaaagagacagcatgtgaacacaaagcaggaatcccgcgatatcttcgggagatgctacgtgctctcccaaaacctgaggatcgaggacgacatggacggaggagactggtctttttgtgacggaagactgcgtggccacgaaaagtttggatcttgccagcaaggcgttgctgcgaccttcactaaggattttcactacattgtgttcggcgcacccggtacctacaattggaaggggctactcttcctgaccagcgtttcttacacagacccggatcagttcgtgtacaagacccggccacctcgcgaacagcctgacactttcccggacgtcatgatgaactcgtatctaggatttagcctggactctgggaagggaatcgtctctaaagatgaaattacattcgttagtggcgctcctagagctaaccactccggcgcagtggtgctactcaagagagacatgaaatctgctcacctgctgccagagcacatattcgacggggaggggcttgcaagcagcttcggttacgacgtcgccgtggttgacctcaataaggatggatggcaggacatcgtaattggggctccacaatattttgaccgagacggagaagtaggaggcgcagtgtacgtatatatgaaccagcagggacggtggaacaacgtaaaacctattcggctcaacggtacaaaggatagtatgttcggtattgccgtcaagaacattggagatattaatcaggatggctacccggacattgcagtgggcgctccttacgatgacttgggcaaggtatttatttaccacggaagcgccaatgggatcaatactaaaccaactcaggtgctgaaggggattagcccgtactttggatacagtattgccggtaatatggatctggataggaattcatatcctgatgtagccgtgggcagccttagcgactctgttaccatctttcgcagccgtcctgtgatcaatattcagaaaaccatcacagtgaccccgaaccggatagatctgaggcagaaaaccgcctgcggagcccctagcggtatctgcctccaagtgaagtcctgcttcgagtataccgcgaaccccgctggatataatccgtccatcagcattgtgggaactctcgaggccgaaaaagaaaggagaaaatctggcttgtcttcccgagtgcagttccgtaaccaggggagcgagcccaaatatacacaagagctgacgttaaaacgccagaagcagaaagtgtgcatggaggagaccctctggctgcaggataacatccgcgacaagcttcggcctattcccatcacagcaagtgtcgagatccaggagccctcttctagacgcagggttaattctttacctgaagtactgccaatcctgaatagtgatgaacctaaaactgcacacatcgacgttcattttctcaaggagggctgtggtgacgataacgtctgtaatagtaatctgaaactcgagtataagttttgcacacgggaaggaaatcaggacaagtttagttacctgcccatccaaaagggggtgcccgaattagtgctcaaggatcaaaaagacatcgccctcgaaataaccgttaccaactccccaagcaatcccagaaatcctacaaaagatggcgacgacgcccacgaggctaaattgattgccacatttcctgatactttgacctacagcgcctaccgagagcttagggcgtttccagagaagcagctttcctgcgtcgcgaatcaaaatggttcccaggctgactgcgagctcggaaatccgttcaagagaaattcgaatgtaaccttctatcttgtgctctccacaaccgaggtgacgtttgatacgccagacctagacatcaatctaaaactggaaacgaccagcaatcaggacaatttagctcccataacagctaaagcgaaggttgtgatcgaactcctcctctccgtgagcggagtggccaagccctcccaggtatactttgggggtacagtggttggggaacaagctatgaagtccgaagatgaagtgggaagcctgatcgaatacgagtttcgcgtgatcaatcttgggaagccattgactaacctggggaccgctactctgaacattcagtggccaaaagagatttccaatggtaagtggctgctgtatctcgtaaaggtggaatcaaaggggctagagaaggtgacctgcgaacctcagaaggagataaattctctgaatctgacagagagccacaatagcaggaagaaacgcgaaatcacagaaaaacagatcgatgacaataggaagttcagtctctttgccgagcggaagtaccagacactgaattgcagcgtgaacgtgaattgtgtaaatatacgttgccctctaaggggactcgacagtaaagcttctctgatactgaggagcaggttgtggaattccaccttcctggaggagtacagcaaactcaactacctggacattctgatgcgggcttttatcgatgttacagcggcagccgagaatattcgcttgccaaatgcaggcacccaggtccgagttaccgtttttccatccaaaaccgtggctcagtacagtggcgtgccatggtggatcattctagtcgccattctagccggtatcttaatgttagcactcctggtgttcatcctgtggaaatgtggcttttttaaaaggaacaaaaaggaccattatgacgcgacttatcacaaggcagaaattcatgcccagccttctgacaaggaacgcctgacgtcagacgcttag

SEQ ID NO: 29047 - DNA, 3393 bp, synthetic construct
  misc_feature 1..3393: note = Description of Artificial Sequence: Synthetic coding sequence
  source 1..3393: mol_type = other DNA
atggccgctgccggacagctgtgtctactgtatctttctgccggacttttgtccaggctgggcgcagcttttaacctcgataccagggaggacaatgttattagaaagtatggtgacccgggatccttgttcggtttctcacttgccatgcattggcagctgcagcctgaggacaagagattactgctggtcggtgctccgcgagccgaagcacttccactgcagagagcgaacagaaccgggggtctctatagctgtgacattactgctcgcggaccgtgcaccagaatcgaattcgataacgatgccgaccctacatccgagtccaaggaggatcagtggatgggagtcacagtccaatcccagggaccaggagggaaggttgtgacatgcgcacaccgatacgagaaaagacagcatgtcaataccaagcaagaatccagagacattttcgggagatgttacgttttgtctcaaaacctgcgcatagaggacgatatggatggcggagactggagtttttgtgatggcagactgcgcggtcacgagaaatttggaagttgtcagcagggggtggcagccacttttacgaaagatttccattacattgttttcggcgctcctgggacttacaattggaaggggatcgtgcgagttgagcagaaaaataatacgttttttgacatgaatatcttcgaagacggaccctacgaagtcggtggcgaaaccgagcatgatgagagtctggtacccgttccagccaattcctacttgggacttttattcctcacgagtgtgagttacacggatcccgatcagtttgtttacaagaccaggccaccaagggagcaaccagacaccttccccgatgtcatgatgaacagctatctgggcttctctctggactcaggcaaaggcattgtgagtaaggacgaaataacttttgtatctggggctcccagggctaaccactccggcgctgtggtgctgctgaaacgggacatgaaatctgcccacctactgcccgagcatatcttcgacggagaaggactggcatcatcttttggttatgacgtagccgtggtggatctgaacaaggacggctggcaggatatcgtgattggggcaccccagtactttgatagggatggggaggtcggcggagccgtgtatgtctacatgaaccagcaaggacggtggaacaacgttaaacccatcaggttaaacgggaccaaagattcaatgttcgggatcgccgtaaaaaacatcggcgacatcaaccaagacggctatcccgatatcgccgtaggcgcaccatacgacgatctgggtaaagtcttcatttaccacggtagcgctaatggcatcaacaccaaaccaacccaggtgctgaagggtatcagtccatatttcggctacagcatcgctggcaacatggaccttgaccggaacagttatccagacgttgccgtgggttctttatctgacagcgtgacaattttccgctcacgacccgtcatcaacattcagaaaacaattacagtaaccccaaatcgcattgatttaaggcagaagacagcgtgtggggctcctagcggcatttgtctacaggtgaagagctgttttgagtataccgccaaccccgctgggtacaaccctagcattagtatcgtggggactctggaggccgagaaggagcgcaggaaatccgggttgtcaagtcgggttcagttcaggaaccagggaagcgaacctaagtacacacaggaattgaccctcaaaagacagaagcagaaggtgtgcatggaggaaaccctctggttgcaggacaatattagggataagctgagaccaattcccatcacagcatccgtggagattcaggagcccagcagcaggagacgcgtaaacagcttgccagaggttcttcccatcttaaattccgacgagcctaaaacggcacacattgacgtgcacttcctcaaggagggatgcggagatgacaacgtctgcaactcaaacctgaaacttgaatataaattctgtacgagagaaggaaatcaggataagttcagctatctccccatacaaaaaggagtgccagagcttgtcctcaaagatcagaaggatatcgctcttgagatcaccgttactaacagcccatcaaatcccagaaaccctacaaaagacggcgatgatgctcatgaagccaagctcattgctacgtttccagataccctgacatacagcgcatatagggagctaagagccttccccgaaaagcagctgtcatgcgtcgctaaccaaaatggctcccaagccgactgtgagttaggaaacccatttaaacgcaactcaaatgtcacgttctatctggtgctgtctacaaccgaggtcacattcgacactcctgatctggacatcaatcttaaattggagacaacgagtaatcaggataacttggctcccatcaccgctaaggcaaaagttgtgatcgaactgctcttatctgtgtctggcgtggccaagcccagccaggtatactttggaggcactgtcgttggtgaacaggccatgaaatccgaggacgaagtcggttctctgatcgagtatgaattcagagtgattaaccttggaaaaccccttactaacttaggcacggcaaccctgaatatccaatggcccaaagaaatcagcaatggtaagtggctgctctatttggtgaaggtggagtctaaggggctggagaaagtgacgtgcgaaccacagaaggagattaacagccttaatctaacggaatctcacaacagtaggaaaaaacgcgaaatcaccgagaagcaaatagatgacaaccgcaagttcagcctatttgcggaaagaaaataccagactttgaactgctctgttaacgttaactgcgtaaacatcagatgcccacttcgcggtttggactccaaggcgtcccttattttgaggagtagactgtggaattcgactttcttagaggagtatagcaaactcaattacctcgacattctgatgagggcattcatcgatgtaacagctgctgcggaaaacatcaggctacctaacgccggtacacaagtccgtgtgactgtgttcccgagcaagacagtcgcgcagtactcaggcgtaccctggtggatcatcctggtggctatcctggccggtatcctgatgttagccttgctcgtgttcatcctttggaaatgtgggttctttaagagatcgagatacgatgactcggtgccaaggtaccatgcagtacgaattcgcaaggaggaacgggaaataaaggacgaaaaatacattgacaacctcgagaagaagcagtggattaccaagtggaatgaaaatgagtcttactcatag

SEQ ID NO: 29048 - DNA, 3261 bp, synthetic construct
  misc_feature 1..3261: note = Description of Artificial Sequence: Synthetic coding sequence
  source 1..3261: mol_type = other DNA
atggcagctgcaggccaactgtgccttctttatctgtcggctggattattaagtcgacttggcgcagcctttaacttggacactcgggaggacaatgttatacggaagtatggagatcccggatccctctttggcttctccctggccatgcactggcagctgcagccagaagataagcggttattgttggttggcgctcctcgggcagaggccctgccactccagcgcgcaaataggactgggggtttgtatagctgtgacataaccgcccgaggcccttgtacacgcatcgagttcgataatgacgccgaccctacctctgagtcgaaagaagaccagtggatgggcgtcacggtgcaaagtcagggccctggaggaaaggtggtcacgtgcgcacatcgttatgaaaagagacaacacgtgaacacaaaacaggagagtagggatatcttcggtagatgttacgtactcagccagaatcttcgcatcgaagacgatatggacggcggagattggagcttttgtgacggaaggttgcggggtcacgagaagttcggatcttgtcagcaaggggtagcggctacctttacgaaggactttcattatattgttttcggcgcacctggtacctataattggaagggacttcttttccttacctccgtctcatatactgaccccgaccagtttgtttacaagacacgcccaccgagagaacagcccgacaccttccccgacgtgatgatgaatagctatctgggattcagcctggatagcggtaaaggtattgtcagcaaagacgagattaccttcgttagtggtgcccctagagctaatcactctggggctgtggtactcttaaaacgtgacatgaaaagcgcccatttgttacccgagcacattttcgatggtgaagggctggccagcagctttggctacgacgtcgccgttgtggatttgaacaaagatggatggcaggacatcgtgattggcgctccgcagtacttcgatcgagatggtgaagtaggcggtgctgtctatgtgtacatgaaccagcaaggcagatggaataatgtcaagccaatcagattgaatggaacgaaggattcgatgtttggaatcgcggttaagaatattggcgatattaatcaggatggctacccggatatagccgtcggtgcaccttatgacgacttgggaaaggtgttcatttaccacggtagtgctaatggtataaacaccaagcctacgcaggtacttaaaggcatctccccttacttcgggtacagcattgccggaaacatggacttagatcgaaacagttaccctgatgtggcagtgggcagcctttcagacagcgtgaccatttttcgatcacgacccgtcattaacatccagaagacgataaccgtgactcccaatagaattgatctgaggcaaaaaaccgcatgcggggctccatctggtatctgcctgcaggtcaagtcctgcttcgagtataccgccaaccctgctggctataacccctctatttcgattgtcggcaccctggaagctgagaaggagcggcgaaagagcggtctgagcagtagagtccagttccgcaatcagggctccgagcccaagtacacacaggagttgactctgaaaaggcagaagcagaaggtctgcatggaggagactctgtggcttcaggataatattagagataagctgcgaccgattcctattacagcctctgttgaaatccaagaacccagtagtagaagaagggtgaactctcttccagaggtcttgcccatcctgaattctgatgagcccaaaaccgctcacattgatgttcattttctcaaagagggttgcggggacgacaatgtgtgcaactcaaacctcaaactggaatacaagttctgcactagagagggcaaccaggacaagttctcgtacttgcccatccagaagggagtgcctgagctggtgcttaaagatcaaaaggatattgctctggaaataactgtgacaaactccccttctaacccacgcaaccccacaaaggacggggatgatgctcatgaggcaaaactgatagccacgtttcccgatactttaacctactctgcctacagggagctgagagctttcccagagaagcagctttcctgcgttgctaaccagaatggttcccaggcggactgtgaactgggaaatcccttcaaacggaattcaaacgtcaccttctatttggttctctccaccactgaggtgacgttcgacacccctgacttggacattaatttgaagttagaaacaacttccaatcaggataaccttgcccctatcaccgccaaagccaaggtggtgatcgagctcctgctcagcgtgtctggtgtggcaaaaccaagccaggtttatttcggtggtacagtcgtcggggaacaggctatgaagagcgaggacgaagtcggtagtcttattgagtacgagttccgggtgatcaacctgggcaaaccactaacaaacctggggaccgctaccctgaacatccaatggcctaaagagatctcaaacggaaagtggctcctttatctcgtcaaggttgagtcgaagggcctggaaaaggtgacctgcgaacctcagaaggagatcaactcacttaatctgaccgaatcccataacagccggaagaagcgggaaatcaccgaaaaacaaatcgacgacaatcgcaagttttcacttttcgccgagcggaagtatcagaccctgaattgcagtgttaatgtgaattgtgtaaacatcaggtgccccctccgaggcctagactccaaagccagccttattcttaggagcagactctggaattccactttcttggaagagtatagcaagctgaattatcttgacattctgatgagagcatttatcgatgtgaccgcagccgcagagaatattaggctgcctaacgccggtacccaggtgcgggtgacggtgttcccctcaaaaacagtcgctcagtactccggcgttccttggtggatcatcttggtggctatcctggccggaattctaatgttggctttgcttgtcttcatactttggaagtgcggcttcttcaaacgctccagatatgatgactctgtacccagatatcacgccgttcgaatccggaaggaagagagagagatcaaggacgaaaagtatatcgataatctggaaaagaagcaatggattactaaatggaatgagaatgagagttatagctag

SEQ ID NO: 29049 - DNA, 3414 bp, synthetic construct
  misc_feature 1..3414: note = Description of Artificial Sequence: Synthetic coding sequence
  source 1..3414: mol_type = other DNA
atggcaggcgctagatcaagagacccttggggtgcatccggaatatgctacctattcgggtcgctgttggtggaactgctgttctctagagctgtcgctttcaacctggatgtaatgggcgcattgagaaaagagggtgaacccggaagtctcttcgggttttcggtcgccctacatcgacagctgcagcctcggccacagagctggctactggtcggcgctcctcaggcgctggccctgccaggccaacaggcgaatcgcacaggtgggcttttcgcctgccccctctcactcgaggagacagactgttatcgggtggacatcgatcaaggcgctgatatgcaaaaggaatcaaaggagaatcagtggctcggtgtctccgtgcggagccaaggaccagggggtaagatcgtaacctgtgcccatcgctatgaagccagacagcgcgttgaccagatccttgaaacacgagatatgatagggcgatgcttcgtactgagccaggacttggcaataagagatgaactggacggcggagaatggaaattttgtgagggccgtccacagggacatgagcagtttggcttttgccagcagggtactgccgcagctttttcgcctgattctcattaccttttgtttggcgcacctgggacatacaattggaaggggttactcttcgtaactaacattgactcttctgatcctgatcagctggtatacaaaactcttgaccccgctgatagactgcccggtccggctggcgatcttgctctaaactcctacctgggtttttccattgatagcggcaagggtttagtccgcgctgaggagctgtctttcgtcgctggggcaccaagggctaaccataagggtgcagttgttattctacgcaaggactcagctagcagactggtgccagaggtgatgctcagcggcgaaaggctgacctctggttttggatacagcctggccgtggcagatttgaactccgatggctggcctgatctgattgtgggcgctccatatttctttgaacgacaagaagaactgggaggcgctgtgtatgtgtacctcaaccagggaggacattgggccggaatctcaccattacggctctgcggcagccctgatagcatgttcggaataagcctggctgtgctgggtgacttaaaccaggatggcttccccgacatcgcggtcggcgctcccttcgatggagacggtaaggttttcatatatcatggcagctccctgggagtcgtcgcaaaacccagccaggtcttggagggggaagcagtggggattaagagtttcggatactctttatccggctctctggacatggatggcaatcagtaccccgatctgctcgttggcagtctcgcagatacagctgtgctctttcgggctagacctattctgcacgtgagccatgaggtatccatcgccccacgatccatcgacctggaacagcccaattgtgccggaggtcattcagtttgtgtggacctgcgcgtctgctttagttacatcgcagtcccctcatcttactctcccacggtcgcactggattacgtgctagacgccgacactgataggcgactgcggggacaggtaccaagggtaactttcttatccagaaatctggaagagccaaaacatcaggcttcaggcacggtgtggctgaagcatcaacacgaccgggtgtgcggagatgccatgtttcagttgcaagaaaacgtgaaggataagcttagagccatagtggtgaccctgtcgtacagcctgcagacgccacgcttacgcagacaggccccaggacaggggctgcccccagtcgcgcctatcctaaatgcacatcagccttccacccagagagcagagatccattttctgaagcaggggtgtggtgaggataaaatatgccagtcaaatctccaactcgttcgcgcaagattctgtacgcgtgtgtccgatactgagttccagcccctgccaatggatgttgatggcaccaccgccttatttgccttgtctggacaaccagttattggactggaactgatggtcactaacctgccctcggatcccgcacagccgcaagctgacggcgatgacgcccacgaggcccagctgctagttatgttgcctgactcgttgcactattctggcgttcgcgctctggacccagccgagaaacccctctgcctatccaatgagaatgcctctcacgtggagtgcgaactcgggaaccctatgaagaggggagcacaggtgaccttttatttgatcctgagtactagcggcatcagcatcgaaaccacagaactcgaggtggaattgctactcgcaactatcagtgaacaggagctgcaccccgtttcagcaagagccagggtgtttatcgagctgccccttagtatagccggtatggctatcccgcagcagctgttcttcagcggagttgtgcgaggggagcgggcaatgcagtctgaaagggacgtgggaagtaaggtgaaatatgaggtcactgtgagcaaccagggtcaaagcctcagaacattgggctccgcgttcctgaacataatgtggccacatgagatagcgaatggcaaatggcttctttatcccatgcaagtggagctggagggaggtcaaggccctggacagaaaggtctatgctcacctcgtcccaatattctgcatctggatgtggacagtcgggaccgtcgacgcagggagttggagcccccagaacagcaggaaccgggagagcgacaggagccttctatgagctggtggccggtgtcctcagctgagaagaaaaaaaacattacattggactgcgcacgtggcacagctaattgcgtggtttttagttgtcccttgtattcctttgatcgtgctgccgtgctccatgtttggggtcgcttgtggaatagtaccttcctagaggaatacagcgcggtgaagagtttggaagtgatagtcagagcaaacatcactgtgaaaagctccatcaaaaatctgatgctcagggatgcctctaccgtgattccagtgatggtgtatcttgaccctatggccgtcgtcgcagaaggggtcccctggtgggttatcctgttggcggtgttggctggattgttggtgctcgccctcctcgtcctgttgctgtggaagatggggttcttcaaaagagccaagcaccctgaagccactgtgccccagtaccatgcagttaagatcccgcgtgaggaccgccagcaattcaaagaagagaaaaccggcactatactgagaaataactggggctcccctcgtcgggaaggccctgatgcgcaccccattttggccgcagacggtcacccagagctgggtccggatggtcatcctgggccaggcaccgcctag

SEQ ID NO: 29050 - DNA, 3489 bp, synthetic construct
  misc_feature 1..3489: note = Description of Artificial Sequence: Synthetic coding sequence
  source 1..3489: mol_type = other DNA
atggctggagccaggtctagggatccctggggggcatcaggaatctgctacctgtttggcagcctcctggtggaattgttatttagtagggctgtggcctttaacctggacgtgatgggagcgctccggaaggaaggagagcctggcagcttgtttggcttttccgtggctctgcatcgccaattgcagcccagaccacagtcgtggcttctggtgggcgcacctcaagcccttgccctgcctggccagcaggcaaatcggaccggaggcctgtttgcttgcccccttagccttgaggagactgactgctatcgtgttgacattgaccagggtgcagacatgcagaaagagtctaaagagaaccagtggttgggagtcagcgtgaggagtcaagggccaggcggaaagatcgtgacatgcgcccatcgctatgaggcacggcaaagggtcgaccagatcctggagacaagagacatgattggaaggtgcttcgttctgtctcaggacttggccattcgggatgaactcgacgggggtgaatggaagttttgcgaaggaagacctcagggccacgagcaatttggtttttgtcagcaagggaccgctgccgcttttagtcctgattcccactacctactctttggcgcacctggtacttataattggaaaggtacagctcgggtggagctatgcgcacaagggtccgcagatttagcccacctcgatgacgggccttacgaggccggtggggaaaaggaacaggatcctagactcattccagtgccagccaactcctacttcggcctcctgtttgtgaccaacatcgattcatctgatccggatcagctcgtgtataaaactctcgaccccgctgaccgactgcccggacctgccggagatctggcactgaacagctatctgggcttcagcattgacagtggaaaaggactcgtgcgggctgaggaactcagcttcgtagctggcgcaccacgcgcaaatcataaaggtgccgtggtgatccttcggaaagatagcgcttctcgcctggtccccgaggtgatgctgtctggtgaaaggctcacatcaggattcggctactccctggccgtggcagatctcaacagcgatggatggccagacttgatcgttggcgctccttatttctttgaaaggcaggaagaactcggtggggctgtatatgtgtaccttaaccagggtggacactgggcaggtatttctccactcaggttgtgcggatccccggatagcatgttcggaatcagcctcgccgttctgggcgatctgaatcaggatggcttcccagatatcgccgtgggcgctccctttgatggagacggcaaggtgtttatttaccacggcagcagcttaggcgttgtggctaagccaagccaggtactggaaggtgaggcggtcgggattaagagcttcggctacagcctctctggcagcctcgatatggatggcaatcagtaccctgacctgctggtgggtagtctggctgacaccgcggtcctctttcgcgcacgcccaatacttcacgtgtctcatgaagtctctatcgcaccccgatctattgatctcgaacagcccaactgcgcgggtggccatagcgtatgtgttgacctccgcgtctgtttcagctatatcgcagtcccatcaagttactctccaaccgtcgctcttgattatgtgttggacgcggacacagacaggcggttgagaggccaggtgcctcgagttacatttctctctcgaaacctggaagagcccaagcaccaggccagcggcacagtctggctcaagcaccaacacgacagggtgtgtggcgatgctatgttccagctacaggagaacgtgaaggacaaattacgcgctatagtcgtcactttgtcttactccctacaaacccccagactgaggcggcaggctccgggacaaggcttaccgccagtcgctccgattctcaatgctcaccagccgagcacccaaagagccgagattcattttctcaaacaggggtgcggagaggacaagatttgccagagtaatctccagctcgtacgggcacggttctgcactcgcgtgtcagatactgaatttcagcctcttcccatggacgtggacgggacgactgcattgtttgccttgagcgggcaaccagttattggactggaacttatggtcactaatttaccctccgatcctgcccaaccacaggcagatggggacgatgcacatgaggctcagctccttgttatgctgccagatagtttgcactatagcggcgtgcgtgccctcgatcccgctgagaaaccgttatgtttgagcaacgagaatgcttcacacgttgagtgtgagcttgggaaccctatgaagcgtggtgctcaggtgacgttttatcttatcctgtcgactagtggaataagtattgaaaccacagagcttgaggttgaactacttttggccaccatttcagagcaagagctgcaccctgtttcagccagggcccgagtattcatcgaactgccgctgagcatagcaggcatggcaatcccacagcaactctttttctcgggtgtggtccgaggagaaagggcgatgcagtctgaacgagacgtgggtagtaaagtgaaatacgaggttacagtgtccaaccagggacaatccctcagaaccctgggctccgctttcctcaatatcatgtggcctcatgaaatcgctaatgggaaatggctactctacccgatgcaagtggagttagaggggggacaggggccaggtcaaaagggactttgcagcccacgacccaacattcttcatctggatgtggactctcgcgacagacggaggagggagctcgagcctcctgagcaacaggagcctggagagaggcaggagccctctatgtcatggtggccggtttcttctgcagaaaaaaaaaaaaatataaccctagattgtgccagggggaccgccaactgcgtggtgtttagctgtcccctttattcctttgatcgtgccgcagttctccacgtgtggggacgactttggaatagcacctttttggaggaatacagcgcagtgaaaagcttggaggtaatagtgcgcgcaaacatcacagtcaagtcttccatcaagaacctgatgctgcgtgacgctagcacggtgattccggtaatggtatacctcgatccaatggccgtggtggccgagggcgtgccctggtgggtgatcttactggctgttctggccggactgctcgtcctagcgctcctggtacttcttctgtggaaatgcggcttttttcacaggagtagccagtccagctcatttccaactaattatcacagagcctgtcttgcggtccagccatccgcgatggaagttgggggtcccggaactgtggggtgggacagtagtaatgggaggagtacgcctcgtcccccatgtccctcaactatgagatag

SEQ ID NO: 29051 - DNA, 2976 bp, synthetic construct
  misc_feature 1..2976: note = Description of Artificial Sequence: Synthetic coding sequence
  source 1..2976: mol_type = other DNA
atggccggagctcggtcgcgggacccctggggagcatctggcatctgctatctgttcggatccttactggtcgagttactgttcagtcgagcggtcgctttcaacttagacgtaatgggagcccttcgaaaagagggagagcctggctccctgtttggtttttcagtggcgctgcacagacagcttcaacccaggccccagagttggctgcttgttggggctccccaggcgctcgcgctgcctggacaacaagcgaacaggacaggcggtctcttcgcctgtccactttccctagaagaaacagactgctatcgagtcgatattgaccaaggagccgacatgcagaaggaatccaaggaaaaccagtggctgggtgtgagcgtgaggagccagggaccaggagggaagatagtaacatgcgcacaccgctacgaagctcgtcagagggtggaccagattctggaaacccgtgatatgattggcagatgcttcgtgctctcccaggacctcgccattcgggatgagctcgacggaggtgaatggaaattctgcgagggaagacctcagggtcacgaacagtttggcttctgtcagcagggaaccgcagcagctttttctcctgattcacactacttgctcttcggtgcacccggaacgtacaactggaagggaactgcaagggtggagctgtgcgcacagggctcagcggacttggcccaccttgatgacggcccttacgaagccggtggtgagaaggagcaggatcccaggctcatcccggtaccggctaatagctactttggcctattgtttgttactaacattgactctagcgaccctgaccagctggtctacaaaaccctggatccagcagatcgtctgcctggccctgccggagacctggctctgaacagctatctcggtttctcaattgactccggcaaaggactcgtgagagctgaagagttgtccttcgttgccggagcacctcgtgctaatcacaagggggctgtcgtgattctgcggaaagattctgcttcacggctggtgcctgaggtcatgctgagcggagagcgcttgaccagtggcttcggatactctctggccgtggccgacctcaacagcgatggctggcccgacctgatcgttggggcaccatacttctttgaaagacaggaagagcttggaggcgcagtgtatgtgtacctgaatcaggggggacattgggccggaatttcacctctgcgcctgtgcggtagccctgattccatgttcggcattagcttggccgtgctgggagatctgaatcaagatggcttcccggatatcgccgttggcgctccttttgatggggacggtaaagtgtttatctaccatggcagctctcttggcgtggtggccaaaccatcccaggtactggagggagaggccgtgggaatcaagagcttcggatactctctctccggaagccttgacatggacggaaaccaatacccagacctgctggtgggctctttggccgacactgccgtattattcagagctagacccattctccacgtgtcccacgaagttagtatcgcaccccgttcaattgatcttgagcaaccaaactgcgccggtggacactccgtctgcgttgatctccgggtgtgcttcagctacatcgcagtgccatcgtcttacagcccgactgtggcgcttgattacgtcctggacgccgataccgatcgcagacttagggggcaggtgcctagggtgacattcctgagcaggaacctcgaggagccaaaacatcaggcactggaccctgccgaaaagccgctgtgcctatctaatgaaaatgcctcccatgtcgagtgtgagttgggtaaccccatgaagcggggagctcaagtcactttctacctgatcctatccacaagcggtatcagtatagagactacagaactggaagttgagctcctcctggctaccatctccgaacaggaactgcaccccgtgtcagcacgggcacgagtgtttatcgagctgccactctccattgccggaatggccattccccagcagcttttctttagtggggtggtccgaggggaacgcgcaatgcagagcgagcgcgacgtaggaagtaaagtgaaatacgaggtgaccgtctccaatcaaggtcagtctcttcggacactcgggagcgcttttttaaatatcatgtggccccacgaaatcgccaatgggaagtggctactgtaccctatgcaggttgagctggagggaggacagggaccagggcagaagggcctttgttcccccaggccaaacatcctccacttggacgttgattcaagggatcgaagacgtcgtgaactggagccccctgagcagcaggagcccggtgagagacaggagccctccatgtcctggtggccggtatcttctgcagagaaaaaaaaaaacataaccctcgattgtgcaagaggcacggctaattgtgttgtgtttagttgtccattatatagttttgatcgagccgcagtgctgcacgtgtggggacggttatggaacagcacattcttggaagagtactctgccgtcaaatcccttgaggtgatcgtgcgagccaacatcaccgttaagtctagtatcaagaacctcatgctcagagacgcaagcacagtgattcctgtgatggtgtacctcgatcctatggccgtggtggccgagggggtaccatggtgggtgattcttcttgccgtcctggccggactgcttgttctagccttactcgtgctgttgctgtggaagtgcggcttcttccacagatcaagccagtcttcctcattccctaccaattaccatcgagcttgcctggcggtgcagccttccgctatggaagtgggcggtcccggtacggtcggatgggattcttctaacgggagaagtacaccgagaccaccttgccccagcaccatgcgttag

SEQ ID NO: 29052 - DNA, 3357 bp, synthetic construct
  misc_feature 1..3357: note = Description of Artificial Sequence: Synthetic coding sequence
  source 1..3357: mol_type = other DNA
atggccggtgccaggtctcgcgacccttggggagcctccgggatctgttacctgttcgggtccctcctagtcgaactactctttagtagggcagttgccttcaacctcgacgttatgggagcgctccgtaaggaaggtgagcccggatccctgtttggtttcagcgtggcattacatcgacagttgcagcccagacctcagtcctggctgctggttggtgcgccacaagcccttgctctgcccggacagcaagccaatagaaccggcggattgtttgcttgtcctctgagcctggaggaaacagactgttatagagtggacatcgaccagggagctgacatgcagaaagagtcaaaagagaaccaatggctgggggtgagcgtcagatctcaaggcccaggcggtaagatagtcacatgtgcccaccgatacgaggctcgccagcgtgtcgaccagatcttggagacccgcgacatgatcgggcgatgctttgtactttctcaggaccttgctattagggacgagcttgacggaggcgaatggaagttttgtgagggcagaccacaagggcacgagcagtttggcttctgccagcaagggacagccgctgcctttagccccgacagccactacctgctgtttggggctcctggaacttacaattggaagggacttttgttcgtgacaaatatcgattcctcggaccccgatcagctggtttataagacactggacccagccgaccgcctcccgggtccagctggcgatctggcccttaatagctacctcggattcagtatcgattccggcaaagggcttgtgcgcgctgaggagctgagctttgtggctggggcacccagagctaaccataagggtgccgtggtcattcttcgcaaagactctgcctcgagactggtgcctgaagtgatgctctccggagagcgtctgacctccggattcgggtattcccttgccgtcgccgatctcaatagcgacggctggccagacctcatcgtcggcgctccctacttctttgaacgccaagaagaactgggtggagcggtatacgtgtatttgaaccagggaggacattgggcaggcatcagtcctctgcggttatgcgggtcaccagattccatgtttgggattagccttgccgtactgggggacctcaaccaagatggctttcccgacatagctgtcggagcaccgtttgatggagacggcaaagtgttcatctaccatggcagcagcctgggcgtggtcgcgaaaccttcccaggtgcttgaaggagaggcggtcggaattaaaagtttcggttatagcctttctggatctctggatatggatgggaaccagtatcccgatctcctcgtgggatctttagctgacacagccgtactgttcagagctcgtcctatcctgcatgtatcacatgaggtgtcaatcgcgcctcgaagtatcgatctggagcagcctaactgcgctgggggtcacagcgtgtgcgtggacttgagagtctgttttagttacatagccgttccctcctcctacagccctaccgtcgcattagactacgtattggacgccgatacagaccggagactgcgcggacaagtccctcgcgttacattcttatccagaaatcttgaggaacctaagcaccaggcttcagggacagtttggctgaagcaccaacatgaccgggtctgtggagacgccatgttccagttacaggaaaatgtaaaagacaagttgcgtgccatagttgtgacactatcttacagcctccagactcctcgcctgcgccgacaggcaccgggtcagggactaccccctgtggctcccatattgaatgcgcatcaaccgtccacgcaacgggctgaaatccacttcctcaaacagggctgcggtgaagacaagatctgtcagagcaatctccagttagtgagagccaggttttgtacccgtgtctccgacactgagtttcagcccctgccaatggacgtggacggtaccactgcactgtttgctctgtcgggtcagccagttattgggctggagctgatggtgaccaacctcccaagtgaccctgctcagccacaagctgacggcgacgatgctcacgaagcccagctcttggttatgctgcctgactcactccattatagtggagtcagggcgttggacccggctgagaagcccctttgtctgagtaatgaaaatgcctcacacgtggagtgtgaactcggcaatcccatgaaaaggggggcacaggtaacattctatcttatcctgtctacgagtggcatcagtatagagacaacagaactggaagtcgagctgctcctagcaacaatctcagaacaagagctgcatcctgtcagtgcccgagcgagggtgttcattgagttacctcttagcatagctgggatggcgataccccaacagcttttcttttcaggcgtggtgcgtggtgagcgtgcgatgcagtcagaacgggacgtggggagtaaggtaaaatatgaggtgactgtctctaaccagggacagtccctgcgtaccttggggagcgccttcctcaacattatgtggcctcacgaaattgctaatggcaagtggttgctgtatcctatgcaggtcgaactagaaggagggcagggccctggccagaaaggcttatgcagtccacgccctaatattctgcacctcgatgtggactcaagggacagacggagaagagagctggaacctccagaacagcaggagcctggcgagaggcaggagccatccatgtcctggtggcctgtaagttccgccgaaaagaagaagaatattaccctggactgtgcacgaggaactgctaactgtgttgtctttagctgccccctctactcctttgatagagctgcggtgctccacgtttggggcaggttgtggaatagtaccttcttggaagagtactctgccgtgaagtccctcgaagtgatcgtccgcgcaaacatcactgtgaagtcgtcaattaagaatcttatgttgagagacgcaagcaccgtaatccctgttatggtctatctcgatccaatggctgttgtggctgagggcgttccatggtgggtgatcctgctagctgtgctggctgggctgctcgtgctggcattactggtgcttctgctgtggaaatgtggtttctttcatcgctctagccagagcagcagctttcctactaactatcatcgcgcttgcctcgccgtccagccctcggccatggaagtgggaggtccaggaacggtgggttgggactcaagcaacgggagatctactccacgcccaccgtgtcccagtactatgcgctag

SEQ ID NO: 29053 - DNA, 3369 bp, synthetic construct
  misc_feature 1..3369: note = Description of Artificial Sequence: Synthetic coding sequence
  source 1..3369: mol_type = other DNA
atggcaggtgctcgctcacgagacccgtggggagcctcaggcatttgttatctatttggcagcctgcttgtggagctgcttttttctcgcgcagtggccttcaatctggacgtgatgggagcactgcgcaaagagggcgaacctggatctttgttcggcttttcagtcgctctccaccgccaacttcagccgcgacctcagtcttggttgctcgttggggctccccaggcgctggctcttccaggtcagcaggccaatagaaccggcggactattcgcatgtccactctccctggaagagacagattgctatcgggtcgatatcgaccagggcgctgacatgcagaaagagagcaaggaaaaccagtggctcggggtgagcgtgaggagccagggacccggaggcaagattgtgacttgcgcacacaggtacgaagctcggcagcgcgttgaccagatcctggagacgcgcgatatgattgggagatgctttgtgctttctcaagatttggcaatccgggatgaactggatggaggagaatggaaattctgtgaaggtcgaccccagggacacgagcagtttggcttttgccagcagggtactgccgctgctttttctcccgattcccattacctgctttttggggctcctggaacctacaattggaaaggaaccgccagagttgaattatgcgcacaaggatccgctgatctggctcatctcgatgacggcccttacgaggctggaggagaaaaagagcaggaccctcgtttgatccccgtcccggctaacagttacttcggattttcaatcgacagcggcaaaggccttgtcagagctgaggagttatcatttgtggcaggcgcaccaagggcgaaccacaagggagccgtcgtgatccttagaaaagactcggctagcaggctcgtaccagaagttatgttgtccggggagaggcttacctccggattcgggtatagtctggcggttgctgatctgaactcagatggatggccggatcttattgtgggcgcaccttatttttttgagaggcaggaggaactggggggtgcagtatacgtttacttgaatcagggcggacattgggctggaatcagtcccctccggttatgcggctctccagacagtatgttcggcatatcgctcgctgtgttaggagacctgaaccaggacggcttccctgatatagctgtgggcgcaccttttgacggcgacggcaaagtgttcatctaccacggcagctccctgggcgttgtagcaaaaccctctcaggtgctcgagggggaagcagtagggattaagtccttcgggtactccctctccggcagcctggacatggatgggaaccagtaccccgaccttctcgtaggtagcctcgccgataccgccgtgttgttcagagcaagacctattctgcacgtcagccatgaggtgagcattgcgccacgtagtattgacctggagcagccaaactgtgccggaggacatagtgtgtgcgtggacctcagagtctgtttttcatatatcgcggttccctcctcttattcacccaccgttgccttagactatgttttggatgctgacacagatagaaggctccggggacaggtgccacgcgtcacgtttctctcacgaaatctagaggaaccaaagcaccaagctagcggcactgtgtggctgaaacatcagcacgaccgcgtgtgtggcgatgctatgttccagttgcaggagaacgtaaaagacaaattgcgggctatcgtagtcaccctttcttattccctccagacaccaaggcttcgcagacaggctccaggtcaaggactgcctccggtggccccaatccttaatgctcaccagcctagcactcagcgcgcagagatccactttctgaagcagggctgcggggaggataaaatctgtcagtcaaatttacagctagtgcgagcgcgattctgcacacgagtcagcgataccgagttccaaccactgcccatggatgtagatggcacaacagccctcttcgcgctttcgggacaacccgtgattggcctggaattaatggtgaccaacctgcccagcgaccccgctcagcctcaggccgacggagatgatgctcatgaagcccagctgcttgtgatgctgccagactccctgcactattcgggggtccgggctttagaccccgcagaaaaacctctatgtctgtccaacgagaacgcatctcacgttgaatgcgaactcggaaatcctatgaaacgcggagctcaagtgaccttctatttaatattgagcacgtccggaataagcattgaaacgacagagctggaggttgaactgctgttggccaccatttccgagcaggaactacacccagtctccgcaagggccagagttttcattgagcttcctctgagcatcgccggtatggcgatcccccaacaattgttttttagtggtgtagtgcgtggcgagcgagccatgcaaagtgagcgtgacgtcggtagtaaagtgaagtatgaagtcacagtgagcaaccaggggcagtccctgagaactctcggcagtgccttcttgaacatcatgtggccacacgaaattgctaacggaaagtggctgctctatcctatgcaggtggagctggagggcggtcagggacctggacaaaagggcctttgcagtcctcgacctaatatcttgcatctggacgttgactccagggacaggcgacgaagagagctggagcccccagaacagcaggaacctggcgagaggcaggagcctagtatgtcctggtggcccgtcagcagcgccgaaaagaagaaaaacatcaccctggactgtgcacggggaaccgctaattgcgtagtttttagctgcccactatactcttttgacagggctgcggtgcttcatgtgtggggaagattatggaattcgactttcttggaggagtactccgccgttaaaagtcttgaagttattgtcagggctaacattacagtcaagtcgagcatcaaaaacctgatgcttcgtgacgccagtacagtaattcccgttatggtgtacctggaccctatggccgtggtggcggagggagtcccttggtgggtgatacttctcgccgtactcgcgggattactggtccttgcacttctcgtgcttctgctgtggaagtgtgggtttttccacaggtctagccagagcagctcatttcctacgaattatcatcgtgcttgtctggccgtgcagccttctgccatggaggtcggaggccctgggaccgtcgggtgggattcatcaaatgggagaagtactcccaggcccccttgtcccagcacgatgcgctag

SEQ ID NO: 29054 - DNA, 3135 bp, synthetic construct
  misc_feature 1..3135: note = Description of Artificial Sequence: Synthetic coding sequence
  source 1..3135: mol_type = other DNA
atggctccattcgccaccccaatggtccaggccctcacaaccacccgcattcagaggcaggccgaaggtttccagtgttggcgcgaatgcggcaccagacggagcccttttgagggcaaggaaacttgcgctcatagatacgaagccagacagcgagtagaccagatcctcgaaacaagagatatgatcggccgatgtttcgtcctatcacaagacctggccattcgagatgaactggatggcggagaatggaaattctgtgagggccgaccacagggccacgagcagttcggattctgtcagcagggtacggctgctgcattctccccagactcacactatctcctgttcggggctccgggaacatacaattggaaggggactgcccgtgtggagctgtgcgcacagggctccgccgatctagcccacctcgatgacggaccctacgaagcgggtggggagaaagaacaggacccacgtcttattccagtccctgccaactcctactttggtttttccatcgattccgggaaagggttagtccgggctgaagaattgtcgttcgtggccggagctcctcgcgcaaaccacaagggcgctgtcgtcattctcaggaaagactcagcatcccgccttgttcctgaggtcatgctgtccggtgagcgcctcacaagtgggtttggatactctctggcagtagccgatctgaactcagatggatggccagacctgatagtgggagccccatacttctttgagcggcaggaggagctgggtggcgcagtgtatgtctaccttaatcagggcggacattgggccggtatctctcccttacgtctgtgtgggagtccagacagcatgttcggaataagcctggctgtcctgggggatctgaatcaggacggtttccctgatattgccgtgggtgctccttttgacggtgacggcaaagtctttatctaccacggctcttcgctgggagttgttgccaagccatcacaggtattagagggggaagcggttggaattaaaagcttcggctatagtctgagtgggtcactagatatggatggtaatcaatatcccgacctgttagtcggttctcttgctgatactgcagtcctatttagagcccgtccaattctgcacgtgagccacgaggtttctattgcccctcggtctatcgatttggagcagccaaattgcgcaggcggacattccgtatgcgtggatctcagagtttgttttagttatattgccgtccctagctcctattcgcccacagttgcgcttgattacgtgcttgatgccgacactgataggagactgaggggccaagtcccacgtgtcacttttctctctcgcaatttggaagagccaaaacatcaggcaagcggtactgtatggctgaagcaccagcatgaccgggtctgcggtgacgcaatgttccaactccaggagaatgtgaaagataaactgagggcgattgtggtaacactttcctactcgctccagactcccaggctgaggcgtcaagcacccggtcaggggctgcctcccgtggcacctatcttgaacgcccatcagcccagcactcaaagggccgaaattcattttctgaagcaaggatgcggagaggataagatatgtcagagcaacctccagctggtgcgcgctcggttctgcacacgcgtgtctgatacagaatttcagcccttacccatggacgtggacggtaccacagccctattcgccctgagcggtcaacccgtaatcggcctagagttgatggtcacgaacctgccttctgaccccgctcagccacaggctgacggtgatgacgcacatgaagctcagctcctggtaatgctccccgactcactgcactacagtggagtgagggccttggatcctgccgagaagccactttgcctttccaacgaaaatgcttcacacgtcgaatgcgagctcggcaatccgatgaaaagaggagcccaggtgaccttctacctgatcctaagcactagtgggatatctatcgagacaacagagctcgaagtagagctcctgctcgcaacaatctcagagcaggagttgcaccccgtgagcgcccgtgcccgtgtgtttatcgaactccctcttagtattgcaggcatggccatccctcagcagctctttttcagcggcgtggttagaggggagcgagcaatgcaatcggagcgggatgtggggtccaaggtcaagtatgaagtgacagtctcgaaccaaggtcaatctttgcgaactttgggaagcgcgtttctgaatattatgtggccacatgaaatcgccaatggaaaatggttgttgtatccaatgcaggttgagcttgaaggcggacaggggcctggtcagaaaggcttatgttcccccagacctaacatcctgcacctagacgttgattcacgggatcggaggaggcgagaactcgagcctccagaacaacaagagcctggtgaacgccaggagccgtccatgtcatggtggcctgtgtcctctgcggagaaaaaaaagaatattaccctggactgcgccagaggcacagctaactgcgtcgtcttttcctgcccattatacagtttcgatagggcggctgttttgcatgtgtggggtcgattgtggaactctacattcctcgaagagtattccgctgtaaagtctcttgaagtgattgtcagggctaatattactgtaaaatcttctattaaaaatctcatgctgagggacgcaagcacagtcatccctgttatggtatatctggacccgatggcagtcgtggcggaaggagtgccgtggtgggtcattctcctggctgtgctggcagggctgttggtgttggcccttctcgttctgctcttatggaagatgggtttcttcaaaagggccaaacaccctgaggcaaccgtccctcaataccatgctgttaaaatcccgagggaagacagacaacaattcaaggaggaaaaaacaggcacaattctgagaaacaattggggcagcccacggagggaaggaccggacgcccaccccattctcgccgctgacggccacccggaactaggaccggacgggcatccgggacccggtaccgcatag

SEQ ID NO: 29055 - DNA, 3426 bp, synthetic construct
  misc_feature 1..3426: note = Description of Artificial Sequence: Synthetic coding sequence
  source 1..3426: mol_type = other DNA
atggctggcgctcggagccgcgacccctggggagcttccgggatctgttacctgttcgggagcctactcgtggagttacttttctctcgggctgtagccttcaatctggatgtcatgggggctttgcgcaaagaaggggagccagggtcactgtttggtttttcagtggctctgcatcgacagctacagcccagaccccagtcttggctgctagtgggcgctccacaggctctcgcactccctggacagcaggccaatagaactggaggactcttcgcttgtcccttgtctctggaagagaccgactgctatcgagtcgacatcgatcagggggctgacatgcagaaagagagtaaggagaaccaatggctcggagtctccgtaagaagtcaagggccagggggtaagattgtgacgtgcgcccatagatacgaggctagacaacgggtggatcaaatccttgaaactagggatatgattggcagatgcttcgtcctctcacaggatcttgctattcgggacgaattggatggaggggagtggaagttttgcgaagggaggccgcaggggcatgagcaatttggattctgtcagcagggcactgcagcagccttctctcccgactcgcactatctgctgtttggggctcccggaacttataactggaaaggaaccgcccgagtcgagctttgcgcccagggctcagccgacctagcgcacctggatgacggcccatacgaagctggcggagagaaggagcaagatccacgactaatccccgtgccggctaatagctactttggattcagtatcgactccgggaagggattggtccgggctgaggagttatcgttcgttgcaggtgcacctcgcgctaaccacaaaggcgctgtggtgattctcaggaaggattctgcctctcgtttagtgccggaggtcatgctctcaggagaaagactcacgtccggcttcggatactccctggctgttgccgacctgaactccgatggctggccagacttgatcgtcggcgctccatatttttttgagcggcaggaagagctgggaggagcagtgtatgtgtatctgaaccaggggggtcactgggctggcattagtcccctccggttgtgcggcagccctgatagtatgtttggtatctcactggcagttctcggggatctgaatcaggacggcttcccagatatcgccgttggcgctcctttcgacggcgatgggaaggtgttcatttaccatggtagttccctcggtgtggtagctaagccctcccaggtcctcgagggagaggctgttggaatcaaatcgtttggctactccctctccggttccctggatatggatggaaaccagtaccccgaccttctggttggctctctagccgatactgcagtgctattccgagcgaggcccatccttcacgtgagtcacgaagtaagtatcgccccacgctccatcgacttggagcaacccaattgcgccggtggtcatagcgtgtgcgtggacttgcgggtatgcttctcttacatcgccgtccccagttcctattcccccacagtggcgcttgactatgtcctcgacgctgatacagacaggcggctgagagggcaagttccgagagtcacctttctctccaggaacctcgaagagccaaaacaccaggccagtggcactgtgtggttgaagcaccagcacgatagggtgtgcggagatgctatgtttcagctacaggaaaatgtgaaggacaagctaagagcaatcgtggtgacactgtcatactctctgcagacaccaagacttaggcggcaggcaccgggacagggcctgccaccagtggccccaatcctgaatgctcaccagccaagcacacagagagcagagatccactttcttaagcagggatgtggagaagacaagatctgtcaaagcaacctgcagctcgtgcgtgctaggttttgcacaagggtctcagacaccgagtttcagcccctgccaatggacgtcgacgggacaactgctctctttgcactgtctggccagcccgtgattggtctcgaactcatggtcaccaacctgccatcagaccccgcacaaccacaggccgacggggatgatgcacatgaggcccagctgttggtaatgctgcccgattctctacactactccggcgtccgagccctggacccggctgagaagcccttatgtctgtctaacgagaacgcttcacatgtagagtgcgaactagggaacccaatgaaacggggagcacaggtgacattctacctaattttgtcgacgtcagggatctcaatagagactactgagctggaagtggagctgctgctggccacaatttctgagcaagagctccaccctgtgtcagccagggcaagggtgtttatcgagcttcccttatcgatagcgggaatggcaatcccacagcagttgttcttcagtggtgttgttagaggagagcgagcaatgcagagcgaacgcgatgttgggagtaaagtgaaatacgaagtgacagtcagcaaccagggacagtctctaagaaccctaggttctgctttcttaaacatcatgtggcctcatgaaatcgctaatggaaagtggctgctgtacccaatgcaggtggagctcgagggaggtcagggcccaggacaaaaaggcctgtgctcccctagaccaaatatactgcatcttgatgttgacagtcgggaccggagaaggagagaactcgagcccccagagcaacaggaaccaggggagcgccaggaaccgagcatgagctggtggcctgtcagtagcgcagaaaagaaaaagaacataactcttgactgcgccagggggacagcaaattgcgtcgtgttttcttgtccactctactcattcgacagagcggcagtcctccatgtgtggggacggctctggaacagtaccttccttgaggaatactctgcggtcaaaagcttggaagttatcgtcagggctaacattactgtcaaaagcagtattaaaaatctgatgctgcgcgatgccagcaccgtgataccagtgatggtctacctggatccgatggctgtagttgccgagggtgtgccctggtgggtgatcctattagccgtgctggctggcctgctggttttggctttgcttgtcttgctgctttggaaaatgggttttttcaagagggccaagcatcccgaagctaccgttccacaataccacgcagtcaaaatcccaagggaagataggcaacaattcaaagaagaaaagacaggtaccatactccgaaacaactggggcagtcctcgtcgtgagggccctgatgcccacccaattctcgctgctgacggccatccagagctgggcccagacggacaccccggacctgggacagcctag

SEQ ID NO: 29056 - DNA, 3546 bp, synthetic construct
  misc_feature 1..3546: note = Description of Artificial Sequence: Synthetic coding sequence
  source 1..3546: mol_type = other DNA
atggccggagctcgaagccgtgatccgtggggtgcgtctgggatttgctatctgttcggctccctgctggtcgaactgcttttctctcgggctgtcgcctttaacctggatgttatgggagccctgcggaaggagggtgagcctgggagcttattcggcttcagtgtggcactgcacaggcagttgcagccaaggcctcagtcttggctgttggtaggtgcgcctcaggctctggctctgcctgggcagcaggcgaataggacagggggactttttgcatgccccctgtctctcgaggagacagactgctatcgggtcgacatcgatcaaggcgctgacatgcaaaaggaatccaaggagaatcaatggctgggtgtgtcagtgaggtcccagggccctggcggaaaaattgtcacctgtgcacaccgctatgaggccaggcagcgggtcgatcagattctcgaaactcgggatatgattgggcgttgctttgttctttctcaagatctggctattcgcgatgaactcgacggaggtgagtggaagttctgtgagggtcggccacagggtcacgaacagtttggtttttgccagcaaggaaccgcggcagctttttctcccgactcacactatctgctgttcggggcacccggaacctacaattggaagggaaccgcacgggttgagctttgtgctcagggttctgccgacctggctcacctggatgacggtccctacgaagccggtggcgagaaagagcaagatcccagacttattcccgtcccagccaattcctacttcgggttgctctttgtgaccaatatagacagctccgacccggatcagttggtctacaagactctagaccctgcggatcggttgccaggacccgcaggggatctcgcactgaactcatatctaggcttcagcatcgatagcggcaaggggctggtgcgagcggaggagttaagcttcgtcgccggtgctcccagggccaaccacaagggcgctgtcgttatcctgcgaaaagatagtgcgtcacgccttgtccctgaggtgatgctatccggtgagaggctcacctccggcttcgggtatagcctggccgttgctgatttaaattctgatggctggccggatctgatcgtgggggcaccatattttttcgaaaggcaggaggaactggggggtgcggtgtatgtgtacctgaatcaggggggtcactgggccggaatctcaccactaaggttgtgtgggtccccagacagtatgtttggaataagtctggccgttctcggagatttgaaccaggacggctttcccgatattgcagttggcgctccatttgacggagatggcaaagtctttatttaccatggttcgagcctcggggtcgtggccaagccaagccaggtgctggagggagaagcagtgggcattaaatcttttggctacagtctctctggatcactcgatatggacgggaatcagtacccggacctcctggttggcagcttggcagacaccgcagtgctcttcagggctcgcccaatactgcatgtatcccacgaggtgagcatagctccgagaagtattgacctggagcagcccaactgtgcgggtggacattcagtgtgtgtggacctgcgcgtgtgtttcagctacatcgccgtgccttctagttattctccaacagtagcacttgattacgtgctggacgcggacacagacaggaggctgagaggccaagtcccgagagtgacctttctctctagaaatctcgaggagcccaagcaccaagcctccgggactgtttggctcaagcatcagcacgacagagtgtgcggagatgccatgtttcaattacaggagaatgtgaaggacaagctgcgggctattgttgtgactctctcctacagtctgcagacgccccgactcaggaggcaggcgcctggacaaggcctgccacccgtggcaccgatattgaatgcacaccaaccatcaacgcaacgcgctgagatccacttcctcaagcagggttgcggcgaagacaagatctgccagagcaacttgcagcttgtccgggctagattctgtacaagagtgtccgatacagaattccaacccttgccgatggacgtcgatggtacgaccgcgttgttcgccttaagcggccaacccgtcatcggactggaactcatggtgacaaatctcccctccgatccggcacagccacaggcggatggggacgatgcacatgaagcccagctccttgtgatgttgccggactccttacactattctggcgttcgagcgctggaccccgctgagaaaccgttgtgtctatcaaatgagaacgcctcgcacgtggagtgtgaactcggaaaccccatgaaacgcggagctcaggttacgttttatctcattttgtcaactagcggaatctctattgaaacgacagagctggaagttgagctcctgctggccaccatcagtgagcaagaactccacccggtgagtgcaagggctcgcgtgttcatcgaacttccgttgagtattgctggtatggctattcctcaacagctgttctttagtggtgtagttcggggagagcgcgctatgcaaagcgaaagagacgtgggaagcaaagtgaaatacgaggtgactgtgagcaatcaggggcagtctctcaggacgctaggctccgcctttttaaatattatgtggccacatgagattgccaatggcaagtggctgctttacccaatgcaagtggagctggagggtgggcagggccctggacaaaaagggctttgcagcccacgccctaacatcttacatctggatgttgactccagagacaggagacgcagggaattggagccccctgagcaacaggagccgggtgagaggcaagagccgtctatgagctggtggcccgtctcatcagctgagaagaaaaaaaatataactttagattgcgccagaggcacagccaactgtgtcgtcttctcttgtcccttgtatagctttgatcgggctgcagtgttgcacgtctggggcagattatggaattcaacttttctagaagagtactctgcagtgaagagcctggaggttatcgtgcgagcaaatatcactgtgaaatccagcattaaaaatctgatgctgcgtgatgccagtactgtaatacccgtgatggtttacctagaccctatggcagtcgttgcggagggagtgccctggtgggtgattctgctcgccgtactggccggactacttgtacttgctctcctcgtcttgcttctgtggaaaatgggttttttcaagagggccaagcacccagaggccaccgtgccgcagtatcacgcagttaagattccacgcgaggaccgacagcagttcaaagaagagaagaccggcacgattcttagaaacaattggggcagtccccgtcgcgaagggccagatgcccaccccatcttggcagctgacggtcatccagagcttggccctgacggtcatccgggacccggtactgcatag

SEQ ID NO: 29057 - DNA, 3147 bp, synthetic construct
  misc_feature 1..3147: note = Description of Artificial Sequence: Synthetic coding sequence
  source 1..3147: mol_type = other DNA
atggcattccctcccagacgacgccttagactcggtccaaggggattaccgcttcttctgagtggcctgcttctccctctgtgccgcgcattcaatttggacgtcgactctcccgctgagtattcaggtcccgagggctcctatttcggcttcgcagtggattttttcgtaccctctgcctcctctcgcatgttcctcctggtgggggcaccaaaggcgaacaccacacaacctggtattgtggaaggtgggcaggtgcttaagtgcgattggtcctccacccggcgatgccagccaatcgaattcgacgctactggtaatcgcgattatgctaaggacgaccccctagaattcaaatctcaccaatggttcggcgctagcgtgcgttctaaacaagataagatcctggcttgtgcgccactgtaccactggaggaccgagatgaagcaagagcgtgaacccgttggtacttgttttctgcaggatggtacaaaaaccgtcgagtacgcaccatgcaggtcacaggatatcgatgcggatgggcagggtttttgccagggtggattcagtattgacttcacaaaagcagaccgagtactgctcggaggtcccggatctttctactggcagggccaactcatcagcgaccaggtggcagaaatagtgagcaagtacgatccaaatgtctactctatcaagtacaacaaccagctggctacacggacggctcaggcgatctttgatgactcctacttgggttattccgttgctgtcggggacttcaacggggatgggatcgacgactttgtttctggcgtgcccagggcagccagaaccctgggcatggtctacatatatgacgggaaaaatatgagctccctgtacaattttactggcgagcagatggctgcttacttcgggttctccgtggcggcaaccgatatcaatggcgatgactacgcagatgtatttataggcgcaccattgttcatggatagaggctctgacgggaagctgcaggaggtcggccaggtttctgtctccctccaacgtgcctctggggattttcagactacaaagctgaacggttttgaggtgttcgcacgctttgggagtgctattgctccactgggggacctggatcaagatgggttcaacgacatcgccatcgccgctccttatggaggcgaagataaaaaggggatagtgtatatctttaacggaagaagtaccggtctgaacgccgtgccgtctcagatactcgaagggcagtgggcagcgcgatccatgccaccttctttcggatattccatgaagggggcaactgatatagacaagaatggctacccggatctcattgtcggggcattcggagtcgaccgagctattctgtaccgggcacggcctgtcattacagtgaatgccggattagaggtgtacccctccatccttaatcaagacaacaagacgtgctcactgcccggaaccgcacttaaggttagctgctttaatgtgcgcttctgtctgaaagcggatggaaaaggcgttctaccccgaaagcttaacttccaggtagaactgttgttagataaattgaagcagaagggagccattcggagggctctctttctgtactcacggtccccttctcattccaagaatatgacaatcagtaggggtggactgatgcagtgcgaagaactgattgcctacctcagggatgagagcgaatttcgggataagctgacgcctattacaattttcatggaatatcgcctggactatcgaactgccgctgataccactggcctccagcctattctgaaccaatttacccctgcaaatatctctcgccaggctcatatcttactggactgtggagaggataacgtgtgtaagccaaagctcgaagtgagtgtcgactcagatcagaagaagatctacattggggacgacaacccgttgactctcattgtcaaagctcagaaccaaggggagggggcttatgaggcggagctgattgtgtcaattcctctgcaagcggattttattggtgtggtaagaaataatgaggctctggcacggctatcctgcgcattcaaaaccgaaaaccagacaaggcaggtcgtatgcgacctcggcaacccgatgaaggcaggcacacagcttctggccggattgagattttccgttcatcaacaatctgagatggatacgtccgttaagtttgatctgcagattcagtcatccaatttgttcgacaaagtatcaccagttgtgtcccataaggtggatctggccgtactggctgctgtggagataaggggggtttcctcacccgaccacgtctttctgcctatccctaactgggagcacaaggagaacccagaaacagaggaagacgtcggtcctgttgtccagcacatttacgagctcaggaataatggtccctcttcctttagcaaagccatgctacacctccagtggccatacaagtacaacaataatacactgttatacattttgcattacgacatcgacggacccatgaactgtacctctgatatggagattaaccccctgcgcattaagatctcctccctgcagaccacggagaagaatgacactgtcgctgggcagggggagcgagaccatctgattaccaaacgtgatctcgcccttagcgagggcgatattcatactctcggatgcggagttgcgcagtgcctcaagatagtctgccaggtgggtcggctagatagaggcaaatccgcaattctatacgtgaagagtctgctctggactgaaacctttatgaataaagaaaaccagaatcattcttatagcctcaagtcttccgctagctttaatgtaatagaatttccatacaagaatctgccgatagaagatatcacgaatagtactctcgtgactactaatgttacgtggggtattcagcccgctcctatgccagtgcccgtgtgggttataatactggctgtgcttgcgggactgctcttgttagcggtgctggtattcgtcatgtatcgaatggggttctttaagagagtaagaccaccccaagaagagcaggagagagagcagctgcagccccacgagaacggcgagggcaactcagagacatag

SEQ ID NO: 29058 - DNA, 3039 bp, synthetic construct
  misc_feature 1..3039: note = Description of Artificial Sequence: Synthetic coding sequence
  source 1..3039: mol_type = other DNA
atggccttccctccgaggaggcgcctgcgtttggggccacgtggattgcccctgctgttaagtggcctgctccttccactctgtcgtgctttcaacctggatgtcgactctcccgcagaatatagtggcccagagggcagctattttggcttcgccgtggacttctttgttccttctgcctcatctcgaatgttcctcctggtgggcgctccaaaggcaaatacaactcagcccggtatagtcgagggtgggcaagtgctgaaatgtgactggtcctccacaagacgctgccagccaatcgagttcgacgccacaggtaaccgcgactacgctaaggatgatcctcttgaattcaaatcgcaccagtggttcggtgcaagtgtcaggtcaaaacaagataaaattcttgcatgtgcccctctgtatcattggaggacggagatgaagcaggaaagggagccggttggcacctgttttctgcaggatggaacaaagacagtggagtacgccccatgtagatctagacagttgatcagcgatcaagtggccgaaatcgttagtaagtacgatcctaacgtgtactcaatcaaatacaataaccagctcgctactcgaacggctcaggctatctttgatgacagctacctgggctatagtgttgccgtgggagacttcaatggggatggcatagacgatttcgtgtctggggtgccgagggcggcaagaaccctgggaatggtatacatatacgacggaaagaacatgtcaagtctctacaatttcacaggagaacagatggcagcatacttcgggttctctgtagccgctaccgacataaacggcgacgactatgctgatgtcttcatcggcgcaccattgttcatggacaggggatcggatggtaagctgcaagaggtggggcaggtgagcgtttccctgcaacgagcaagcggagactttcagaccaccaaactgaacggctttgaggtgttcgcgaggtttggctctgcaatcgctccgctgggtgatttggatcaggacggttttaatgacatcgccatcgcggcaccttacgggggtgaagataaaaaggggattgtctacatctttaatgggaggagtaccggcctaaatgccgtcccctcgcagatattggaaggacagtgggctgcaagatcgatgcccccatcttttgggtattcgatgaaaggagccactgacatagataagaacgggtatcccgatctgatcgtgggcgcattcggggtggaccgagccatactgtatagggcgcgacccgttatcacagtgaacgcgggactggaggtgtatcctagtatactcaatcaggataacaaaacgtgttccttacctggaaccgcactaaaggtttcatgctttaacgtacgattctgtctcaaagctgacggaaagggcgtgctgcctaggaagctaaacttccaagtcgaactgctgctggataagctcaaacagaagggcgctatccgcagagccctgtttttatacagccgttcccccagtcactcgaagaatatgacaatcagtcgcggtggacttatgcagtgtgaggagctgatagcctatctgcgcgacgagtccgaattcagggataagctgactcccattactatttttatggaataccgtttggactaccggactgccgctgataccaccggcctgcagccaatacttaatcagtttaccccagcaaatatcagcagacaggcccatatccttctcgattgcggcgaagacaacgtgtgcaagcccaaattagaagtgtccgtggatagcgatcagaagaaaatttacattggtgacgataatcctctcactctgatcgtgaaggcccagaatcagggagaaggggcttatgaagctgagctgattgtcagcattccactgcaagctgatttcataggagtcgtaagaaacaacgaagctttggccaggttgtcctgcgcattcaagaccgagaaccagacgcgccaagtagtgtgtgacctgggcaatcctatgaaggccggaacacagctactggctggtctaaggttctccgttcaccagcagagcgagatggatacaagtgttaagttcgacctgcaaatccagagctcgaatctgtttgacaaggtctctccagtcgtgagccacaaggttgacttggccgtccttgctgcagtggaaatcagaggggtctcctccccagatcacgtatttctgcctattccgaactgggaacacaaggagaaccctgaaacagaggaggacgtaggaccggtcgtccagcacatctacgagctgagaaacaacgggccatcctctttttccaaagcaatgctgcacctccagtggccctataaatataacaacaatactttattgtacatactgcattatgacattgacgggccaatgaattgcactagtgacatggagatcaatcctctgagaatcaagatttccagtcttcagacaactgaaaaaaacgacaccgtggcgggtcagggagaacgcgatcatttgatcactaagcgggacctcgcattgagcgaaggcgacatccacactctgggatgcggggttgcccagtgcctgaaaatagtgtgccaggttggcaggctggaccggggaaaaagtgcaatactgtacgtgaagtcactgctgtggaccgagacgtttatgaacaaagagaaccagaatcacagctacagccttaaaagtagcgcttctttcaatgtgattgaatttccttacaagaatttgcctatcgaggatattaccaatagtaccctggtcacgaccaacgtgacctggggaattcaaccagcccctatgcccgtgccagtgtgggtgattatcctcgcagtattggcaggactgctcttgctcgctgttctggtgtttgtgatgtaccgcatgggttttttcaaaagagtcagacctccgcaagaagagcaggaaagggagcagctgcagccacatgagaacggagagggtaacagcgaaacctag

SEQ ID NO: 29059 - DNA, 3009 bp, synthetic construct
  misc_feature 1..3009: note = Description of Artificial Sequence: Synthetic coding sequence
  source 1..3009: mol_type = other DNA
atgctgctgggaacgttgctccttatactctatatcttgatgctttgtcgcatgtttctgttggtcggagcgcctaaagccaataccacacagcctgggatcgtggaaggagggcaagttctgaaatgcgactggagtagcacacgtcgctgtcaacctatcgagtttgacgcgactggcaaccgcgactacgcgaaagacgaccctcttgaatttaaaagccaccagtggttcggcgcttctgttcggagtaagcaagacaaaatccttgcgtgtgcacctctctaccattggcgaacagagatgaaacaggaacgggagccggtaggaacttgtttcctgcaggacgggaccaaaaccgtcgagtacgctccttgcagaagtcaggacatagatgccgacggtcaggggttctgccaagggggtttcagtatcgattttactaaggcagaccgagtgctgctgggcggtcccggtagcttctactggcagggacagctgatcagtgaccaggtggccgaaatcgtctccaagtacgaccccaatgtgtattctatcaaatataacaatcagttagcgacgcggaccgcccaagccattttcgatgacagctatttggggtattccgtcgctgtgggcgattttaatggcgacggtattgatgacttcgtgtcaggggttcccagggccgcaagaaccctgggtatggtctatatctacgacggcaagaacatgagctccctgtataacttcaccggggagcaaatggcagcttactttgggttctcagtcgccgctaccgacatcaacggtgacgactatgctgacgtgtttatcggtgcccctctctttatggaccgaggcagcgacggtaagctgcaggaagttggacaggtctctgttagtttgcagcgtgcaagcggagattttcagaccacgaagctgaatggattcgaagtgttcgcaaggttcggaagcgctattgctcctttgggggacctggaccaggacggattcaatgacatagcaattgccgcaccctacgggggtgaagacaagaaggggattgtgtatatcttcaatggtcgaagcactggactgaatgccgtgcccagccagatccttgaggggcaatgggcagctagaagtatgccgcctagtttcggatactccatgaaaggcgctacagacatcgataaaaatggttacccagatctgatcgtaggcgcatttggcgttgatagggccatactctacagggccaggccagtcatcacagttaacgcagggctggaagtgtacccatctatactaaaccaggacaacaaaacttgtagcctgcccggaaccgcactgaaggtatcttgcttcaacgtccgtttctgcttgaaggccgatggtaagggcgtgctgcccagaaaactcaactttcaggtggagctgctgttggataaactaaaacagaagggcgctattaggagggccctcttcctctattctagatcaccatcccactcaaagaacatgacgatttctcgcggtgggctgatgcaatgtgaagagctgattgcttacctccgtgatgagagcgagtttagagataaactcactccaatcacaatattcatggaatacagactagattacagaaccgccgctgataccacgggactgcaacctattctcaaccagttcactcctgcaaatatttctcggcaggcccatattcttctggattgtggtgaagacaatgtctgtaaacctaagttagaggtgtctgtggattctgaccagaagaaaatctacatcggagacgataaccctctgaccctgatagtcaaggcacagaatcaaggtgaaggagcctacgaggctgaactgatagtctcaataccgctccaggccgacttcattggagtggtccggaacaacgaggccttagcccgtttgtcttgcgcctttaaaactgagaatcaaacgcggcaggtggtgtgcgatctgggcaatccaatgaaggcgggaacccaacttctcgcaggcctgagattttcggtccatcaacagtccgagatggacacgtcagtgaagtttgacctgcagatacagtcgagcaacttgtttgataaggtgagcccagtcgtatcgcacaaagtggacctggcagtgcttgccgctgttgagatcaggggtgtatcttctccggaccacgtgtttttacccattcccaattgggagcacaaggaaaatcctgagacggaagaagacgtaggtcctgtcgtccagcatatctacgagttaagaaataacggcccaagctcctttagcaaagcaatgttgcacttacagtggccttataagtacaacaacaacacactgctgtacatacttcactacgacatagatggacccatgaattgtaccagtgatatggagatcaacccgcttcggattaaaatcagctctctccagactaccgagaaaaacgatacagttgctggccaaggcgagcgggatcatctcatcacgaaaagggacttagctcttagcgagggagacatccacacattagggtgcggggtagctcagtgcttaaaaattgtttgtcaagtgggcaggttggaccgaggtaaaagcgccattctctatgtaaaaagcctcctgtggaccgagacattcatgaacaaggagaaccaaaatcacagctattctctgaagtcctcggcctcgtttaacgttatagagtttccctacaagaacctccctattgaagatatcacaaactccaccctggtgacgactaacgtgacctggggaatccagcccgctccaatgccggtacctgtgtgggtaataattctggctgtgttggccggtctcctgctattagcggttctagtgtttgttatgtaccgcatgggttttttcaagcgcgtgcgccctccgcaagaggaacaggaaagagaacagctgcagccacacgagaatggtgagggcaattctgagacctag

SEQ ID NO: 29060 - DNA, 1449 bp, synthetic construct
  misc_feature 1..1449: note = Description of Artificial Sequence: Synthetic coding sequence
  source 1..1449: mol_type = other DNA
atggcttttccaccccgtaggcggctgcgcctggggccacgtggactgcccctgctactgtctggactgctgttgccactttgtcgggcatttaatctggacgtggatagccctgccgagtacagcggacccgaggggtcctactttgggtttgcggtggacttctttgttccttccgcctcctccaggatgttcctattggtgggggctccgaaagccaacactacccagccgggaattgtcgaaggcggacaagtgttgaaatgcgactggtcctctactaggaggtgtcagcccattgagttcgacgcaaccgggaaccgtgactatgccaaggacgatccactggaattcaagtcccaccagtggtttggcgcttctgtgcgttcgaagcaggacaaaatcctcgcgtgcgcaccactgtatcattggcgcaccgagatgaagcaggaacgggaacctgtagggacatgcttcctccaggatggaaccaagacggtggagtatgccccttgtcggagccaggacatcgatgctgatggccaagggttctgtcaggggggattctctatcgattttacgaaagcagatcgggtcctgttaggcggacctggctccttctactggcaggggcagttgatctctgaccaggttgctgagatagtaagcaagtacgaccctaacgtctattctattaagtacaataatcagttggcaacccgcacagcccaggccattttcgatgactcctacctgggatattctgtggcagtgggagactttaatggagatggtattgacgatttcgtttcaggcgttcctcgtgccgctcgaacccttggcatggtatatatctatgacggtaagaacatgtcttcgctctacaactttactggtgagcagatggccgcatacttcggattcagtgtcgctgccacagatatcaatggggacgactacgctgatgtcttcattggagcacctttgttcatggatcggggaagcgacggtaaactgcaagaagttgggcaggtgtcagtcagtctgcagcgcgcatctggcgacttccagacgactaaacttaatggattcgaagtgttcgcaagatttggcagcgctattgcgcctttaggcgacttggaccaggacggatttaatgatatcgctatcgccgcaccctacggaggggaagataagaagggtattgtctacatctttaacggtcgctccaccgggctgaatgctgttcctagtcaaattctcgagggccaatgggcggctcggagcatgccacctagttttggctactcaatgaagggcgcaaccgacattgataaaaatgggtacccggatctgatcgtgggagcgtttggtgtcgacagggccattttgtatcgcgctagacctgtaattcccatttttgtccagctgcaccatgtggtgcactag

SEQ ID NO: 29061 - DNA, 2397 bp, synthetic construct
  misc_feature 1..2397: note = Description of Artificial Sequence: Synthetic coding sequence
  source 1..2397: mol_type = other DNA
atgaacttacagcctatattttggatcgggctgatttcctcagtttgctgcgtgtttgcccagacagatgagaacaggtgtcttaaagcaaatgctaaatcctgtggggaatgcatccaggctggaccaaattgtggctggtgtactaatagcactttcttacaagaaggtatgcccacaagcgccagatgcgatgatctggaggctctcaagaaaaaaggttgtcccccagacgacatcgagaaccctaggggatcaaaggacatcaagaaaaataagaacgtgaccaatcgtagcaaagggacagccgaaaagctcaagccagaagacataacccagattcagcctcagcagcttgtcctcagactccgctccggtgagccacagaccttcactctgaaattcaagcgagctgaggactacccgatcgatctgtactatttgatggacctgagttactccatgaaagatgacctggaaaatgtgaaatctcttgggacagaccttatgaatgagatgcgacggatcacatccgactttcggatcggtttcgggtcctttgtcgaaaagacagtcatgccctatatttcaacaaccccagcaaaacttcgtaacccttgcacttctgagcagaattgtacctcccccttttcttataagaacgtgctcagccttacgaacaaaggtgaagtttttaacgagttagtgggaaagcagaggatctctggaaacctggacagcccagagggcggatttgatgccatcatgcaagtggctgtctgtgggtccctcatcgggtggcgtaacgtcactagattacttgtgttttctaccgatgcaggatttcatttcgctggcgatggcaagcttggcggaatcgtactgccgaatgacggtcagtgtcacctagaaaataacatgtatactatgagtcattattatgactaccctagcatcgctcatttggtgcagaagcttagtgagaacaacatccagactatctttgcggtaactgaggaattccagccagtgtacaaagaacttaagaaccttatccccaagagtgccgtggggacgttgtctgccaactcttcaaacgtgatccaactcataattgatgcatataatagcctctcctccgaagtgattctggagaacggcaagctgagtgagggggtaaccattagctacaagagttactgtaagaatggcgtgaacggcacgggggaaaatggcagaaaatgtagtaacattagtattggcgacgaggtacagttcgaaatctccattacatcaaataaatgtcccaagaaggattcagactcttttaagattcgacctctggggttcacagaggaagtggaagtaatcctccagtacatctgcgagtgcgagtgccaatcagaagggattcctgagtctccaaaatgccacgagggcaatgggacctttgagtgcggtgcgtgccggtgcaatgaagggagggtgggacgccactgtgagtgctctaccgacgaggtgaacagcgaagatatggacgcctactgcagaaaggagaactccagtgagatctgttccaataacggtgagtgcgtttgtggccagtgtgtgtgtcgcaaaagggacaacacaaatgaaatctatagcgggaaattctgtgagtgcgacaattttaattgcgaccgcagcaacggcctaatatgcggcggaaatggcgtctgcaagtgccgcgtttgcgagtgcaaccctaactacacaggtagtgcctgtgactgctctctcgatacatctacatgtgaagcctctaacggacagatttgcaatggcagggggatttgtgaatgtggggtttgtaagtgtacagaccctaagtttcaaggacagacctgtgaaatgtgtcagacctgcctgggagtatgcgccgagcataaggagtgtgtgcagtgccgagcctttaataagggtgagaaaaaagatacatgtacccaagagtgttcctattttaatataacaaaggtggagagccgggacaaactgcctcagccagttcaaccagaccccgtgtcacactgcaaagagaaagatgtggacgattgttggttctatttcacttattcggtgaatggcaataacgaagtgatggtacacgtcgtggaaaaccctgagtgcccgaccggcccagatattataccaatcgttgctggggtggtggctggaatagtgctgatcggattagccctattactcatttggaaactgctgatgatcatccatgaccgacgagaatttgccaaattcgagaaggagaagatgaacgccaagtgggacacaggagagaaccctatctataaaagcgcagtaaccacggtggtgaaccctaagtatgaagggaaatag

SEQ ID NO: 29062 - DNA, 2478 bp, synthetic construct
  misc_feature 1..2478: note = Description of Artificial Sequence: Synthetic coding sequence
  source 1..2478: mol_type = other DNA
atgaatctccagcccatcttttggattggactcatctcctccgtctgttgcgtttttgcccagaccgacgaaaatcggtgtttgaaagccaacgcaaaaagttgcggcgaatgtattcaagctggtccaaactgtggttggtgcacaaattctaccttcttgcaggagggaatgcccacttccgccaggtgcgacgacctggaggcgttgaagaaaaaggggtgtcctcctgatgatatcgagaacccaaggggttctaaggatatcaagaagaacaaaaacgtgacgaaccgcagcaaaggtacagcagagaaactgaaacccgaggatatcacccagatccaaccacagcagcttgtcctgagactgcgatctggggagcctcagacctttacactgaagtttaaacgtgcggaagactatcccatagatttgtattacctgatggatctgtcttattcaatgaaggacgacttagaaaatgtcaaaagtcttggcactgaccttatgaatgaaatgagacgaataacgagcgattttcgcatcggtttcgggagcttcgtagaaaagacggttatgccttacatctccactaccccagcaaagctccggaatccttgcacctcagagcagaattgtactagcccttttagttacaagaacgtgctcagtttgacaaataaaggagaggtctttaacgaactggttggaaagcagagaatttccgggaacttggattcccccgagggcggattcgatgccatcatgcaagtcgcagtctgtgggtccttaattggctggcgtaatgtaacacgcctgctcgtgttctctactgacgccggttttcactttgctggggatgggaaacttggaggtatcgtgttaccaaatgacggacagtgtcacctggagaacaacatgtatacaatgagtcactactacgactatcccagcatcgcccacctggtccagaagctttctgagaacaacattcagactatcttcgccgtcaccgaggagtttcagccagtctataaggagttgaaaaatctcattccaaagtcagcagtgggcacgctttcggctaattcctctaatgtgatacagctaattatcgacgcttataattccctgtccagtgaggtgatactggagaatggcaagctttccgaaggggtaaccatttcgtataaatcatactgcaaaaacggagtgaacggaactggagagaacggtagaaagtgttccaatatcagtatcggggatgaggtccaattcgaaatctcaattacgtccaataaatgccccaaaaaggactctgactcatttaaaatccggcctttgggtttcaccgaggaggtggaagttatattgcagtatatttgtgaatgtgagtgccagagtgagggcattcctgagagtccaaagtgtcacgagggaaacggcactttcgagtgtggagcctgtcgctgcaacgagggacgggttggtaggcactgtgagtgctctaccgacgaagtcaattcagaagatatggatgcttactgtcgcaaggagaatagtagtgaaatttgctccaacaacggggaatgcgtgtgcggacagtgtgtgtgtcggaagagggacaataccaacgagatctacagcggcaagttttgtgagtgcgacaactttaactgcgacaggtctaacgggctgatctgcggtggcaatggcgtctgtaagtgtcgggtgtgcgaatgcaatccaaactacacaggctcggcctgtgactgctcccttgacacctctacatgcgaagcaagcaatgggcagatttgtaatggtagaggcatctgcgaatgtggtgtatgtaaatgcacagatcctaaattccaaggacaaacgtgcgaaatgtgccagacttgcttgggagtgtgcgcagaacataaagagtgtgtccagtgccgcgcatttaataagggcgagaagaaggacacgtgcacccaagagtgcagttacttcaacataaccaaggtggagagccgagacaagcttccgcagccagtacagcctgaccccgtgagccactgcaaggaaaaggacgttgacgattgttggttctatttcacgtattcagtgaacggcaataatgaagtgatggtccatgtcgtcgaaaatcctgagtgtcccacgggaccagacattatacccatcgtagccggagtggtcgcagggatcgtcctcatcggcctggcactcctcctgatttggaagttactgatgattattcacgataggagggaatttgcaaagtttgaaaaggagaagatgaatgccaaatgggacacctccctgtccgtcgcccaacccggtgtgcagtggtgcgatatcagcagtctgcagcctctgacgtcacgcttccagcagttctcctgcctgagtctgccgagtacttgggactaccgggtaaaaatactgttcattagagttccttag
